United States Patent Application Publication US 2014/0230087 A1 - sequence listing, part 18

SEQ ID NO: 12477 - DNA, 9701 bp, Vitis vinifera
  Intron number 6 from transcript GSVIVT01016092001 (locus G SVIVG01016092001) derived from phytozome v7.0 (chr-ID chr9 ; pos 18755441 to 18765141)
ttcctatttctcttgaggcagaggtattcaacttgtttatattcactgatatattttgttctgtgtttggttcattgtgttgccttagagattttatttttcatgtaatattgggtgggatacagttaagcacataattcttttgttttgtcttgttttatttgttttgtttttgggtcttttgtatatattattggactttttagttttctgttctttgaatactcatcttgacatgactagtggctggtgcctaatcgaggatgcatatgtgaagtaaaaagaaaattctatttttattactttagttttgtgttacttcttgtagggatcaagaaaccacataaacttgaagatgtataacaaataaaatatattcttggacaataaatgtttacaaaaataagaagatacatcttgtgaagtggttcattgtggtttggacaagagtaagggtgggttagggattctacgtctttcgttgttaaataagatgcttttgtgcaaatagatttggcagtttgctacagaaagaggtgccttttggacatgagtgattaggggcaaatatggagaggaagagggtgggtggtggtctggtgaagttagagatgggtatggagttgggctttagaaatctattatgaaggaacgtaacactttgttgggtcatttttcttttgtaatgggtaatgagagaagggtgaagttttggacagataagtagtgtggtgatgaaccattgtgtgcttccttcccctcttgttgacctccccctgcaaggaggatcttttacttggagtggaggtctttataatcaagcttgggccaggttggacagattccttgtgtctcccagctggcttgatcagttcagcaatgggatccagaaaagactgcctcgacccatctcagatcactttcctattctaattgaggggggtggcataagaagaggtccttcaccatttaggtttgaaaatatgtggcttaaagtggaagggtttaaagacctcatatagagctggtggtaagggatgtcggttagaggaagggctagctataagctggctacaaaactgaatgtgattaaacagaatttaaaaatctggaatagggatgtgtttgggagtctagaaagtaataagtttgcagctctactgcaagtgaaatactgggatcaggtggaaagtgagaggaggttgacagaggaagaaatctttattaaaaaagaagccaaagagggatatgctaagtgggtaaacctagaggaaatacactggagatagttatcaagggagttatggctaagggaaggggatagaaacacgggttattttcatcgtatgacaattgcacaccgaaggaggaactccatggacaaaataaaaattaatgggatatggttgtcagaggagcaagaagtaaggacaaggattgcagacgcctttaaacaattgctaacggaagatttggagtggaaggcggatataggggggctaaacttgaatcagatcagtcaccaagaagcggaaatcctggcgtttcccttctcggaggatgaagttcattcggccctaatggacatgaaggacaaggctccaggttcggacggcttcaccgtggccttttggcaatgctgctgggagttcgtgaaagaggaggttttagagatgtttaaggagttccatgagcaaaattctttcctcaagagcctcaacaacacatttctggtccttttaccaaaaaaaggaggggcggaggagctggggggtttcagacctatcagtcttttgggggggctgtacaaattattggccaaggtgctagccaataggattaaaaaagtgattggaaaagtggtttcctcggatcaaaatgctttcgtcatggataggcagattctggacgcctccttaattgcaaattaggtgattgattcttggcaaaaaaggggagagaaatgcctaatttgtaaattggatattgagaaggcgtatgacagcgttaattggcatttcttgatgagggttttgcaaaaaatggggtttgggtctaagtggagggattggatgtggagttgtatctcaactgctaagttttcagttctggtaaatggagtgcctactgggtttttctctaactcaaaggggctacgtcaaggtgaccctctatccccatacttgttcgtcatgggaatggaggtgttgagtgttcttattaggagggctatggaagggggttgcatttctgggtgcaacatctggtggggtagtgggtcgattgccaatatttctcatcttctctttgctgatgacacaatagtgttttgtgaggcaaagaaggagcacctgacctacttgagctggattttatgttggtttgaagctgcttcagggttaaggattaatctggctaaaagtgaaattatcccagtaggggaggtagaagagatcgtcgagatggttgtggagtttggatgcaaggtaggtcagttaccctcagcctacttggggctgcccttgggggcgcccaataaggcctcttccgtgtgggatggggtggaagagagggtgaggtggaaacttgccctttggaaacggcagtatatctccaaaggtggaagaatcaccctcataaagagtacgctggctagtatgcctttgtatcaattgtccctgttccgtgtgcctaagatagtggcaagaaggctagaaaagttgcaaagagactttttgtggggagggggaaatatggaaagaaaatcccacttagtcaattgggagatggtgtgtacgggtaaggagaagggggggcttggcttgaggaagttagtcctcttgaacaaagccttgctttgtaaatgggtttggagatttgctcgggccaaggacgagttgtggaagcaagtgcttacggtgaaatatgggcaagaggaacttgggtggaggactaagaaggcaaatgggggcgtttggcgttagggtttggaaggaaattctgaaggaatctgattggtgctgggataatatggctttcaatgtgggaaaaggcaccagaattagattctggactgatccttggtgtgggggtgtgtagttgtccctaaggttcccttagctctatgccgtggctgcacataggaacgccacagtgggagaaatgtgggaccagaattctggtcaaggaggctggaatttaaggtttttcaaagacttcaatgattgggagttggacttggtaggtgaattactccaagccttaaggggtcaaaggattacattggaggaagacttggtcttttggaagggaggaaaaaacgggcaatttggtgttaagaatgcgtacaacttattgatcagccccattatctccgttttccccaaaaatgacatttgggtggatagagttccaactaaattagcgttctttgtgtgggaagtcgcttggggaaaggtccttaaccttgatagacttcaaaagagaaggtggcaacttcctaatcgatgctttttatgtggtagtgaagaggaaaatgtaaatcatttgctcatttattgtacagtggccaaagtgctgtgagagattgtccttggattgttcggtgcccagtgggtttttctagaaactgtaaatgaggttctacttagcacgaagggctcgtttgtgggtaaaaagaggaaaaaaatatgaagatccattctgttatttattttttggacggtttggaaggagatgaatagattagcttttagggaggggagttagctatttagaaacttaagaatttttttgtttgtaatgtgtggggctgggcaaaattgtatagtggagcggagccgcgctcccttataggattcttggagtggttagcctccatttaagggttggtgagttttttgtctctttttggttgtgaggcctttgccgccttgtatactccctgtatgctatgcggcttttttgccttgtgttaacatatttcgtgtttacttatcaaaaaaaaaaaaagatgcttgggtggtggacatttggtttagttaggggagagagggcatcggaactcttgtttttcttgacctttgaatgattggaaggtggatgaagttatggatttatttttacggttgcatggattggcaattgatagagaggggtgttgaaagagagagagagaaaggagaaaaaccttaattctcattcatgtaatgtctacttacaattgagatatatatatatacaaggctaggagtcctaactaccatacatgtgacctatattaacaaggaaagataatatactataaatacattatattcaacactccccctcaagctggagcatatacgtcatatgcaccaagcttgttacaaatatatttaatcctaggacctctgagagatttagtgaagatgtctgctagttgatcatttgaattgacaaaacttgtagcaacacatcctgatgcgatcttctctctaatgaaatgacagtcaacttcaatatgcttggtcctttcatgaaagactggattggatgcaatatgtaatgcggcctggttatcacagatgagtttcatctgttcatcctttccaaatctcaactcctgaagaagatgtctcaaccatatgagttcacatgttgccaaagccatagctcgatactcggcttcagcgctagatctggccactacatcttgtttcttactcttccaagatattagattacctccaataaaaacacagtaccctgaagtggaacgtctatctgtgggtgagccagcccaatctgcatctgtgtaaccaacaacttgagtatgacctctgttctcgtacaacacaccttggcctggtgtacttttgatatatcgaagaatacgaattacggcatcccaatggctatcacatggtgactgtaggaattgactaacaacactcacaggaaaagaaatgtctggacgagtaatggtgagatagttcaatttacctacgagccgtcgatatctcccggggtctcctaaaggctccccctgtcctggtacaagtttgacattcggatccataggtgtgtctaccggtttacagtctaacataccggtttcttccaggatgtctaaagcatacttcctttgggaaaggaccacaccagaactggattgagctatctcaattcccaagaaatacttgagtttccccaagtctttggtctgaaagtgggtaaaaagatgttgctttagtttctgaataccatcctgatcactgcctgtaatgacgatgtcgtccacataaacaaccagataaatacactgccccaaggagttatgatgataaaaaactgaatggtctgctgtactgagaagcataccaaactcttgaacaacagaactaaaacggctaaaccatgctcgaggagattgtttcaagccatatagagaacggcgtaacctgcacactaaaccagactccccctgagcaacaaaaccaggaggttgctccatataaacttcctcggcaagatcaccatgaaggaagacatttttaatatccaactgataaagaggccaagaacacataactgtgcatctatcttcctccactgtacgcggtcaacctcagggatatctgcctcctgggaaaccaagtgatcctcatatccttgacccataaaccaaagttcaacagaggcagaccaggaaagataattttcactgccaaccaatttctctgaggtaatcataggagatccagagataacagaggtaaagatctgatttttggtggacatattcacgtatttggatcgaagagagccctaatacggcttcagattgcggcgtggcaccaccgaaaaagggagacggcctcagattgcgacgtggtaccaccagaaaggtagatgaacacttcccaaggcacgtgcagggattggggtggagagaaagtagccggaacttcgccggaaaggctgtttggagggctgacggagacaaaaatccccaaaagaggtacgtgcagggctcggatgggagaaccaggtaggtagggatgctggtcggcggcaggcgaggctggaggaggaggcgcgttgccggaaaaggcctcacgcgccctcacgcgccggcgcgtgagatgcagtcgccggccggaaaatggagcgtggccggcgcgtggatcctcttttgatgccggtgccttcacaaaagttggagatctcctccaggcgctccttctggtatggtcagtgtcggaaaaataggtcgccgggaaaatttcgctggcggtgagtggtttctaacgatgatccgactgaccggaaagtgttgggagatggggagggtgaccggaaagaaacacagtcaccggaaggtttcccggagttgatgacacgggaaacaggaaagaattaggttttcttccttggctctgataccatgttgaaagagagagagaaaggagaaaaaccttaattctcattcatgtaatgtctacttacaattgagatatatatatatacaaggctaggagtcctaactaccatacatgtgacctatattaacaaggaaagataatatactataaatacattatattcaacaagggggaagataagatggtatggctgaattcggatattaataagttctctattaagcaattttataccgtcttggaaaccagggttattgtttcttttccaacatgggtagtttggaattcttgggtcccttctaaagttaatttttttgcttgagaggcttcacggggaaaagttttgacattagatcatcttaaaaaacatagatggtctttggtcaataggcgttttctttgcgaacatgaagaatccatagatcacattctccttcattgttcattagttaggattctctagaagttgttgtttgatctttttggtatccattgggtgcaatctcctacagttaaggaggctttattaaggttacatgactcgtttgtgggcaaacaaagaaaaaaggtttggaaagtagctcctttatgtattttttggacggtttggagggaaagaaatctcagggcgtttgataatgaggagcattatgctctttctatgttctttcttaggaatttgttctattgcataaagtagtacttagagatagattccttgtatttttttcattttattgagtggttgggtccttattaggggaggaagttgttgttggggttcttttttggtttttgtgcttttaggcgctatttgtatgctccctctgtactttgtggtgtccttttttttttttttaaaaatgaatttggtgtttatttaccaaaaaaaaaaaaaaaattatataatgtccttaaaaatatagatgaaaaagaagtaattatcagttctatgatgatgcttgtcttacatgtagcaatcttgtggttgctagtttttcatttggtcaaatcagaaggcatttctatggtgttcttgtttcatatatccttgatgacgtttttatgtttctatgcgtactccaaattaaataaatagctaaataaaaaaaaggaaaaagaaaacctatcctaggtttggatcttattagtttagtttgatttggaaattacaacttgaacctaggttttgtttactgaccaccaaagtagagttggaatggagtttacttacgcaacatgtcccattatcatgcctatgtaaatgggtttcttccccgaacaaatatgatcacaagcattggcggagccaataagggcctagaaggggcacatgcctcccctcaaatttttttccctcaaaaaaatctcatatatataattaaaggttttcaaataataaaaattaaaatagagacttaatactccacaaaagataaatttaattttgaatgtttaaaatttaatttaatttttgtcatgcatacaacaacttatttatttttcattctttcatcacatgtaaaatttaaattttattataaattttctaataatattaaattttgggtaattttacgtttggcattttattgaataattgttttaatttgtatgttctcttcaattttgagtttgaatttttaaattttgagacttaattaaataatgtctaatttagaaataagttaaataattatattagattgtgtgctatttaattattcacattatgagaatttatgtttaactttaaatttttattttactaatagtttcattgtaatattatcatatcatagaaaattttaaggaaataatctcattacttttagttgattttatgcttaatcctatttggtaacaattttttaaaatacttttttgttcttcgggacaaaaaaaagaaaaaaggaaaacatatttggtttagttgttttcactttttttttaggattattttaaaaaataatcatataaatatgaataatgattaaaaataaattattatatataaaaagcttaaaacatatttaaaaatatagaaaacagattaagaacattttagaatccaaaacgaactttaatttgttctacaaaatttaagagaacaattttcaaaaactatttttgaaaacattttccagaaaaagccttacttatttataaaagaattaaatttattagaaaaatgattaaattccttgaaatttttttttatttttttcctataataattaataaaattattgaaaattttatagccatatttctcgctattttctagtctttttaaaaattcctttgaatcattattattattattattattattgttagtattgtaaaatctaactgtttatatatatgtaatcattctgcatatttcaactttgccccttctaaccaaaatctctggctctgcccctgattacaagcaactattttttattttatttaccttgctctacctattactaattatttctataattcaaaatccatgaatgggatatctttgtctgttagaccactctcctccctgcctggaaaccttttgtgaagccaccacccgtattcttggaaatgaagcaatttaattcttttatgatcaactcagaaagatatgggaagctggctggctatttattttagatggtttgataaaagattctgtttacatttccatgttaagatgggattccacttatgggtgttgcaatagcttaagagctatgcagaagcaattgcttcctcacatgaatcacactgtatactgacatggtctcatgaaaagatagctcctacggtccagagatgaaatgtctcatgagtaaggagaccttcttgaaatagatgaaattaaactcttgtatgtccagtatgacatattatatgtacattgaaatgtcaaagcaggtcatacatgcatagaactagtcaagaagttagtattttttcatttattttatttttcaagttgatgagaacttccacatatgtagagttggaactggaagattcaaatggaaaagaactgcttaaataaaaagaaaacaaaataaagaagatctttcttgtcatctagtctgaaaatttacacaccataagcctttagatatataatagatcacaaggtagatttgatttcttctaaccatgaaatgtttctagtacttgacttggcatactcatttgtatttagcatttgtaaaaaaatttcccctcacacatcataattgattcttaaaaaaaatttcttttgtgatacag

SEQ ID NO: 12478 - DNA, 3887 bp, Vitis vinifera
  Intron number 2 from transcript GSVIVT01037615001 (locus G SVIVG01037615001) derived from phytozome v7.0 (chr-ID chr1 9; pos 6255060 to 6258946)
gatctcagttggaagattttgctcgcaaacacaaggtcttttttcctcgtaatgtctgatgttgttttttttctcctttgatttttaattatattagaaattttggtagcttgttttaatcccatattgaatttgttctcccatgggatttagaaaacatttccagaaattaagtggggaagtttggaacttggaaattttttaataaaaagtgtggaaatttggtattttgatgcttttattcgctaggctgaaaattcatcggatcgaattataattggattggagcttggtaaaaaattggtcagatccgtaagacattgagccccaaattttagacttggtgaatggtgagagtctgaaaattttgatcaacatcttggcgcaataatccttttgtttatttggatgagttttggtgtgaatgatagatgattttggttttgggagtttggggaaagtcagattaaaaaataatttgaataatgaaacaggcagaatatgttatagcctcaaaagaattctaatgggggtagaaggttgggatttggaggaaaatttaaatgacctcattaagcactagcatgtggcctgtttgctaatccctattttcaaaagtataaagtaatgctatgaatgtagaagttgaagataccgaattagcagattaagctattttacggttttttttgtacatgttttcagattgggttagggtgtatgtagattgtacatcatggtccattttcaacgcaaaattgagatccttaaaagatattttgaagaattggaataaagaagtgtttggtctcattgagaataaaaagggagaagctctcagacaggttgcgttttgggatgaaaaggagaaatgctcagctttaaatctagaagagtgtgaagtaagaaaagaggcgagagagtcttataagtcttgggtgttgagggaagaaatttcctggaggcagaagtctagggaattatggttgaaggaaggggacaataatatcagtttttttcataggatggcgaacgctcatagtagaagaaactggttgtccaagttgaaagtagatggctgttggcatttggaggagattaatttaaaaactagtgtgctgggggcgttccaaaagctctattcagaagaagaggggtggtgtccaagtattgaagggctgtctttgttggggttaaacagaagtgaggctgaggggctggagattcctttttcggaagaagaggtctttgtagctctatcagatttaggcaatgataaagtctctggtccggatggatttaccatggctttttagtcattttgttgggatgtggtgaaggttgagctaatgggtttttttagagatttccatgagaggggcagatttgtaaagtctttgaatgctactttcctggatttagccccaaagaagggaggggcagaagatttgaaagatttcaagccaattagccttgtgggaagcctctacaagttgttggccaaagtgttggcaaatagaattaaaaaggttatgggaaaagtgatttcggagtctcaaaatgcctttgtggacggtaggcaaattttagatgcagttttgattgcaaatgaggcagtggattcaaggttgaaaagtaatcaagtgggtgtgctatgtaagttggatatagagaagacttatgatcatgtaagctagaagttcttgttggcagtgcttaaaaaaatgggctttggggagagaaggttaaagtggatagaatggtgcatttctactgtgaaattttctgttctaataaatggttttccttcggttttttccaaagttcgaggggattgagacaaggagactccctatccccttatttgtttgtgatagctatagaggtgtttagttgtttgttgagaagggctattaagggggtttttttatctgggtggagggtgagaggtaggagtggtgagggggttctgatctcgcacttgttatttgcggatgatactttggtgttttgtgaggagtcctaggaccagatgacttttttaagctgactctcatgtggtttgaggcttgtttagggttgagaatcaatttggagaagagcgagttgatcccggtggggagggtgcatgatatagaggatttggctttggagttgggctgtagagtgggtggtctccctttttgttatttaggtctacctttgggggccttcttcaaattagaggcggtttgggatgttgttgaagagtggtttcgaaaaagattggcaatgtggaagagacggtatatttctaaaggagggagactcactctaattcagagcactctctagcatgcctatatatttcatgtctctcttttatttgcccagaaaagttaggttgagattggagaaaattcagagggattttttgtgaggagggagagctcttgtgcagaggccacaccttgttaggtggaatttggtttgcttggaaaaaaggaaaggtgggttgggtgtgagaaatttagctttgatgaatagagctctcttaagtaaatggaattggcgttatgccaatgaagagaggctttttggaagcaagttatcagtcagaaatatggtgtggaggagggggattggtgcactcgggccgtaagtgagagatatggtgttgggctttggaaagcaatcagaaatgagtggttgtttctgaagagtagactagcctaccaagtgggtaatgggcggagagtgaaattttggaaggacaagtggtgtggagataagcctttttgtgagtcattcccctctttatattccatatccctgtctaaagatgcttgggtgtcggatgtttggaacctagacaatgatggggagggttgggcccctcttttctcaagggcgttcaatgattgggagattgagatggtggagcgttttatgctcaagatcaaagcttttagggtacagagagaggatgaagtagagtggtttggacggcttcatagagtggtgatttctcagtcaagttgttgtattctatatcggtgctcggagactctcatttgttcccttgtaatagtatttggagagtaaaggcacctcctaaggtagccttctttgcttgggaggcttcttgggataaaatcttaactttggagcaagttcagaggagggggtactctatggcaaacatgtgttttctatgtctctctgaagtagagatggtggatcaccttttacttcattgtgtaaagacgcgggttttatggaatcttgttttctccttatttgatgtggcttgggttctttcgtgttcaatgaaggaaactctttttgggtggcatggagcttttgtggggaaaactcgtaaaaaggcttggcaaatggcccccttatgtattttttggtcagtctggaaggaaaggagcttgttagcttttgggaatgaggagctttcgtttcatagattgaaatattcttttgtatgtaatctttggtcttgggttagggtgtctatagttttttggattggttaggctctaagtaggggtttcgagcctttggattgcttttgtatactccctgtatgctttgagggtactatttttggtgcttcctcttttcgttgaatacatctctttttatctatcaaaaaaaaaaaaaattggtccatttttcgatttcattgattggttaggatgtaagtagggggtggttttttgctattccttttctttttggccttgttgccttgtatacatcatgtatactttcaggtgtacatcaggctttcttaatacaattgcttttacttataaaaaaaaaaaaatcatgatatttcattgtttgatgttgaaaatatgaaattgtactgaagttgatatggttggtgcaga

SEQ ID NO: 12479 - DNA, 4346 bp, Vitis vinifera
  Intron number 3 from transcript GSVIVT01034781001 (locus G SVIVG01034781001) derived from phytozome v7.0 (chr-ID chr1 8; pos 21445238 to 21449583)
gcccctttggttagtttttctttggattatttaatcgtagtttaattgctaaaataatctcttattatgtttgtgaaatatgcctaatatcaaattacaaatatttctaatttttttataggaaactatgtttatttattcaatataagtatgaacatgaacaaaacaaaataatgatgagaatccttgaaaataattaagaaaaagaaaaaggcaaatctacaagagtgattgtaagaggggggaaaagaaacccatagtagaaagagataaaatatatatatatctatatataaaaaaaagactttcttctaatcaagaatgcttaggcaatattataagacctattgaaaatcaacaagaatgcttaggcacctacttgtagaaggaacctaaagcactcatggtattgcaaatagaaaaatgtcgtaagtctcactttgtttcatgttaggtgataatgtatgatgaaaaattgtttatgtgcattagcaatcttgatataaatcactatgttgtgcatagacaaattattgttgctttcatccatttttgtcatttacaaccaaattcaagttatgggggttagagttggcactaaaggtgagagatgtgggtggagattatcggggtttaggacaaacttatttgctttctttttggattcaaaatcttgctctttgggattatagcaaattttttaaatttcataggttggagaactcaatttcttagatctgtgccaattgaacgtgttttagttagttgttcacattgagtttgtgagaaactaagatttggtaatgttttacttcaattccaatattaatatggtgaatttagttgaatctatgctattctttatcttgattgttaattttttatttatttattatctatttatttatctttttaattgtttggaaaaagttacaaatgaaatgctaaatgtttataaacgtgatttttttttcctttttaatttaaaaagggtaaacattaatgatttcacacatctatgcataatgttattgttcaatgttgaaccattggcacaatgtatttttgtgcatgagcttttgtagagattcaaaaataaagaatttaggaataagagatatcaataattgattttttttattttgacaaattgcaaatcaaccaaggatctacttctaatttcattcatccaatttatattatatatttgtgacaaatctctaacatttatattttctttatattaaaaacaaacatattcattgatattaatttaaaaatacaaatgaaggatacaaaatccttccaaaatttgcaaaatctaattgaaagaagaggtagagaaaacttcttaaaaagggtaaggatagttgtacatcactagagtaccacatgaaattgtataagaagtgactcgacactcctcaaaggggttaaaatatctcatacaaaatgaacctaaagcatggctcgtctctttgctaaataattaggattagaacattactagttgaacaaggagaccaaaagagagaacaatccaggatgcatgcaatatctaatatttgacaaagccatccattgtacctctaatgccctctttctaatttagccacccaagataacaatatgacatggtacccttccacctatagcttagaaaggctaagagccctggtttgtagtaggccttgtaagttgatggctaaaccctctcctttcaatgttgaaaaattttaaccacagtaccagtatggtcaatcatcacccctctaatccttaaccgacttaggttttttgaagctcaaccatcaaaagttaacttaaaatgaacccactaaagatggaacccaaataggggggaacttcctttttaaccctttcaatctacatatctagtgccctcaaaagttgtagtagtagaggcccaaaaggaagaatacaaatgtattggatttcatatagtccctaaactcctgcacttgtccttaaaaatttgcatttctttctctccataccatcgaaatcaatgtaagacaagtgatatgccatagtattttggctttgatattactcctcaaacctttatacttttaggaggaacccaatctaacgtggctagtttgagtagcccatgccttagccccaaagtcattgaacaatgtaaagaaaaatgattgatcaattctctaccccttagatacatgttgcaatggtcaagacttagggctttgtatgatcttctcactcgtagcaagtaattagtattgacctttttgttagccattagccatgcaaaggccttgaccttagatgagggctttgagttgatagattggagagagctaagaaaagagattttacaatatataagtctaaggacgataactaccaaactttcatatttggagaggatgttgataaataaatatgagtgagagaggacatgcgtcttttaggatcctcgatctctatgtcaatgaggttatgagaaaagtaaaagttccaagatggaggggaggaggagtcaagaatagatcaaataagaattttttttactatcactactctaaaaagatgtggaaattgagaacaaagaggttgatccccctgccacaaatcttcttaaaaacaaattttctccccatctcccaccaaaaatcaagtacactggaacaatcttggaaaacctatgcaatgacctttaaaaaacaacaatgcggccgcctaactaaaatgttgtcattccaatcattggggtgtatcccatagatgctcaatatgttcttatgccaaaaagtagtaccttcactaggaaacatctaaaggcacttccctaagagagctccattgctcaaagaaatcttacttaaccctaaaccctcttcttccctaggcttgcatacttggtcctagcttatgagatgaactttcttgccctcctcaactccctaaatctctctctctctctctctctctctatatatatatatatatatatatatatatcctttttctagtttacatagtcatcactgatagtgcaatttagaactaagagaggaaataacttaggatgtgagacatacaagattatacaagagttacccttctatccaaggagaaaaagatttttccatccatccaatctccaagaaatcatgtcaatcattaggtcccttaagacactagcctttaggttccctcctattgagaatcgtaggttaagggtttcttagaaacttgacattttaacaatgaacctaatctaataatctgatcccgactcctcttgattcttaataagatgctcttgtgtagattaatcttaagtcttgaaatgctcataaagttcagttggattagcttaaaattttgcaaatcttttgtgcaagctcttgagaacaaaatcgtgtcatctacaatttgcaagtgtgacaccttagttctattcctttccatcaagaagcctttcaagctatcactcttctctctcaacaagaatttactcaagtcatcaagaacaatggtaaaggggaaaaaagggtctccttgccttaaacttctggttgctttaactaaggcattggtgcttcattcactaggattgcaaaacttatgaagacaaaaaattttctaatccaagacctccatcttgtaccgaatcctttcctttctagtgcatgatctagaaagccccaatctacatgatcattggccttttcaaaatcaatcttggaaactctatcttcctcgcttaatcatcttttctcatccaccatttcatttattatcaatactgcatctaaatttgctcccctctaatagttggtattttgtttgtaagttctttccgagaattttttagagattcaaaaattaaggcgcatcacacttgattttagttaatttcttcttgaccaaattcagatattgaaattaagtaggcctacatatgaagaatcacttttagctagaaatttggcttttgacctttagatccaagagaaatagtctaaaaaggtaaatttgaaattctggtttcttccaccataacatatgtcattttggatttgcttgccacttggtgatcatatacacaacttgattgaaggccaaccatactggtttgtcagtaaaatgttccatgcatgtatctttttttgttttttgggctccacatgacttatgttctgcatatgtattttcttcaacttgttatagtaatatctgccaagttacttaaaccttttttttttccataaatagaattgaatttggatgcatattaaggctgatcttgaccttcctgttttgaaaacacaggagaattcttggaggatttt

SEQ ID NO: 12480 - DNA, 12989 bp, Vitis vinifera
  Intron number 4 from transcript GSVIVT01023048001 (locus G SVIVG01023048001) derived from phytozome v7.0 (chr-ID chr1 2; pos 16386095 to 16399083)
gagccagaggtttgcccttccttttgatatcatcatttatatgaacaattcatgttctgaattggattgagaactatatttactcaactattgatgttagtaggctttcagcatgcttgtgatgcagtctctggaaccatctttagtaagcgattgattcaaaaaaagaagcgatataactaaactgaattatggagtagttcagttttttcttggaaaactctttctatcaattaattgattagtttttttttttttttttcaaactgttgctcagagctaaggaagacttagttgaagtcatctcttatttgcatttttttgtcaatatatttagatttaccatcatgtatgaggtgttaataattccacacaaccagctatcaatgcactcacattagtagatgtatggaactgcagaattctcatattagtctgaattggtgatttcttttctgagaagtggaaaccttgcttcattatttgtgatgagaaaattaggtcctagttaatttactccattgccttccttataaccaatcttttttttaaatgtttttttttaaaaaaaatttagattttaatttaataattttttgtttcttttttttaaaaaaaataataattcttaatttttattttttgtgatagataatatctttttttctctttttttcttttcctttttttttttttgtgggttaatattcgtactctaaaccttgaagctctcatatcctccccacccaaccccttgaggccttgccacatgattgggccttaagatcaacaaatgaggtaattggtcccaccaagcctataatcaatatttttattgcttcctatattttgcaatcttttgtcaaatttgttttgaagttggagagctatcagttttagttctggaaaacatatattcatattaaagtgtaaaatttttagtaacaagtgaggcaagcatttggaaaattattcatccttaaaaggagaggttaactctcatcaagagcactttttctagcattcctgtttattttatatctttgttccatattctgaggatagtcaaattgaggttagagaaaattgagagggatttcctatgtggaggtagagggttggagaaaaagatacatcttgtgaagtggtccactatatgttcggagaaaattgagagggatttcctatctggaggtggagagttagagaaaaagatacatcttgtgaagtggtccactatatgtttggagaaaatcaaaggcaagttaagggctcaacatctctctgttaaataacgcgtttttgtgcaaatggagttagcggtatgccattgaaagagatgccttttggacatgattgattagtggcaaatatggagaggaagagagtgggtactgttttggcgaagttagagttaggaatggagtcaggctttggaaatccattaggaaggaatgaaacactttcctgggctttttttccttttatagagggtaataggaggaggatgaagttttggatggataagtggtgtggggatgaactgttgtgtgtttccttcccctctttatataccttaggtgttgcaaaagaggcttggatggcaaacctttgggttcaacatggggagagaggtcattgaatgattgggaagtggatgaagttggggatttctttttcaagttgaaaaggtagttgatagagagggggaagacaagttggtgtgaatgaacttgtacaataataagttctttgtgagtcatttatatgtaaaaccatgaaaggtttctttggataaacttttattttactgttttatctttcagaacataggctacatataaataactagcagatagataattcctaggctaaaaataaggaaactgaaaaacaaatctgattctaatcctaatctgaacaaaacgttgactatgtacaaaaaaaactataattcaaataattcctcaattctaaaattcctcaaatcaagaaacctatccattctaaaatttgagtccaatttgaactagtctaaccaaactaattttccaacactccccctcaagttggggtatagatgtctatcatacccaatttgtccacataattttcaaaatcttctcttgggatccctttagttaaaacatcagcaatctagcttttggatgacacatatgtcatgtatatttcgccttgctcaattttttccttgataaaatgtcagtccacctcaacatgttttgttcgactgtggtggactggattgtgggagatgcttataactgccctgttgtcacaatacatcatagttgggggatgaattgtaatctatagttcttctaatactctcttgatccacaagacttaacaaattccatgatctatcgatctaaactcagcttcagcactacttctcaccaccacattttgttttttacttctccatgtgatgagatttccaaacacaaatgtacaatagctagatgttgacctcctatcttaaatagacctcgcccaatctatatcaaagcctctattttgaattggtcttgctttccaaagtgaagtccttttcctggggttcctttgagatattgcagtatgttatagacaacattcatgtgtgcttcatatggagaatacatgtactaactgactatacttactacaaaagcaatatccagcctagtgtgaaagaggtagattagtcaactagatcccttttttcaaccgggtctatcttgtgtcttgaataaattggaatgtccctgggcttgcaaccaagcatccatgtttccttaagtaagtctaaagtgtactttctttaagaaacaaagattccattttttatttctagcaatctcctgttaatgttaccatatacaaattaggaatcaaattagctgtacatataggaaaagattgacaaattagctttccatgtatttgttaatgttaccatatacaaattaggaatttagactccgtgtataggatatatatctgtatatagatggatgcaaaggagaataaactgattagagttctcagagttctcggtttctatggagtttttttttagtattttgacatggcatcagatcaaggtttcggcaccttctgagtggagttcgtgatcttctaccaatcaaacacttggcatcgaaaacagtgttgatcaggttcatcgcgatctggttcttagttgtttctgttccaattttctggtgggctattttctttgtctctcggttgcatcatgtcatcagataagttggactcgtttcctattagatttactggcaaaaattattgtgcttgggagtttcaatttaagttatttgtcaaaggaaaagaattatggggtcatattgatgggaataatcctgcacctcgtgatgccgaggctttgtctaagtgggaaattaaggatgctcatgttatgacctagatccttagctcggttgaacctcaccttgttcttaatctgagcccttataaaattgctacttctatgtggaattatctccacacggtttacaatcaagacaactctactaggcgttttcaattggagtatgagatggctaatttcacacaaaaaagtctctcaattgaggaatatttttctggttttcaaactctttggactgattgttccgacattgtttatgctaatattccaactgcagctctctctgctgtccatgcagtgcatgcaatcagcaagcgagatcaattcttgatgaagctacgacccgactttgaaattgcacggtctaatatgatgaattgtaatcctgtaccatctctggatgcctgcttgagagaacttttacttgaggagcagcgtatcgtaagtcaaactaccatggaacatcaggctaatgttagtgcacttgtttctgtagcttatgcagcataggggcggaataagggttgagatatgcatgttgtccagtgctttcgttgtaaagattttggtcacattgctcgcgattgtcccaagaagttctgtaactaatgcatgaaacaaggtcatatcatctctacttgtcccattcggcctgaaaggaagcagggtactgcttatcatgcctctattggtgtctctagttctactgcattgcttgctgcctcttcgattgttcctattcctactcctacagccttatcaaacccgaacacactcactcttgaaatggtacaacaaatgatcatttctgctttttctgcttttgggctctctggtaatcatatgatttcttctaagccatagtattttgactctggagcttctaaccatatgacgaatactattctttctctttccaatgtcagaaattatgatggaaatttgaaatttaacactgctgatggcagttctctgcctattagtgttgttggtgatctttcatattccttaactgatgtttttgtgtctcctgacctctccacaaatcttctttctgttggtcaattggttgataataattgtaatgtcaatttctcctgttctggttgtgttgtgcaggatcaagtgtccgagaagataatcgcgaagggacctaagttgggacaactttttcctcttcgtgtttctccttccactattattcctaattttcctttactttcctttgcatgtaatgttgttggttctgaacataagatgtggcatagacgtcttggccacccaaactctgatgtagttcgtactttgtttaattctagattattgggaaataaagcatgttcttctcttgatctttctttcgattgtacatcatgcaaacttagcaaaagtaaagttctaccttttcctcattccgcatcttgtgcctcacaatgttttgatattatacatagtgatgtttgggggattgcacctattgtttctcatgcacattacaagtactttgttactttcattgatgactttagtcgctttacttaggtttacttcctccgagctaaggctgaagttttttcagtctgtaagtgttttcttgcacttatagagactcaattctctgccagcatcaaggtcttacactctgattctgacggagaatacatgtcagatgagttttaggactttcttcaaagcaaaaggatcatctctcatcgttcttgtccttcaacactacaacaaaaacggtgttgctgagaggaaaaatcgccaccttcttgatatggtaagaactcttttacttgacacatcggttcctcttcgtttttggtgtgaagcactttctactgcagttcatttgatcaatttcttaccccctcctatgctaaatcatgtttctcctttctctaagttgtttggtcattctcctttatattatgatcttcgtacaattggttgtgtttgttttgtgcatttatctactcatgaatgacataaacttactgctcagtctgttaagtgtgtttttcttggttatgctatccctcacaagggttatgtttgttatgatccccatggtcgtcgtatacgagtttcccgaaatgtaattttcttttaaaatcaatatttctttccatctcatgttgagttgccatctgtatctgcatcttttctgcttagtttttctgaatccccaacaattgtggaaaggttcaaacctggttttgtgtatgaaagacgtagtcaacatgagtccagttccactttctctgtgccctcttccgatcttaacccggcgactgatcctgcttttgcttccaccactcttcgtcggtctactcgtctttctcgaccccttgattggtatggattcttctctcctgtctctcttgttgttactttatccactatttctattccctcttgctacaaacaggccatggaacatgagtgttggcaaaatgcaatgcaagcagaacttcaagcacttaatgagaatcatacttgggatattgttctttgtcctcctacagtcaaacctattaggagtaaataggttttctctgtaaaacttcgttttgatggctctttggaccggtacaaagctcgcctcatagctttgggtaacaagcaggaatatggggttgattatgaggaaacatttgctcttgttgtcaaaatgaccacggttgaaccatcttagctattgtcacttcatagtcatggcaactacatcagatggatgtgaagaatgtttttcttcatagtgatctccaggaagagatttacacgaagtttccctctggtatgactaattcttctcctcatgatgtttgtaagctaaaacgttctttgtatggactcaagcaggcgtcccgggcttggtttgagaagtttcgccgtacaattctttcctttagttttacccaaagtcagtatgattcttctttcttcttctacacgtctgcatcgggtatagtcctgctcttggtttatgtggatgatattatcattactggcactgattgtggtttgattactaagcttcagtagctgttacatacaactttccatatgaaagatcttggacagctcacatacttcttaggattggaagttcatcatcgggctagtggtatttttgtgaaccatcataagtatattcaagatcttatcactttggctggtttggaggacacttcttctattgatactcttatggaggtaaatgtcaaatacaggaaagatgaaggggaccttctagatgatcctactctctatcggcgcttggttgggagtcttatctacttgaccactactcgacttgatatctcctatgttgttcatcaggtcagtcagtttatgacttctcctcgacatctccatcttgctgcagttcgacgcatcatccactatcttcgaggttcacctactcatgggttgttcttttctaccggctcctctcttcaacttgctgcctatagtgatgctgattaggctgggtgtccaaatacacattgatctactacgggttggtgtatgtttttaggtgatgccttaatttcttggagatgtaagaaacaagatcgtgtttctaaatcctctactgaggccgagtatcgtgccatgtctactgcttgttctgaaattgtatgactacgtggtcttcttgaggagcttgggtttcctcatactacttctacacctcttcatgctaataagactagtgctattcagattgccaccaatcccatgtttcatgaacgtaccaagcacattgaggttgattttcattctattcgagacaccttggaaagtcgagtgatatctcttcctcacatctcttttgatctccaagtggctgatatcttcaccaaagctttgactcgacagtgacatcaatttcttgttggaaaattgttgctcgttgacttaccagcatcaatttgaggggagatgttaatgttaccatatacaaattaggaatcaaattagttgtacatatagtaaaagattgacaaattggtttaccatgtatttgttaatgttaccatagacaaattaggaatttagactccgtgtataggatatatatctgtatatagatggatgcggaggagaataaaatgattagaggtctcagagttctcggtttctatggagttttttttagtattttgacatctccatccctagaaaataccttagtgcactaaggtccttcacctcaaactccttagctaggatcttcttcaaaacttcaatttctacatgatcattgcctattaaaatcatatcatcaacataaactatgagaacatttattttaccctcatcagtagatttgtaaaacatggtatgatctgaatgtccttgaagatagccatatcattttactactcttgagagtctttcgaaccatgcccagggtgattgtttgagaccatagaaagctttcttcaattggaaaactttattggagcttcattgttcaagtcctggtggtacatccatgtaaacctcctcttctaattccccattgagaaaaacattttttatgttcatttgctgaagaggctaatcatagtttgcagcaaaagaaagaagaattcggattgtgtttagttttgccatcggtttaaaagtctcctagtaatctatcccataagtctaagtaaatcctttagcaaccaatcttgccttgtaccgttccaccaagccatcagatttgtattttactaaaaaatcccatttacatcccatagttcttttacatttcggtagggtaacaagttcccacgttccatttttttccaaagctttgacttccttcataaccgttgttttccatcttggatcactaaatgcttcatgtacattttttggaatttctatggaagaaaggtgagaggtaaaaaaaaaaaaaaaaaaaagatgaggataatctataataagagacaaaattagatatgggatgtatggtacaagatctaacacctttcctaagtgttatcgagagatctaagtcactaggcgtctacaggaagtgaggaatgtgagggggatgaagaattatccaaacctgattcaagcattatctctggtgtggcttcatggcaaggcatgagtgtatcaggtactatacacctccttgagtagactttgaactatggtgtagattgggctgttggtggcaatgttttatctctccctacatttgacaatctgtcatgtattggaactattgttgggttcgactgaatgaaatgaatggatggagagatttgagtagacatcagactggttgttgggagtagactggttatcggactggttgttgggagtgaactggttgatgggagtggactagttgtcggactggttgttggaaatataggaagcggaaaaagagattgtggaatttcccatgacaaagcttcactagaattctccccctgaagcgaagtgtaataaggttgctgttcaaagaaggttacatctttagagacctatggtttccgattaataggatcaaaacatctatatcctcttttagttgttgcatattgtaaaaataagaattttatagccctaggatcaagtttaccacgattatgtgaatgaacatgtacaaaagcagtgcactcgaaaattttaattggtaaatcttagcaaattcgggaatttgggaatgaagcaagaaaaacagcaatgggagttttaaaattaagaacttttgagggcatcctatcaatcaaatatgttgttgtaagaatggcgtcccctcaatgtagttttctaacattcattgaaaataatgaccgagcaacttctaagaggtgtctattctttcttttgacaactctgttttgttatggagtatctacacatgattttttatgaataatcccattagatgataaaaattctccaagaacaacatttatgcattcactaccattgtcggttatgagaattttaatatacatttgaaactggtttttgatcattaaatagaactttttgaaggtctgaaagacttcaaattgttctttaaggaggtaagcccaacaaattcttgaatgatcatcgataaagttaatgaactattttgtaccaattagatttgttacccaagatggttgccaaatatcactatgtatgagagtaaaaggtttagaggacctataaggtttagcagtaaataccgatctagtatgctttgccatttgacacacttcacattgaaatttgacaaccttttatttttgaaaagttttggaaacaagaacctaagatacggaaagcaagggtggcccaatctatagtaccataacattatttcatgatcaaaaggaaaagataaaacattgctaccaacaacaacgacttatccttgcacaacttcacggtcatcaaagcggtataaaccttcacactcacatgcactgctaatcgtcctcctcgaagctaagtcctgaaaaacaacaccagtagaagaaaattcagctacataattgagatctctagtgagtttaataatggacaataaattacacgacaaatttgggacatgtaagacttcattcaagagaaaaagtctttgtcaaggagatggttccttttccaacgattggggtatatgacccatccgtaattcgaactttcatgttgctagcataaggtacatatgttgtaaatgaagtggatgacccaatcatgtgatttgtacctccataatcaatgatccacaatttataagaattagctaaggcaataaatgggtattgagttctacctgatcatgctagagagcaagatggtgagggatcagcatttagtgaacctaagacaaaagtggatgcaatttgtggatgaaggggatgttgcaagacctctaactgctccttggtgaatggtgaagtggttgtttggttgttaaggttcttggattcactgtggtagcctttggaattgtggacgggtctcaggtttctcccaataggtggcttctcgtggattttccagcatgtatctcttgtgtggcctcgtttccaacaatggtcacaccaaggacgatcacccttttttcctaatcgttggtcatttggttgaaaagtcttcccaccatgaataactagggcaaaagtctcaaattagctggattgttgttctcccaatatcactttcctcctactctcttcccgttgcacctcaaaggagatctcctttatagatggtcgtggctcttttcccaagattcgacctcaaacctcatcaagctccttattgagtcttgctaaaaaatcaaatgccctttcttttttgagaatcttctaataataggcattgtcttcagcacacttccactccatattagagaataaatcaagttcttgccatgcattttgaaggatattatagtattgtgtaacactataactaccttgtttaatatatttcaacttagtcttaatttcaaacatttgagcagcattacctagattcgaataagtctcttggactgcatcccatagtccttggcggtacgaagaaagaggtaggtctgcccaatagctgcctccatggagttgattaaccaagccattaccatggagttctcagaatcccaggtttggtactcagaattttctggcttgggtgctttgttggtgcctatgagatagcccaactttccttttcttcttatgaacaacttcatcgattgtgactgaagaaaattatgtccatttaatttatggatcataatttgcagggtggggttctctgtattatctggattgttgcttgaacttgtagctgtgaagtcccaggtgaggcatcagagtcctccctgtgaattgcgccagtcataacagtctacactatccttttactctcctttttttttctctagctttgataccataaaaccatgaaaggtttttttggataaacttttattttattgctttgtctttaagaacataggctacatccgtttaaataactagtagatagataattcctaggctaaaaataaggaaactaaaaaacaaatctgattctaatcctaatttgaataaaactttgactacgtacaaaaaaactagaattcaaataattccttaaatcaaggaacctattcattctaaaattcctcaaatcaaggaacctatccattctaaaatttgagtccaatttgaactagtctaaccaaactaactttccaacaatatgtcgatttggaattgggggttgttgtgttatttccaaggtgggtagtttggaattcatgggtcccttcgaaagttaacttttttgtataggagacaattttgggaaaagttttggctttaaatcagattcaaaaaagaaggtagttttttgtcaataggtgttttctttgcaaataagaagaatccataaatcacatcctcatttgttgttctatggttaggattcttttagggtgacactattcttttgtggacagaatgaggaaaaaggtttggagagcaactcctttatatctattttggatggtttgaaaggaaagaaatcctaggtcgtttaagagtaaggtgcattcagttcagttttttaagatggtttttttaagaaatttgtttgcttgggtaaagttgtatattgagattcattttatgtctttacttgattttattgagtagttgggtttgagttaagggagagggttgttggggttcttttcttgtttttgtgctatgacactttttgtatacgtctactttggagtgtctttgtggcatttttattttttaatgcatttggttttatttatgaaaaaaaaaaaaaattatggtggcaattcaacccttgcgctgttcaagtggtaaagtttgataattccatgtaagagcgcaccacaaatttgaaaagaaaaaaacaaaaacaaaatggtagcaatgcaataagcagcctagcatcctctgagccacaccctttagaacaacctaacaattttgcattacagaaccaccatatcatctatttcacttgattattgatttggatgggcctgttattgatacttgtatcacctataacaaaggtatagccagactacggcatgttggagttgactgataagcatgaacatggtaatatttctgggaacaaagttcaagtttaactacttgcaacactctttcaactttgttgtttctttcattcatggattaatggatatttgctagtttcttcaggaagcatatttaactgttttaagtggttattggaatcttggactatatttggtgttaagtcccaaaatgtggactcttgaacttttttgaaccctataaagatgttaaaaccatggatctatgaattttcaataacagtacggcattctattcaaaaatcatatagcaattgagattcaacactcaaaccccaagtctaaatctaggcatccaaatgattttggaaaatttactttatgttataaggcacaacatgctcaagcgtttcttgtagatagtttgagtttatgatttcattgtgtaactataggttgttaatttgaaaa

SEQ ID NO: 12481 - DNA, 5096 bp, Vitis vinifera
  Intron number 1 from transcript GSVIVT01006742001 (locus G SVIVG01006742001) derived from phytozome v7.0 (chr-ID chrU n; pos 27946589 to 27951684)
agtaacaaacttagaatttttaaattattgaacctcaagtctttttgtccaatattacagctgagctttgcagcttttgtttgcgaccattacaaattcatccacagtccaagtccctggaaattttgatttagtcttgaccaaccccaattagcctgcttggttacaactgaaatagtttgaagtttttaaaccttgtcatggaacaccatagtttcaaattcagggcttcaacaggctaaaaaaaaggccacttgagtatgcaaagagcacttcatagtcgatgaagcacaggcttgagtaagatgaatcaaatatgatggctatgtgcattgaactccttggccagaacattagaaattttaggcctatgtaagatcaagtgtgccctgacctcaaataggtaaaagggatgctctgggaacctatcaattataaagtttaggttggacctggtttcaattcttagaaaagtaatagtcaggttacatttcaaaataagttgcctttcttctgttactttcaaaattgttgtaggatttttttctttcttcaaaaaatagaaacttctccctggcagatccaacaaaatgcaaggaactagactgggataagcgagcagccattgttcgtggaatagcaagggggatcctgtatcttcatgaagactctcgtctcaaaatcatccacagggatttgaaagcaagcaatgttttgttggatgaggaaatgaatgcaaagatctcagactttggcactgctaggatttttggcagcaagcaacttgatgctaacaccaacagagtggtcggtacattgtaagtcatcttgctgttttgaactattaaactgaactaaactaaacaattaattaaaaaaaaagtgattatttccaaagattttagatctgttttcagtaaaattacccctacataagcaaattgcagaggaaaaagaaaatggcatttccacatgatcatgatgttctcaatgtctcttttgctcagtgttttatttcaaattacattttgagttattttaagcactgctgttgattgctttactccattctgatgttgaactgtacctcaaattttgtttcccaatagtggatacatggcaccagagtacgcaatggagggactattttctgtgaaatctgatacttacagctttggagttctattgctagaaatcttgagtgggaaaaagaacagtggattgtatagcacggatcattcccaaaaccttctatctcatgtaggcttctctttcttcatctctatgttgtgatcttactttattttccccatttatgaagatctccattatcttgccaacaggcatggcagctgtggaatgaagacaagggacttgaatttatagataggaacttagttgacaaatgtcctgtaagtgaggctgtcagatggatccatattgctctgctgtgtgttcaggaagaccccaatgatagaccacccatgtcatcagttgctctcatgcttggaagcaaatgggtcaaccttccccaaccatcagcaccccccttctcagtgggaagatctttcatgtctgatctatcttcaacaagcgggtcggggttaggttttctcatttcagatcaatcatccactagtgcctctgtttagttcggaggttcattgcatcatacttgagctcataccagtataccatgattcataatttcaatttcaggaacacagtgatgtaccaataagatagaatagcctgccacttgacagtgcaattttttttcttggttttttccagtggatcagaccaacttttgaataggttctactgaaattttctcaccaatcagacctcattttttattatactcaaatccatttaaattctgattctcttgaatatacttctgcattggtctactgtgtgttccagaagactttgctgacagaccaaaaatgccttcagttcttttcatgcttgatagccactcttggtccccagtaccctcacaaccttcatttctatgcctgtaatgtgggacaagagcataattcaagggttatcgactcagatcaaaactaaagttaatatccgtcttttttcattaaacaagtctttagtgacccatacacaacaaatgtggatgcaagttattataactgaaaggcatgtttgtatgataatgtgtagacaatataaaagtaagacatgtggaacaattcaattaagaaaaacagttggtcagtgatatgttaggagaaaagtgtttctaataaaataagagtgaagatttcggggagagtactgaaaacaaacgtatctttcttagtgagcagccgaaaagaacgataatgcctagaaaagcataacattaaaaatgccatatctgaatctttcttttcgaaccaccaatacaattcaattattggccttctcaattcttgcagtgttgattctgaaaaatataaaaaaataacagaaatctaccagtttccatgtttgaaaactccaagttcctactagcatgctcccaccatggagagaagtcattttttggcaggtagctaaaaaggagtcatcctcaaagtttttcttgccaggcctgctatagtgctttagatccccaaacttgaaaaaatgcctttttctctatgtgcttctttgatctattgaaggtcatatttatgctatcatagaattagcaaacagttcaattaggcaattagatataagaattttctttcatgtatgtcctcctttagattttcattcacctaaggatatcagtaggattgtttgatatccaagacaccagagcctttccactgatgattttaatctcaatcttcagccttatcagcttcatcaatgcccaaccaatttacgattaccacctccgtcaaggccaagacggtgacactgcaaacctcaattttgaaaccaatctttcttccctcttggattctgtgtcttctaaggcttccctccataaattctacaatgactcctctaaccaaatctacagtctctaccaatgcagaggcgatgtcaacactaccacctgccacacttgagtgaaagctgcagctcaagaaatccaagaacgatgccagtttaataaaaaagcgatcatatggttcgatgcttgcatggtaggttactctaatcaagacttctttggaattccagagacatatacagggtacttgatgtggaataataggaacagtactgaatcctcttcaaggcgtgatgctggggctctagctttgatctatgagctagtgcaaaaggcttccaattcagaaaggatgtttgaaccgagagaggttagggtggcgtattatgagcccaacttgccatttaagatacggacaaatcttctccccgcaacccatgcgcagatcaggtatgttgatgttataatcattgagaaatttatcacactttaaagtccccatatgaagtatgttctctgttttgttctatttatgaaaaaaaaaaaaaaaaggaagatccaatcttggagcaggggctaacaataaaaccttcttttggccatgctgttgtcttctttaattgataatttgcttaagacacactatcagactaataattgtaaaacttgactgcaggaaaatcaggaaagaagagaacaaagattgtaatctgcactgcatcagcatttacagtagttgttattcttttgggttgctgcatctactattcagttagcagaggaggtatatgtatgtatataataataatgccggtatttcaacagccacataggtcaacttgtgcgattaaatcttaatcttatttcctactcaggggagaaaacaagggaagatattttattgaaagatttgaaacgtcccactggcaaaacaaaattcagggagggaaatatgcaagcaaggggtgaggaggacagtggagaaatgtattacttcaatttaaccactattctggctgctacaaacaatttctctgaggctaataagcttggacaaggaggttttggccctgtttacaaggttaagaaatacaaactctttcactaaatttatacacaaaaataatgtcatgaaagttgaattcactggcttgagtgctatgaaaaaggctattgggagaaactacccaactgtctttgtgtgttgtttttatgagatacagcagcagtcatggccattagtgtatgatgtgttaatatatgatatgacattctggttgagaaagtttgaatgactgcagggcattctgcttaatggaaaagaaatagcggttaaaaggctttcagccaaatcaggacaagggattgaagagttcaggaatgaagttttgctaattgttaaacttcaacacaaaaatcttgtgaggctgttgggttactgcataaagggagatgaaaagcttctagtctacgagtacatggccaacacgagtctggacgcctttttgtttggtttgttccctctccttctctcaactgaagagttgtaagactctcttggcttgaatggcatcactgtcctatgattcaagtcttctcacctcatgaaaaaacttcacaaggacataacaccaatgtcatggactcataggaaaccttgaatcttgtgtgatttatggttcatttatttatcttgttcttgctcttctgattgacattctttttcttctgtaaatctcaattgaaaattttcatgctgttttgacaaaagacagatccaacaaaaacaaagcaactagactgagctaggcgggcagccattattggtggcatagcaagggggcttctatatctccatgaggattctcggctcaaaatcatccatagggatttgaaagcaagcaatgttttgttggatgatgagatgaaccccaagatctcagactttggcactgccaggatttttggaagcaaccaaattgaagctagcaccaacagaactgttggcacattgtaagtcatctcctcctcttttcattctgccttaactgcaaaacaataaagattacaactacaaaaaacgctcaattgttactgaaatttcatatcattgtcattgactatcatatgcagtggatat

SEQ ID NO: 12482 - DNA, 3086 bp, Vitis vinifera
  Intron number 1 from transcript GSVIVT01011320001 (locus G SVIVG01011320001) derived from phytozome v7.0 (chr-ID chr1 5; pos 8453129 to 8456214)
ccaagtcagttcctttactttctcttccaatttcttccctgctttcataaattttgatttacgtgctaagatatcaaacaaaattttacttcaaaaagaaagaaaaaaaaataaaaatccactaattcaattcaattaaattaataaattttatttatttttaaaattcaaattcagccatgccttgtgatcctaaacgggtagaacagaattgagtgggttttcagaagctctgacaaagcattgatgcaatgtccgggaccacggtttttgtcctcttcctttaattctatccacctactttagctgaaaattcagcttctttttaattaggattttttcttaggtcattttcaaatctattttaagaattaatatcacatttttaaaccttatgattgattttgaaatatctataaaaaaattaaactattatattttttctctattgtaaaaaaaaaaaacaaaaattatcaattttgaatagtacttgacaaatgatttttctattgtgaaaggagattatcacataaaatacttacaaagttgattaaaattttataaaaacttttgatcacttataaatacaattcttagttaaatgatacattattttatttattttcttataaatataatgattattataaatatttagataatgagataacttcaaatatcttttattaacaatataataaaactatatatatatagtttaagaatccattatttgtgataattaatataccaattcttaaaattatacattttacgataattattgaagtattacttatagacatttttatagtaggtctctaataacccatgttaaattttattttttccttaaaccatccaaatttaatttgaatatttaattctctattttttaaaataagaaatattgaagaatgaaattatttttgtttttgttaataagaaatttaataatttataaatagtataattcattattgaaaaagtgcacaaatttaattgtaccatgatgaaccaaccaaaacatcttaaatggacccatctgtccttttagtagagactagagagtcagaggctatttaataggacactgcatgagccactttctgaaatgaccacccattcaaccatccttttctctctcacatacagtgaaaatgaggctccaaaaaggtggtcgtccttttcatccacgggacatttgcccaatctatcgaattttatgacgtttatggcataggctctgccttattgtctatcttcttcctagggataaattcttttaaaaaatatttatcaaaattaattttaattatctctttttttttaaatctctaatttacctaaaattctattatatatataaaaaataaattgacaacattgacagaggtatagtataattttagaaacagtatgtaatttttgttactcttttattatttgttaatacaatgatcagtgattattgaatcatttcgaatatatttgatattgattttatgaaatatttttagttttttaaatatttaaaaaaatttatttttttaagtataagaagtaaaaaacattttttaaaattattgtcaaattcattttttgtatgataatgattttaggaagtgttttttatttaaaagatatttttaaaaaaaataatagatatttgataaaattcaagacacacttttaaaaatctgaaaaagtcacttatattttctaaaaaaataattgagagatgatttttttagtaacattctaaaaaaaacacttataataaaaatatttcaaataaaaataccatccattttttttttttttaatgtaattaagactaaattttatgaaaatcatttgagataatgccaaaagcaataatttagagtggatttgacattagtgactttttcttcatgagggtgaaggtggggcggtttggcttcacttttccctaaccatttttaggcctcggatttggattggaccctccatccaaatcaagattggtggcaataattgtaaccctcgttaataccaatagcagtaacgtgtggtttttggacatgggaagagtgattttggtgaagaagaaacgagggtggtggggttgtttcctttcacttttgcctacccctttcaatcaactttaattaggatggacgcatattcgaaggtagctaggcttggattagcatgactttaatgttggattaggtggttgacagtcagagtaggctttaatgttggattacatggttagaccatttaacattttagtgctagcttgattatatttctcaaattttttttatttaaaataaataaaattaataaatcacatttaaaatgtaaaatttctttgagatttatcttcaaaaaataatgatttttaaaagttattaaaaaaattgagattttaaaatcattttttataatataaggtaactccatacattttatatatgctattatatttttttattgaattattttaaaaataattttagtgatattttatgttttttttttataattttttattgaaatatttagttaaaatggatgaaatgatacccaaattatgaatctaactattctcgtgtttttacttgaaaaataacctatttttgacataaatttcctttatcatttcaaatatttacatgtaatttttttttaaaatgtatttttacaagaaaatagcgaagatatttttagcagaatgagacaaaaaaaaatgaaagggttaaatttcaaaaatcgagttttcataaacccttttaatcaaataacttttatttatttatttattgaatattaataataaaagtataatttaattagtacttctaccatacactattaggaggaagaaaggcagatgaggttgggcctggtgtgctgggcctcggctcttccgagtattgattttaataaggtttttcacagtgtatttcaatttcaattacaattttatttttattttttatttttgcatgaaaactaataattctctttattaattaatttttaaatttaaacctgcagattcatagaagaggaagacctactgagattcttaa

SEQ ID NO: 12483 - DNA, 13131 bp, Vitis vinifera
  Intron number 29 from transcript GSVIVT01034779001 (locus GSVIVG01034779001) derived from phytozome v7.0 (chr-ID chr 18; pos 21278636 to 21291766 reverse strand)
gcaatttacaggttttgacaatcatctctcccttgctctctctctcagtatagtttttagaacagaaagggttttttaagtacactgaggcaaggtacaaggggtataaaggaaatttacctgtttttatttaggttagcagtggtttaactacagggctatttctttttggatccagtttagtactgtttcaaatataaaaaatttaattttctggaaatttcttacttagaagaagctttatttttgtaaacttatatatatttttcttaaagttttcttttttagaataatttaagtgattgcaaggtgcaaaccagccatttaggaactttaaattagtgtgaaggccacacacaccaaaatgagactagaatttgactaatgattaagcattttggtttcattattatatggttgattacttagtttcttcttgttgttataatcatgatttcaacccactagcagccagacttttctgcttttctaacctaaaatgtagctttcttaactctaatctcttttctccttccattctttatctatgcaacctaaaacttcttagaacttgaatgacctactgttgtaagttcaattctctttgaaccgtttttcattgataatccattaaactttctcaactttgatcctctaattaagtgggtgaagataattttatagtgttgctccatatcaaagcattttctccaagttaatatctgcttttgcaatgaggtcaagcattttctgtgaggcagcatctgctgttgcaatgagggttgggaaaataacaggaaagcttgtttccaattgacaattcttccaatactgttgaggggacaacctcattatgacttggggactgtttggcaattgttctcaataatagttttctgttctttaaaacaaaaaaataagaaaacacatttgacaataaaaaaaatgttttctagtttctgttcttaaaaatagaaaacaaggtgtttttagagaatattttttagttattttcacttgttttttaagggtcgttttaaaaaataattatacaaacatgtagactgattaaaaataaaacactagatataaaataatgacacgaaatatgggatgaaaaataataagttctgtatattagattgactatacacacagtttatataggagattacaagagaagaaataggaaacaagagacataataggaaactaacttattcctaaatcataaaactatctatttacaaaaataggaaactaacataataggaaaataattctcctattctatttacagctcaacactccccttcaagttgaggaatagatgtcttccattcccagcttgaatacaagatcgtgaaacattgaactgttcagccctttgttaggatatcagctaattgatgttctgatggaacataggacatacacactcctcctttctccaatttttctttgatgaaatgcttatcaatctcaatatgttttgtcctatcgtgttgtatagggttatgagcaatattgatagctgacttgttgtcacaatagagcttcataggaccatcccacttgattctcaaatcatctagaataatcttcagtcaaagtagttcacacaacccttgagcaatgaccttaaactctgattctgcagacgaccttgctaccacattttactttttacttttccatgttaccagattacctccaagaaaagtacaataccctgtagttgatcttcaatccactagggaacctacatagtcagcattggtgtatgcttctagagaaagagtattgttcttgaacaaaattccttttccggggttgcctttcaagtaatgcaacaccttgtaagcagcttgaagatgaggttctcttggatcatgcatgaattgacttatcacactcattgagttggcgatgtctggccgagtgtgtgcaaggtaaatgagcctgccaaccagcctctggtacattcttttatccaccattggttcttctttaccttctcccaacttgtggtttggatccattggggtagagactggtttacacccaatcttccccgtttctgccaataaatcaatcacatacttttgttgagagatgaagatcccttgtgtggaatatgtcacctcaataccaaggaagtactttagtttccctagttcctttatctcaaactctattgctaatctctgcttcacttcatgctttgctctctcatcatttccagtcactatgatgttgttaacatagactagaagagcagttactccccctacagccgagtgcttaatgaagagagtgtagtcaccttggctttgtttatacccagactctttcatgacttttgcaaatctcccaaaccaagccttaggagattgttttagcccataaagggtctttttcaacttgcacaccttgttacctatgtttcctttaaatcccggtaggatgttcatgtaaatctcttcatctaaatcaccataaagaaatgcattcttaacatcatactgtaggagttgccaattgtagtgggcagccagtgacaacaggattcttacagtattcatttttgcaactggagcaaaagtctcctgataatcaactccataagtttgagtgtaccctttggctactaatcttgctttatgtctcttaagagatccatcagccttatatttcagtgtgaaaatccacttgcaatcaacaatgttttttccttttggtctttcaacaatctcccatgttttattcttttctaatgcactcatctcctctctcatagcatccttccattccctttttgtcaatgcctcagaaacagtgttagggatgatagtggtgtttagactcacaataaaattcttgtgggctggtgataggtacttaagagacacatagtgtgatagtggatagagtggttggttagtgcattctctggtgccttttttgacagcaatgggaaggtctaggtctaggttgtttgttgagtcagtggaagtttcaccaggttgtgtgtatgtaaaggtgggtctgatcttaccgtgatttcattcctagggtctgagttggattcttggacatgcttttgtttctggaatggccttttcccttgaatacaccttaggaaactgtggaaaattgtgagtgacactggttggaataggggatgacaaaggttcagtgataaaattgggtaacttaggttcttcatcaccatgggttgagacatgaggaaggtcaagaggttcaaaggactcacaaggactatcttccatcattgaaatctccccttgaagagaggacttggggaaaaaaggtttattttctgtgaaggtgacatctgtagagatgtaaaattttctggttgagggattgtaacacttgtatcctttttgagtggatgagtaaccaaggaagacacattttatggctcgagggtctagcttgtctctatgttggctgtggacatgaacaaatgcagtgcacccaaatactctaggagtgagcccatttgaggttctaaagtgcggatggaaactcttaagtatctttacggggcttttgttgtctaacactcgtgagagaattctatttatcatgtatgtggcagcaagaacagcttccccccaataggagttaggaacattcccttgaaagagtaaggctcgggttgtgttgagtaaatgcccatttttcctctcggctaccccattttgttggggtgtgttaacacatgatgagtcatggagaataccctatgattgaaaatagggtgacaattggttgaagaaatctttagcattgtctgtcctaaagctttttattttaaccccaaattggttttgaaccattgaatggaaattaggtatagcaatgctaacatcagatttttgtttaagaagaaagatccatgtaacccgagtgcagtcatcaattaaggatacaaaccaacgagccccagaaacattaggtatagtcaaagggccccatatgtcactatgaatcaaatgaaaaggatgagaacttcttttattgctaataggaaaagatacacgagtatgttttgccaattcacaagtttacaatgaaactaaaaaatatctaatccttggaacaaatgaggaaatgtgacctttaaaatcctaaaagatggatgacttagacgtaggtgatacaaccaaatggtatctttatttgaggaactgagaaaagacaacaacaaattattactagttttctgagatgattcaaggtggtaaagaccgctcctttccttagaaagtccaatcctcctccccgagccttgttcttgaaaaacacaataagaagggaaaaaaatagcataacatttaagatcatggataagcttttgaatggaaacaaggttggtcgataattttggtacatggaggacatttttaagaataagggtaggtgtgatgtatatgtctccaaaacctgcaacggtagctaaagagccattggccactgcaattttcttgttacttgggcttggggtataggtatggaaaagttgagatttggaggtcaaatggtctgtgacaccggagtctattatctaagagtcatcataaaccctatgtgaggcatttatgcaaaaagagagtgaaggtgtacctgaaagagccaaagaacaagttccagtaggtttgtcaagggatcccaacaagcttctcagcttctccatttcttcactattgaacccgcctgttgctgaattttcctcagttttgggctgctctgccatgtgtgcttgaggcctttgttgccctccacggtttccccattcagcttccaacacttcttttttgtgtgccttggtttcttgcaaaaggtgcatcaaagattgtccttgttctccctccactgattgtctctacttaagtgtttaggcaaatcattcttttcttgctctgaatattctgtttttgcaactagggctgatccatccaaggtttgtggttcaagcataacactccttcggctttcctcgtctcgaattagtgccaccacctcattaaagcatggaacctcctgcttgccaagaatttggattctcacttgatcaaattctgggttaaacccaacaagaaaatcatagactctatcttgttcaatgaaatcctttagaacagcggcatcctcaggatatttggtttttatcaccctataatgatcaagttcttgccacaaagctttcaattgattaacatatttagtaactgttttacttccttgttttgcaacaatcgtcttcaccttaacctcatatacttgagccgcatctctagcttttgaatacgtctgttggattgcgtcccaaatatccttagccgtagccaagaacatatatgtgtcgctaatctcaggagtcatagaatcttcttcatcccataagatggctgatcttccctttcccattcagcacaatgcgaacaagttgagaccaattaaggtaattttttccatctagcctatacgcagcctaaatgttttgcaattcctcgggttgttgagatcgaacaatctcctccaattgtgatgtagtagtcatctctgcaacctctgacatcttccacgaaaaaacctgatctcttgggaattaaggcagatcgggaaaaaaaaaaaaaaaaaaccaagcagcaatgaaggttggtaaaagaacacgtgaataaaaaaaatccagctgtgaaggccagaatgatgcccaggtcttaaaaacctacaactctgataccatgacatgaaatatgggatgaaaaataataagttttgtatattagattgactatacacacagtttatataagatattacaagagaagaaataggaaacaagagacataatacaaaactaacttattcctaaactaacttattcctaaatcataaaactatctatttacagaaatagaaaactaacttaataggaaaataattctcctattctatttacagctcaacaaataattatacaaacagggccttgatttccattttccccattctattcactttgccaaattgaaggatatcactaagatgtctgttgaatataatgtatttatagtgtataatctttccttgttaatataggtcacatgtatggtagttaggactcctagccttgtatatatatatatttctcaattgtaagtagatattacatgaatgagaattaaagtttttcttctttctctctctctcaacatggtatcagagccaagggagaaaacctaattctttccagtttcctgtgtcatcaactccgggaaaccttccggtgactgtgtttcattccagtcaccttccccatctttccggtcagttggatcgtcgtcagaaaacactcaccgccggcaaacttttccaacgaacttcccggcgacgtctttttccgacaccgaccataccagaaggagcgcttggaggagatctctaacttttgtgaaggcaccagaaccaaaagttcatccacgcgccggccacgctcagttttccgtccggcgactgcatctcacgcgtcgacgcatgagggcgcgtgaggactttcccagccacgcgcctcctcctccagcctcgcctgacgccgactagccttccttcatccctggttctgccatccgagccctgcacgtacctcttttggggttttttgcctccgccgaccctccaaacagtttttctggcaagcttcggctactttttctccatcctaatccctgcacgtgcttaaggaagtgttcttctacctttccggtggtgccacgccgcgatctgaagccgtctccctttccagtggtgccacgctgcgatctgcagccgtattagggctctcttctatccaaatatacttcattctccagataagtagatatggctactaaaagttccattttttcctctgttatatctggatctcctatgattactttggagaaattggttggcagtgacaattatctttcctggtctgcctctgttgaactttggtttatgggtcaaggatatgaggatcacttgattacacaggaggcagatatccctgaggttgaccgcgtacagtggaggaagatagatgcacagttatgtagtgtattatggcaatcggttgatcccaagattcttcttcatctttgggcctacaaaacttgttttaaattttggactcaggccaaaggattatatacgaatgatatccagcgtctttataaggtggcttctgctattgtccatatcaaccaataggacttggatctatctacttatattggccagattgcctctcttaaggaggagttcttgactgtgatgcctcttactcttgatgttggggctcaacaaacacagcttgacaagttcttcatggttcttactcttattggcctccgttcggatcttgagcctgtccgcgatcagattcttggtagttcatcagttccgtccttggatgatgtgtttgctcgcctcctccgtatctcctccactcagactttgccattggatagcacttcagattcttctgtgttagtttctcaaactagctctcgaggaggccgcagtggtacctgaggtagaggtcaacgtcctcattgcacctattgcaataaacttggcgacactcgcgatcgttgctatcagttacatggacgacctcctcgcactgcccatgtggcccagtcctttgattctctgctgcctcagcctccgagctcttccgcatctcaagcttctgttgcctttgttgcccaacctggtaatgcctctgcctgccttacccacacatcttctcttggaccctggattctagattctggagcttctgaacacttatctggtaataaggatcttttctcctctattactactacttgtgctttacctactgttaccttagctaatggttctcaaactgtggctaaaggtattggtttggcccttcctctgccttctctacctctcacttctgtcctttatactcctgaatgtccttttaatcttatttccatcagcaaaatcactcgtactcttaattgctctattaccttttctgataaatttgtgaccttgcaggatcggagtatggggaagacgattggcataggacgtgagtctcaaggcctctatcacctcacctcggattcatctcttacagtttgcatttccactgatgctcctctcctcattcacaattgtctgggccaccgtagtctctccaagttccagaagatggtccctcgtttttccactttgtcgttgcttccgtgtgagtcatgtcagcttgggaaacatactcgtgtctcattcccaaagcgtttgaataatcgggcaaagtctccttttgagcttgtccacattgatgtttggggtccttgtcggactgtgtctactttaagatttcagtattttgtcactttcattgatgactattctcgatgtatttggttatttttaatgaaaaatcgagctgagttattctctattttccagaaattttatgctgaaatccaaacccagttcaatatttctattcgtgtgttatgtagtgacaatgtcagagaatatttttcagccccatttacttcgtttatgtctcatcatgggattcttcatcaatcttcttgtgctcatactcctcaacaaaatggggtagctgaatgcaagaatcgacatattgttgagacagctcgtactatcctcctccatagtaatgttccttttcgtttttggggggacgctgttcttaccgcttgttatttgattaatcatatgccctctctgtcttacacgatcagattccttactcccttctcttccctgaccaaccactttatttccttcctcctcgtgtctttggttgtacttactttgttcatattctcactcctggacaggacaagctttctgccaaagccatgaagtgcctcttcttgggatactccagacttcaaaagggttatcattgttattcccttgagactcatcgatactttatctccgttgatgtcaccttctttgaggactcaccattcttttccatcacatctgagtctctttctgtttctgaagtcttgcctattcccattgtctccccacctgatgctatgcctcctcgaccacttcaggtttatcatcgtcgcccttgtgtcgttgctcctctcacttttgctgaggcacctgctgactcacttcttatcccttcggcttcacctgccctggctctgccttctcctaatgacttacccattgctgttcggaaaagtactcgctctactcgtaatcctcatcctatttacaattttttgagttatcatcgattatcttcaccctattctgcttttgtttctgctatatcctctgtttctcttccaaagagcacccatgaagctctttcccatccaggctgacgacaggcaatgatggatgaaatggctgctctacactctaatgacacttgggatcttgttgttttaccctctggtaaatctaccgttggctgtcgttgggtctacgcagttaaggttggtccatatggtcaggttgatcgccttaaggcccgcttagttgttaaaggctatactcaggtttatggttctgattatggtgacacattctctcctattgccaagattgcttctgtccgtctgcttctctccatggctgctatgtgttcttggcctctttatcagttgaatattaaaaatgccttccttcatggagatcttgctgaggaagtttatatgaagcaacctcttggttttgttgctcagggggagtctgttttagtgtgcaggttacgtcgttctctatatggcttgaaacaatctcctcgagcatggtttggccgttttagttctgttgttcaagagtttggcatgcttcgtagtacagcagaccattcagttttctatcatcataactctttggggcagtgtatttatctggttgtttatgtggacgacatcgtcattacagacagtgatcaggatggtattcagaaactaaagcaacatctttttacccactttcagaccaaagacttggggaaactcaagtatttcttgggaattgagatagcttaatccagttctggtgtggtcctttcccaaaggaagtatgctttagacatcctggaagaaaccggtatgttagactgtaaaccggtagacacacctatggatccgaatgtcaaacttgaaccaggacagggggagcctttaggagaccccgggagatatcgacggctcgtaggtaaattgaactatctcaccattactcgtccagacatttcttttcctgtgagtgttgttagtcaattcctacagtcaccatgtgatagccattgggatgtcgtaatccgcattcttcgatatataaaaaatacaccaggccaaggtgtgttgtacgagaacagaggtcatactcaggttgttggttacacagatgcagattgggctggctcacctacagatagacgttccacttcagggtactgtgtttttattggaggtaatctaatatcttggaagagtaagaaacaagatgtagtggccagatctagcgctgaagccgagtatcgagttatgactttgacaacatgtgaactcatatggttgagacatcttcttcgagagttgaggtttggaaaggatgaacagatgaaactcatctgtgataaccaggccgcattacatattgcatccaatccagtctttcatgaaaggaccaaacatattgaagttgactgtcatttcattagagagaagattgcatcaggatatgttgctacaagttttgttaattcaaatgatcaactagcagacatcttcactaaatctctcagaggtcctaggattaaatatatttataacaagcttggtgcatatgacgtatatgctccagcttgagggggagtgttgaatataatgtatttatagtgtataatctttccttgttaatataggtcacatgtatggtagttaggactcctagccttgtatatatatatatttctcaattgtaagtagatattacatgaatgagaattaaggtctttcttctttctctctctctcaacaatgtccaatgtgcgtctaaggttacctacaataagtgaggaattttatttattttttcattgttggataaccctgttaggtacatgtctagccaataagtatgctgtaaacatatcccatacacaagcacttggcatgtcatgcctgaaatgtgtgcttcacatattttgaagcttcttataacaaacataggttaaaattggctgccaaatatcctttttttattcctttttgcttcacatcttagtgaatgaggccagaaacgaatatagaaaattgattttcaattgatgaatctcctatcttgctctttctctcatttatatttcttctatccttaagcaggatttgagactatactgtatgtccctgcaagaaaaggacttagtctgtggctgatgtaggataacatttagaagtagagaacatctgtcatctattaaaaagcaggctaggttaaggcaatccatttcttctggagtttttgtggaaatgaaaaaatgttagagcttgtagatggatgtatgtgtgctaggggggagggagggagggaagcagaggggggagggtttggttgtgaataattaggaaagtatctggacaggaagaggaaactagtgggctgaagataggatgaggattaggaataagtggttgggctttcagtttaaaaggaaaatatattcctgtttcctctgttttttctttttttggtatcagtagatggttctattataggaaagaatgtagaattagaatgaggaggatatagagtattgctagttgagggaaaagatgtgcaccccatttcagaagaatatggcaagactaggattgcgtctggtgagatctatgggtattcatggattctttgtggtaggagacttggctttagttatattgtgggtctcactggagaagtgagaccttaaaaacttgactttcacaaacacaaaagcaattgatctgtctagggatttgggctgttcttaaattagatttcctgttgagctaactggacaacaaattggttgatcaaccaaggggcttcattgctaaaggtatttgtacggaatttcatgccttttaagtttagttagaatttttgggagggagatgcccttttttgttcttttattcgttttttctattcttattttttccattgatagatagctctttcctctaatcctatttgtttcatttgtaatgaaatgaattgctgtttccaatccaaaggaaacacaataaatattgtaaaataatgatcatgatgattatggtgatagcctcagtggctctgaggcttttgagagtttttcaaaaacggggaaataaatggaatctcatcattaactgagtacaaataatctgcaatgttcctttgttgacaattcattgaaacacataggttggggttcagaaatccagttgtcagactctctgtgctcaaataaagttttggggtctaaaatttgataaaagaaaagtctgtacgtaaggactatgattgtgacatcaaagaggttgttcttttgaattaccaaaacgcctctgaatatagagaatttcaatttcatgaacttggaggaggctggaaacatcagatgaaccaagaaatggatcactttagtttcaaatgtactttgcttttgtactatgcctcttactgctgtcatgccttaagatttgtcccactcgtaactgtgggtgcattactacaaacaccttttcttatatttgtgtaactcataattgttaacctacaatcatacatgacaacttttccttgttaggatctcattttaccattttgtgatgaaatattccatggaggaatatttttgttttgattttggtccattcctaaaatcttcagatgatcaattttcatttctcattctttagaattactctgaattttattgtctgtgctttcttattgggctatatagaaactaattgatcttttataacaggcgttctttactcagtcaatcaccagttgtgaggc

SEQ ID NO: 12484 - DNA, 862 bp, Vitis vinifera
  Intron number 4 from transcript GSVIVT01009033001 (locus G SVIVG01009033001) derived from phytozome v7.0 (chr-ID chr1 8; pos 4437480 to 4438341)
gccgtgagtttgatcgcatagacaatccacaggtaatgttgatattgtcatttgtagcacaggatcaacttggtcctgtttcgttggcctttggtttcatgtgtactgacatatcatgtgttatttacaagttctgtttacaatgttggagagggcatactggccgtgttatcatatgcttctgactgtgccaaatttttttcgttttttgtttccttttagcttttattgttttctctggtctttcaagtttaaattgatgatttcaatgtcccacagggagaatttttcagaataaaatttagtccttgtgtgtgattttgacttctaatattgcttttctgcaatcttcttggtggtccttcacctttttctttctacacctaattatcaaaagaacctatagtgcccagaaattacaatgatagcctaaagggtacccattagaagctggggacttctatcggtggagttgagctaaccactagtgctttagctccaggttggcagttctgacgctgtcctcctcctgattgaatatagcagtgcttttccattgtagacatgcagctcttgttgcttttgggttttgatttttatattgttgttaatttgattgctctctatatatttctggagtcttcaaatggtagcgaccctgtaattcttttgttgaagcaaaactagggcaatttcgtaagtttgcttgatttgagctctggacaatgcaattctaagacaaaagaatctgacctatgaattatcaattaatcaatttcaagtagatactagacttagtgagtacaattttcatattcagttgttattcttctacagtttgagggttacaaattcgacccta

SEQ ID NO: 12485 - DNA, 7445 bp, Vitis vinifera
  Intron number 3 from transcript GSVIVT01020571001 (locus G SVIVG01020571001) derived from phytozome v7.0 (chr-ID chr1 2; pos 4194053 to 4201497 reverse strand)
ttcaggtgagggttttccattctcgttggttattatcattggagcgaatgagccttcttatttagcatgccttttcttcattaatctggttaggatatcctataatcagtagtttcatgcaattagtttgactgaggccacattagttgctcttaacagaatgatctatgctcttttttcactcttcttactatggttcttcctgaaatgaatatttttgttttcaaggatcttgcattgctgatggtccttttttctttttcattgatagacaaggtgaaatgtattaataacccctactttagatagtccttcttgctgtaattttttcctttggagtttgctttcttatatttagttttagtgatatttgtggctggtaaatatttcaaaaactgctctcaattatgtgataaaactggtcatgcctggaacctgagttaaagttgatattttgcttggatattatttttatcagtgcttatttcccttgtttaggattcacaactttggtaacatgctaccgattcaatctatttaaatccatgtattccacacacacacacacacacacacacacacaagtataacttttgtacacacacacacacacacgcacacacgcacgcgcgcgcacacacacacaagtataacttttgtacacacacacacacacacgcacgcacgcacgcgcgcgcacacacacacaagtataacttttgtacacacgcacgcacacgcatgcacacacgcacgcacgcacacgcgcacgcgcacgcgcacacacacacacgcgcgcgcacacacacacacacacacacaagtataactttgttaacacacacacacacacacacaagtataacttttgtacacacacgcgcacacacacacatacgcacacgcacgcacacgcacacacacacacacacacacaacttttgtacacacacgcacacacacacacacacccacgcacgcacgcacgcgcgcacacacacacacacaagtataacttttgtacacacacgcacacgcgcgcacacacacacacaagtataactttgttaacacacacaagtataacttttgtacacacacgcacacacacaagtataactttgttaacacacacacacacacacaagtataacttcgttaacatgctaccgattcaatctatttaaatccatgtattccatatatatttgtacacacacacacacaagtataactttggtaacatgctaccgattcaatctatttaaatccatgtattccatatatatttgtttttacatttcttgcatgcttcatcatgtataagaatggctatttgttcttttatactgaggaaatggatgatgccacatgtgatgaaagcatcatgattagttgaaagtataacatgactgaccctagtcatatctccctcaaacctgctctgcaggtcttgcctgcatctttgaacaacatagccttgactttagggttgtagagtctatggtgctgttgctctagaggctacagagaatacataaattcttgaacagggctcagatatattttacagacatttccatatgcaaatatgtttaccacctcaaatgtccagtctgagattcatctcaactatcgagtcttccagtttctaccacttttttggtggaactcagaacttgtatgcacttagatgaaagcatgttgaacagatgagatgtgtgccttccattataaacgtcttccttaatatctatgtgctgttttatcaaccttttatgtaaccaccaccaccactccaaccccaacacccctgcccaagccctcccctcctgtgcatccagagttggatgatgtcctcatacattatagcactcaacccaatgaccaatatgtccttgcttatcatgcatatgtcaagagactggatgatctccacatgcaacaacagtttaaagggatttgatgggaccattgacatttgaatatgtgttggtatgcttcatcacttattattgtggaaagggagtatacggcgtgtataccttctttcttttaatacaattcttatttacctatcaaaaaattattgtggaaagggagagctggttttagtttattggattgaatcagagggtgatgatatgataaatgttttgaagctctcttgtgccttgagttggactctgtatattcttggtgttgaaacctgtgatattaatgggctctctctctcttcctccctctctctttctccttatgattcatgtatgatttctgggcatgcatgtgttgggatttgatcgacattaaaacatggtaatataacaataaacaaacaatgctcatttatttatcttttaacagtagaatcagttttagggcaagcaataggcgaggagtgaaattttgaaaggataaatggtgtggtggcttaccctttggagaggcttttcctgggttgtattccatagccattgccaaggatgcatgggtaacttaggtgtgggagcgggagcagaaggcagtgtttggaaccctcgtttttcaagacagatccatgagtgggagctacatggggtggaggctttctttaggagattgcaagcacaaaaattgacatagatttagaggataaaatggtttgacagaactcaaaggatagtatttcttttagttaaatttccgtactctcctttgtccaatggaagaatggaggccttgtagtcagcttttttggttgggaagctgcatggaaaaggattttgatattggattagctcaaaaggaggggatgaaaaatgtcgaatagatgctatatgtgaacaggaaaacatcctccttcattgctcgaaagcgattatcttgtggcggttgatttatgctttgtttggaatagagtgggtaatgcattcctaataaggaatgcactattgacctagcacaaatccttcattggggaaaagaggaagaaagcttgtagggctgctctcttgtgcctattcttgaccacatgagagggaagaaataggagagtgtttgaaaatactaaaaaaaccaatcaagcaatgaaacaatcaattatgtataattttttggagtagatcagagtgtgcataggagattgctctttatctatgttccactttattgattggctgaattctaggtagtggatgtgagttgttttttgttcgtccctcattttggtgtggccttttggcgcccttgtatacacagtatatactttagctcgtccttttattaggtgccatccatataatgaatataacaattatttcttgggattttcgacagagggtctggagaaggacattatggaatttttggtcaaaattcgtaagagaagggaaagagttcatagcaaatccctgctggagaaaacaaaattcgagagagaactgagaagattagagtgctccattaactatgaaggggggaagaaacaaaatggtggtgagcaagcaagggggtgccagattacagaagtctaatgaagctacgaatccttagctggaatgttcgtggagctaatgacagctccaagagaaggattattaaggcagtggtcaggagtcagagggtggatctcttttgtcttcaggagaccaaaattcagtcattatcggagggtctggtgagaagtttgggcgctggcaggtggtctaattgggtggccttggatgcagtgggctctgcaggagggatgttagtgtgttgggataaaaggtcgttggaggtgatggagacggaggtggggaagttttctgcctcgtgtaggtttaggaatgtggaaaatgggctaacctggtcctttactggtgtgtacgggcctttttcgaaaggtgacagagaatgcctgtgggaagagctaggggcgattagaggcttgtgggaagatccgtggtgtttagggggtgacttcaatgtcattttgtcccagagggaaaggaatagacagggaaggctgactggtgctatgagattttttgcccaaactgctgatgaattagagttgatggacctccctatgcaagggggtgctttcacttggagtggggggaggaataaccaatcttgggctaggctagatagatttttggtgacacaacagtggctggagatgttcagtggggtcgtccaatgtagactgcagagacccacttctgaccattttcctattttgctgatgggtggtgggttgaggagaggtcctactccgttcagatttgagaacatgtggctgaaagtggacggctttaaaggtcttcttcgggaatggtgacaggggattgaggtgagaggaagggccagtttcaggatggcctccaagctgaaattattaaagctaaggattaaaacctggaatagggaggtgtttggaaggctggaagttaacaaaaattctgcccttcagcaagtggaatattgggacggagtggagagtgagaggtgcctgtctttagctgaaactgagcagaaaaaggaagccaaggacgcctttcacaaatgggtgttgctggaagaagtccactggaggcagaagtcaagggagctgtggcttaaggaaggggataggaacaccggctatttccatcggatggctaatgcccatcggaggaacaattccctggacaggataatgattaatggtgagtggctgactgaggaccaagaggtgagggaggggattgtgactgccttccagaatttattatcagaagaaccggggtggagagcggatattgaggggctgcacctaaatcaacttactcctcgggaagctgaagacttggagaagccttttactgaagaggaagtccacggtgccttgatggagatgaggggagataaagctccaggaccggatggattcacaatggctttttggcaagattgctggccgtttgtgaaggaggagttgatggatttttttaaggaattctttgagtatgggtcgttcaccaaatgtctcaacaatacttttttggtccttatcccaaagaaaggaggtgctgaagacttaggggatttcaggcccattagcttgcttggtgggttgtataaaatcttggccaaagtcctagcgaataggctaaagaaggtgcttgatagggtcgtttcggcagatcagaatgcttttgtgagagggagacagattctagatgcgtctcttgtggcaaatgaggtgattgactattggcacaaaaggaaagagaaagggttgatctgcaagttggacattgaaaaagcctatgatagtttaaactgggagtttttgatgaaggtgcttcggaagatgggatttgggtcgcgttggatggattggatgtggtggtgtatctccatagctaaattttccatcttaatcaacggggtgcctgctggtttctttccaaattctaaggggttaaggcaaggagaccccctttctccgtatctcttcatcttgggcatggaagttcttagcacactgtttagacgggctggtgaggggggtttcctttctggctgtaggcttcgggggagagggggtgtggagatgaacgtttcgcaccttctctttgctgatgatacaatcattttttgcaaagcggaaagagagcaagtttccaatctaagctggatcttggcgtggtttgaggcggcttcgggtcttagaattaatcttgctaagagtgccctaattccggttgggcaggtggatgagttggaggagatggcggctgagctaggatgcagattgggtgcattacccactgtctatttggggctgcccctaggagcccatcataaaacttcttcttcttgggatggggtggaagagaggatgagaagaagattagcccaatggaaaaggcaatacatctcgaagggggggagaattactcttatcaaaagcactttggccagcatacccatctactttctatcccttattcgcatccccaaatctgttacaaaaaggattgagaaaatccaaagagatttcctttgggggggaggaaggttggagaggaaagctcatttaattaaatggaaggtggtttgtagccctaaggaggagggaggactaggcatccgaaaaatagatgtattgaacaaagccttgctgggtaaatgggtgtggagatacgcctatgagaaggagaatctgtggaaaagggtgataggggtgaaatatggtcaagaggggtgtgggtggaggactaaggacgttggtgggccttatggagtgggattgtggaaggagatcatgaaggaagctgattggtgctgggagagtattgtgtttaaggtaggcaaggggaccagaattttgttttggatggacaagtggtgcggtaatgaggccctttctcaaatgttccctcagctgtttaccttggcgggtaataggaatgccaaagtaagtgaagtgtgggactctagcttgggtcaaggaggatggaatctcagattggctagagatttcaatgattgggagctggaacaaataggaaatatgctgaacctgctgaaggatttcaggacttcgactgaggaggatgatgtgagatggaaaagggaaagcaatggtgttttcggggctaagggtgcttacaaaattctggttgggtcctcagcttgtgtcttcccgaacagacgcatttggatggataaggtgccaacaaaagtatctttttttgcttgggaagcttcgtgggggaagatcctcaccttggataagcttcaaagaagggggtggcagctccctaaccggtgttttctgtgtggatgtgaagaggaaagtgcgaatcatattatgttacattgtacagtggtaaagactctatgggagatcgctctcgccatttttggagtccaatgggtgttcccagaatcagttataggagtgttacttagttggaggggatcttttgtggggaaaaaaagaaaagacacctggaattccattccgttgtgcattttttggacggtttggaaggaaaggaataggttagcgtttaggggagggtctttagatatacaaaaattcaagaatttttttgtatgtaatttgtggagttgggctagggtgtacattggtgaggatacctattctcttttaggctttttggagtggcttgcggccacttgagggtgggtgaggttctccctctttttttgttcagttccccttgtttgggcatttgtgtataccccctgtatacatgcggctttttagccttttctaatttattttgatcgtttatctatcaaaaaaaaaaaaaaaaaaaaaaaaaaacaattatttgcctataaaaaggagcatttttcagtgtaacatatgattttcctgccctttatcttttcctgaagtgctttatggtaaagttttatttctttgctacattgttgacaatagggggtgattatattcc

SEQ ID NO: 12486 - DNA, 6565 bp, Vitis vinifera
  Intron number 4 from transcript GSVIVT01017637001 (locus G SVIVG01017637001) derived from phytozome v7.0 (chr-ID chr5 ; pos 2187024 to 2193588)
ctgcagctgctgcttcaggcagaggaaaagttgaagtaagctcattgtatcactcatactgcgatattttttttttcttttttgataagtaaagacttaaattaaaattagaagagctgccagaaaaaagcagtccaaagaatataagaaaacaaacctcccttcaccaccaaggctcaagcaaatgagtacagaataagaacctgaataattacccaatgattcaaaaaaacctaaagtcggtggacaatcatttaaaaacaacttagactcaacccacagaaagcatacaaaatccctttttagtttttggattgaaaatacctcattatcgaatgcaattctattttgtgccttccacactgtccaaactagcacaaagggcttgcttgccaaaccttcttgcacttttttcctagaaaagaaccttgccaacccaacaaagtctctaattgacaaaggaagcacccaaggaacccaaaaagtataaaatcagctctcataaatcccttgtcatttcacaatggagcaacaaatgatcaatggattccgcatgtccatggcacaagaaaaactgatttgctaaagaacaaccttgtctttgaacttgatccaacgttaaaatttaccgtgcactgcctcctatttaaaaaactaactttgggttgaacctaagaaatccaaatgccctccattggaaaagatcaccaaagtctggttccaacacattgtaaatggacttaacggtgaacttaccactctatcattgactgcaataaagtatcttaaacatccttgcaaattctctgcctttgcaaacacgccaaaaatctctccacacaatccatctcccaatcattaaaaggtttagagaaacacagattccaacccccatccccctttttcaatagaaaaattccaaacattctctacccacgcatccttaaaaagagatgaggcaaatgaggaaggaaacaaagcacataagaggttatccccaaaccatctatccttccaaaaaagtaccctccgcccattacccaccacaaaggagcattgagatctcataagatcccaatccttccactttgctttccacaacccaaccccacacccctctttgacctcccgagttgcctgcccctctcttgttttcccatacttaccttggattacctgattccaaaaagcccctctctcagtcgcaaaatgccaactccacttgcaaagaagagctttattaagaactgaaagacttttaacccccaagccctctcttctcttatgtcggcagacaatcgcccacttaacaagatgaggtttacactttaacgccccactaccctagagaagattcctctaaatctgtccaatctgcaattgaacaacccttggcaaaaagaacaaaggcataaaataaatggacaagctagataaggtattgtgaatcaaagttactcttcctcatttggaaatatattgactcttctacagataacctcttgtgaaactgctctttcactccatctgaaactactgtagacttaaacggagcacccaaaggaagtcccaaataagaggaaaactacccaccttgcgcccaagcttaataagtacatcatctaaattcttcacccccttcccatagaaaattaactcacttttctctaagttaatcctcaacactgaaatcgcttcaaaccacataagtagccaacgtaaataagttatctaatcctaagaagccttgcagaaaaccagagtgtcatcatcaaacaataaatgagaaatctgaacaccttcctcaaacttatctttcacttgacatctagaaaaaaaaccaccagccaccgtctgcttcaaaagacaactaagctcctccatgacaatcacaaataagatgaaagatgatccccttgacgcaatcctctagaacttgggaaaaattcaaagggggtaccatttactaaaacagagaatctagccatggaaatacaccatcttatccacctaatccattttcccccaaaacccattttttgcaaaaccgggagtagaaaggaccaatccacatgattatgtgccttctttatgtctagtttgcacaaaagaccactctctttactttttaaaattgaatcaatagcctcattagcaataagcactgcatccaaaattcgtcttctctcctcaaatgcactctgaaccttagaaaccacgtttccaatcatttttttttaatctgttagccaacaccttagccaaccacttatacaacttatacacccctcaccaaactgattggcctaaaatccctcaaatcctcgacaccccttttcttaggaattaacacaaaaaaagtaacatttagacctttttcaaaactgccatactcatggaactccctaaaaaacccatcacctcatcatttacaaaattccaagaaaactgccaaaaacccatagaaaaactatccggcctaggaactttgtccctactaaacctgaaagagcactaaaaacctcctccacagtaaagggctcctccacagtaaagggctcctccaataaagcagcctcttgagcctcaaaaccctcaaacagcaagtcatttaaacttggtctccattcccctaaatcagaaagcagattctaaaaagcttgagccatccctcccttaatatccttttccttggacaaccacactccgttaatcttaattttggccaataaattctttttacagtggcattagccatcttatggaagaaaaaaaaaaaaagtatttctatccccctcctttaaccaaacctcccgagatttttgtctccaagaaatttcttccaacaaaacccactccttatactcctcccttgctccctcttgtgcttcaacctcctccatagacaaaatacaggacctctcctttgcatcccaaaacgccacttgctccaatgccctagccttcctcacttcaagctggccaaaaacttctctattccaagtcattagatgaaacttcaacgttttcaactttgcagccaaaataaaactgaaggaaccacgaaagttgaacccctctcaccaagatttgagcaaatccttaaacccctccacttttaaccacatattttcaaaacaaaaaggcataggacctctcctcaaccctcccccatccaacaaaatagggaaatgattggatactggtctagggagcacacactgcattgctccactgaaatgagtttcctacacctcagaaacaataaactgatctagtttggactggatttgattgttcaaaccaccactccaagtaaaagggccacccaacaaaggaagatctctaactataaatcctcaattacatcagaaaacctccgcatcactcaagttaatctacctccactacagcgttcacatggaaacctgatcagattaaaatcatctgcaacacaccaaggttcaccttaaagacctttgatcacccctaattcatcccacaacaattctctctctttgcagcattggcccataaacccctgaaaagctcctactaaaattgttttgacaattttgaaaccgacacgaaaccgaaaactaccccacttccaactcaaccaattgcaatacccttttatcccataacattaaaatacctccagctgcacctttcaaattcaccccagcccaatctaaaaaatgccccacaccaagactacacatcgaccccatagacaattcttgaagctttgtttcctataaacagatcaagtccgctctctgagacttaatcaaagccttactaaccttccttttatctcttatcagtagccgctcttacattccaagataagattctgatcctcatctaacactggaaacactgcccctactatccacccttgaaccagaatagtttatggaccactccatttttttcaactcccttttaaacagtgaagactccaaggttttcctcctccctccattcccaagcctctgccaatctcatctctctttcatcttcttgagcaattgcaaaatctccatgtcaaacccctcaatcggcatccccaaacaactgaaccttgtcaaacagctgtaagaccagcaatctggcagccaatcataaaaaaaaaccctcccccatctcctgagtcccagacacagcgtcacccaacccaaactccaccacagctgaacgaggtgcatccacctcctctccatcagccaacactacccggaatggggctatagactccccttccaaagctcctgctcccacaccaacaaaagagtcctcaacagtggccaccactgccctttccaacccagaataagaagaaactcatcccccaaagaaaaggaagaatttgtagccagaaaggaatacctacaaacctcctccaaaagtgcttcatcggtgatgcaaacatgacaaaactctggcggccctgttccacgcaagtggcagcaccaccagccacctcctcaagcaacctcccacccactccagctctccaccccaacacagaatgctcctgctgcccaacgcccaaagccttagaaacaatgggggtccttatctaaccctcaaggaggctcccacctgaaccccagacccacttacctcacctacttaccatcaactgggctgagtcacttaactgaactttgggtcaaaaagacggaagcccacctgaccccaaacaactaccctcccccaaagtcaaatcctcagcagagcagcccacctccttaggcccaaatgcaaccccacttacaacctctcctccacctaccacttggccacctccaaacacagtaaccacacctgcactggtactaaactcatcagcaacagccacctctctaccctggaattcagcaccagaacacgacaaagctgccttcaccaactgcaaatccagcgaagacaagttcaccctacgtccagcgcataatccttcactgctgccactcctaacctccacagtctctccaccactgcttctggaagacggaacaaccaccgacacccatggtggaacctcccaccacaactggattgcaaaacaaagagacccaacaaccaaccgcaaagaaccagacaaacccttaccttctgatttcaccaaaacccatgcccattgctactgtacaaaaccagcggtatcctcatccacagcgacgaaaccaccacagcaatccccaattttccaaaacatgttgcgactccaaaaattaaggggatgacccaccaccctcacccacacctccttagcaagccctccagtccaacaaccatccacttctggtccccacttctgcaaaactaaaagcttctctctaaaccaatgggagcctctctgcaacaccctttcagcttcaaaactatcctcaaactcaaacagaagaagtgccccatgcaacttggaaatcttgagcgcttcagatgccaagaattaataccccaattccgcaacgcaaacaaatctggaatgaaagcagcatcctctccccaacgaccaaccaagcaccaccccaactgctcctctctatgcctcagttctggacccccaaaatggtcccaaatcgcatcccctaacctgtcacccttttgctttgacaacatcagcaaaagaccttgaatcctttcgcacaggcacagcaggcccagaagaacgcaaagagaacgcagcttctcagccaaagtggccgacccccctgcaaaccctttaccctcaggaaagacctgacaaaacctcttcgctgcatgatccaaaacagaacgaaaagggaactgacctgcctgattagattgctgttccagcctaaatttcctgcccccatcctcccaacatttatcaaacttccacagacaatcctcctacaacaagcctccactccttccaaaaggcaatgaaggcttaaattcccaaactgaatccaagaagaaaaccctcaaacttctctcgacaatgaccccatgaagtttctcaccaactacctccactgaaagttcaaatgatttcgactccacatcaaaacaacacttacctcctctcatgcctactcccctttttctacattgagcatatcagaaactattcaaaagctgtcatgttgtgtcaacatggatctcaacatgcttcccttttttaatccctctatttatgcctgcgttgaatttggcttcctaattgtgatcaatgtaatttccaatggtttatgcaacttgaccaaaaaaaaaacgaactttaataatgaaaggcaaacattaatacttgagctaatttatatgattgcctattttgacttatcagtatgaactcggtgggatttgcttctagttcaaaaactgaacatgctttaatatcaaagcattgaggtcaactaaaaattctatggaacagctgcaaaaatgataaatttgaaattcatctgaatgccttaatggcattacctttcactgctttgtgaatcatatgacagttgtatttcatattttttctctccatgtcacagatagtggaggtacgggactttgcgggtgaagagat

SEQ ID NO: 12487 - DNA, 1350 bp, Vitis vinifera
  Intron number 7 from transcript GSVIVT01036294001 (locus G SVIVG01036294001) derived from phytozome v7.0 (chr-ID chr1 8_random; pos 3446462 to 3447811 reverse strand)
ttaaagattctctagtttatttaaaccctagcaaggtatgtcttctctcttttttatttattagatggaattagtgaaaagagaaatatctagataacttttaaaatcatatcctagtcactgattttttatttttttatttttatttttttgttctttttctttcctaaaaaaatattttagaacttattatttggagtagattattgaatttaaaaggaagtcatgcaatttagagggtaaaattatatgtgtagagcttaacaattatgatatgtttcttaaattgattgattatgggatccatctataaacaacctaaaaggtgagagcatgacttagggccggtgggcttggcgcaaaatatctttttatttatttaggaattttaaaaaataaaaatcaaaagtacaagctttgttcagctcctaagaaaatgatttttgtatgagaaaaaaaaaaaagaaaatcattttgtatgagagaaaaaaaaaatatactagatagattatttagattatattctacttaattgttgataaattttaattttatttaaataatttatgttttattgttagtggtaggttgttttggttgactctaagatttttaaaatacctaagtttttaggattattcataaggcaactaatttactattgataatgatggtgctacatttatattatattgttagaaacaagttttgaataaaattttatcaatttaattatttaaaagattcgtaaaatttatttctaaaattattgaatttttaaagttttgcaaaaaaatgtaaaaattttaaaaacttatgatcacatttcttgctttctttaaataaaaaaaaaatcctttgaaaatattgcttgaatttttattaatttttaaataaaatttaaaaattatcaacttttttttttttaatcatttcatacttcatagtttttttctttcacaatgagtatcaataattaaaacgtttctttttttccattttttattttttattttttgtttcataactaatataagtaatcacatattttgttaaatgatcatgaaatataaaaatttttgtatgtttattacaattcatgtttctttttaatttttgcgtgtttttttttttaacttaatttgcccctacccatctacttcaccactactttgaggccataccgaaatagtttgaaacatataacttatatgcttctcattttatatttgtattttttattttatttagtcattacaatatattaaaaattatgagattctatttgtgttattaagtcattacaataaaataaaaaagttcttatgcagagaaatcaaatcagaaaaa

SEQ ID NO: 12488 - DNA, 11023 bp, Vitis vinifera
  Intron number 8 from transcript GSVIVT01020912001 (locus G SVIVG01020912001) derived from phytozome v7.0 (chr-ID chr5 ; pos 17344266 to 17355288)
cttgcatttgcagggtatgttccttatcttagcatatgggttttgggaaaattttcattcttttttcccctttttgtttggtatgttcatgataattggagtttgagggttagaaatctatatttggcatcttgcaaaatcattcatgcatttcgcatttgcgtatatatgttctgttagagggcggatgggagaaatctaataatctcttgcctacagcctctattattgagagtaataagtgcccctctaatcactcatagagcgagtttgtcaaaaaaacgatagaatccatacgaaactagatataaagtacaaggagacccattctacctatgttgttgagattttccatggcctcattgttcattgaggttgtatttggaccttctcgcgcttgtgctgatactggatgataaatatcttggattggtttgatttacttaggatactgttgtggtttgttaatgttataatagcacagtgttctataataaccataggtactttgaaaacatattatttttttatgaaagaatccattgatgaatggatgaaagggaaaaaagagaaggcaaacaaaagtcacccactggaaagatctaacaaatatccgagaaagatctcctcttttctttctgccatcagagctcaagaagcagtatgcagcttgtgcattgactacttcctgctcaagacactgaacttctgtatatagtatatttttatgggaaatatccttggaaatctccaccaatggggatggaagtaaaaacatggcaatggggaaaaagaaactgaaagtgaaaaaagaagaaaaaaaagaaaagaaagaaaattgttggagtggacgatatacattgtgggctcaaatcctacaagcttaagcttttaggaaaattggttgtctaacatggtattagagtctcatatgatgggaggtcgtgtgttcgaatcttgctgcatgtttatttcctcactttatcaagcccacatgtaagcacaaaaaagggctacccataaaagaaggcattagagtacatgatatacattgtgggtcctatcttacaagcttaagcttttagaaaaattggttgtctaacaaaaaccttaaagcctctcactaaggccttctaggagttgcattggaagaaaaataatgaagtcttaccattgaaaattgcaaagtgtgcggaaaaattggtactattcattattttctcattttaaatcaattaccctgatctatggctttggaaaatccaaaaaaattaacaaactacataaaaaaaaaaagataccatatatatagtagcttattaaaactcctaattatttcctaaaacttttaaaacatccccttaaaataaaaataaagaaataaatgataaagacttttagaaaatgaagattccttaagaaaatagaaatttttaccggaggagactttttaaaaaataggacatttgaaaatatgaaaacttctttcaatgagaattttttttttttttattggaaacgacacaaagatatattgatagaaaaagaagtacaagaagaaggatgagaaatcctctcgccaaagacaactaaattacaggaaaatacacagaaaacaaacgaactccctataaggaccaatccttatggagtacacaccactatccaatcaagttgaatcacattaagaggagtccccttaaatgccttggaacagaaagcccaaagagaagcaaggaaaacaatagagtcccaaaggaactctgaattccttgctttatcctcgaaaatcctcgcgtttctttcccaccacacaacctgaattagagcgatgctcgcagcttgccacaaaactatccccctcttagaagtaccaaagcctttaaatttgatggacatcatgtcagatatggtcctcgggggaacccaatccatcttagttaactgaaataacctatgccataacccaatcgtcaaggaacaatgaagaaaaagatgatctgctgattccccatgcttcatgcacagaatacaaatatcaggactaagggttttatagggtcttctcacttgtagcatgtcattagtattcaccttcttgtgtgccactaacaagacaaaggacttcactttgaaaggaacttgagaattccaaacgaactttgaaggaaagtcctgaggagatccaaaagattgagataatgctagaaaaaaagatttgactaaaaaaaagccctaaagaggataatggccataatctggcatctgggaccgaaggagatagatgcaattcatcaagtgaccgcatgaggccttctaagtcctctatcttagaatctgacaggttacgacggaaattcaaattccaagagaaaggacgagtaggaccgagaactgaagaaatagaaatgtttttatccacgactactctaaatagtcttggatattgggttcccaaaggttggtccccccaccacaaatcttcccagaaccgaattctttccccgtttcctaccacataccgagtaaacaaggaaaactcctgaaagacttgtgcaatagcctttcaaggacaacgatgtgaccatctgactaaagtgttagcatcccaaccattggagtgtgaaccataaatgcttaaaatgacctgatgccaaagagctgaaccctctctaggatacctccatagccatttccctagaagagcgagattcctccaagaaatattcccaaaacccaaaccccctattgccttcggtttgcacacaacatcctacctcactaaatgatctcttttgccttccccaatccctgaccataaaaaatccctttgcaacctctcgatttttgcagccactgaaatgagaatcttaaataaggaaaggaagtaacatggcaaatgggtaaggcaagattggataagagttatcctccccccgaaggataagtaggccttttgccacccatctaatctacttgagattctctcaatcactggatcccaaaagccacacgccttagggttcccacccaaagggagacccagatagagtataggccagtcggacgccttgcaatcaagcatctcagtcaatcttgaaagatgagcctgatcaagattgatgccataaatactactcttgtcaaggttgaccttgagcctagaaatgtgcccaaacactaacaaaagactcttgagagtctgcaactcttcctcccttgtgttagaaaagaagatggtatcatcagcaaattgcaaatgggacgctctagttctatttctacccaccctgaaaccctccaacatatttctttcatctgctctcataagcatcctactcagtacatctgcgactaaagtaaacaaaaaaggggataaagggtcgccttgtcttaatcctctcgatgccttaacccaccctttagcgctaccattcaccaagattgcataagataccgaggataaacatccactcatccatttcctccatctaggactgaaccccttcttctctaacacatgatccaaaaaatctcacttcacgtgatcgtaggccttttcaaagtctattttgaatacgacgccttcctcccctgaccgtcttctctcgtccactatctcatttgctataagaatcgcatccaatatttgtctcccttgaacaaaagcgccttgagtatagtggatggtctcatgtagaacccctcttagacgccctaagagcactttggctattatcttgtagagactagtgatcaaactaatgagtctaaagtctgctattttctttctcaaactctttttgggtaatagaacaatgaaagaggcattagtgctttgattgataattccactcctatgaaattctgcgaacactctcaccaactcctccttaatcagatcccaacaatcttggaatactgcaatagtaaagtcatcaggccccgaagccttgtccctatccatctgaaaaatggccttagaaatctcttcttcaatgaaaggggtgtccaaccttaacgcgctctcttccgaaataggggaccaatctaatccttcaacaccccaaggctctcctgtagggctcttgtaaagcttttcaaaataaagtaagatctcctctatgatactcttggcattcttcagcactaagcccctctcattctccaactccttaatatatttcctatttcgcctgccattagccactttatgataaaacttagagttgcaatccccttccttgacccatttcaccctagccttttgtctccaatggatttcctccctcaaaattaattcctctagctccccttttcttaaggctctttgacttaacaaatcagaagtgagaccccctacctactcaatggcatcaaagttagctaaatcattgaggatactttttttcttttctttaagctctccaaaagaaaacttattccactccttcaatttggctttaacatattgtagtctcctcatgaacttgtggccttcccatccgtttccttgaaacccgctccatcaatttctaaagttctctttgaaattagggtgttgtaaccacatattctcaaacctaaaaggtgttggaccccacatgaacgggttggtatccataacaattggccagtgatccgaggtccttctaattagggcttcttgaaggccttggggaaagagcagcccccactcatttgagtagagaaaacggtccagtctcttacacacgggagacttgcaaatttgaccaagtgaatgaagcattccgaagaggtgggtcaagcaattcacattctctaataaaactatcaaagtccctcatgcttgatgttagactagaaccccccaatttttctgagcttctccttatgacattaaaatcaccgctcacacaccataacgaataagttagtccatatatgtcaaaaagttccacccaaaaatccttcctaagtgagggactgtttggaccataaacaatggaaatccaaagaggtccacaaccgtccaaagcgaacttgactgagaccgagaaagatcttattaccacctccttactacgcagattttttgaatcccaaatgatcaaaatcccacctgatgccccagacgccggaagagcaacccagtccttatttctgaccgtccagacactacccacaaaccttctgtcacatttctcttttttttgtttcctgaatcatcacaacatccggattttctgatctaagaaaatctttaaccatccaacgcttattccttgaacccaaacccctaacgttccagctgataattttcatggaaaaacacaaagaccctaaccttccaagccaaaaccactaggtctcaataacctgtggggcctctgttcttcctcctggaatacaccttaatgtccagagagcataaaacctctcgcactttagccattttcctgggggacaagccatcaataaggagatcacccgaatcctccttatgcgacctgacgttagactccctatgggtacagctcttggtcatctggtttgataaagcacactggttctcctcctcaacacggatagggatgtcaccatattttaaagagtcaataacaccttttttagaattttttttttagataacttgattttccgtaggagactgagaaagagggactgaattggggagatgtggaccagagggactcgacaagggagaatccagactacaagaagaaaaagaagaagactcgggtggctgagaaggagagggctgacatacctccaagtttttggctctcggaatttcgcaaatcccctcaaagatgagtcatttacctctgattattgaattagaaggtgaaaccatgtctgaagagccacgaggatcaaaccccactcgtcccgttagcccttctttgtcttcttcgtggatcgccgaggtatcttccctcgaaaaattaccaaacagtggacatcgaaagagaggattctctctgattcctcgctccatctgaaatcccgtcccaaattcctcttccatgttgcgaacttcacttgatgatgatgaaccccgtaggaaaagaggctcgctgctagtccctgtcgtcgatcaatgcttggagggaagaccacatcttctttgaaattgtcgtctcttcctcctgcgtagaatctctcatctgaaccgcaggagctttcctctttctcgcttcgttttcttcccttcgcgaccagacttccatactacaggacttcgttcctcctaagttttggcccaaccccgacgggcctattaacttacagcccacggtggtgtctgacagtgggctagggttgggaagagactgggcctttaactcaacggcccgaccttcctctccaaagatagctgcggcgccgaccctctcatcgcttggacaaagcatcacgatcacctttgtagaggaaacagctcgttggggagaaggagacgaagccgctgcagtctggtgggcttgaggagcttttgggccagcttgaagcccacgaatcctcatcccactttgggccatttccgtgtgggctttaaaagagatctcaggcactaagggcccaataaaattttcttctattgggcccaggctgctccttccccttccattctcccctttgtccgccaaacttgtccttgagtgtcgataacgtgccaggggaagacgcctccttctgtagcactcattgtccctaatactacctcgtagcccttctgcaacttttgactactgagagacgcaaccttccgctttcacccactcgttcctgctacgggttgtctcggacgtgacagtgtcggcttcatcatcttctccgatgactgaaactgctactgtataggtccaaaccccatcttccacctcaagcaacgctggtaacacgacatttggaagcatttccacccatagctttgccttcgtcaagtccaccaacttcaaagtttcctttgccaccttcgttaccctcccccatttcttcaaaatgaagttcaattgaacttcatcccacaagtggaaaggaagacctttcaatactaaccagccgctcctgaattttccgtgaaccaccatattttccttaggcgaccatttccttaggagaatagtccttcctttcacgaaaagtcttccctgatcatgaacccgttccgctctccttgttgaactcacaaagaagcaccccttgaaagcggaaatgggatttatggacaccattcctttcatacccatcatcctcgcgatggcttttccttcgtgagtccagtcttggactttttcttggctttcacatattacagctctgacccattttctggctaacagcatacctccagtcctaaaaccagcctctgccaccacttctgcatatgaccgttctcctctgtaaatgtccttattcatctggatatctccattcttctccttcgaagctcctccgacttgatcaggatactctagcactgatgggatcgccttcctaagatcttcccaccttttccctttaacaccctcggggacgacaagaaataaaggtttcctttttgtaacaatttctgtaactttcatgaaccgccctctgttattgaaacatatctccatcaagagggtcttagtcttgcccctaatctttcgtataatacccctggaagcctccaactccacaactttcttcaaatgcttcgtcaaccaatccagctcctccataccaaatcctactgaaactacaaaacctcggctcctttctgttactgatacccaagttccgccattcaatccttcaaactctacctgaaaggactttttctccacaataatcctttcaactttgcacttcatcatgtctggctctagcatgccctccatgagaagatattcaatgagaaatttgcaatagatacttcctaaattctagataagaccttaataccaaccacttactaattatgattttaaagaaacttaaaatttccataggcgtttgaagatggattggtggagcctagaagctgggtgtctcaaggaaggggtccctactaaagaaacttgggtaagagtttctaggcttcctgtgcatttatggggaatggagttctttaagagagtgggtaatgcttgcgaaggttttgtggctatagatgtggagatagtagagaaacaacatttgcactaggtcagaattctagtttgctccaatgggaagaggatgtatgggctcttatatgtggtaggagggtctttagcctacaccattgagttatggtgggggtctacaccaaagttgttaagggtttcatcaatggaggattatagggtgttggaggtcagggacaattgtgaggggtggccatgtgtgacaagaagagtgggggtagatgttgggaatcatggaaattgtcaagtggcatcaacagggcctttgcatgccaacctagctttaaagggtgcaatgccctctacttgcaacaatgctttggagactaaaggagttgggttagtgggcagagactcaagctctacttctcctttggtttgggaaaagggagggcctagccttcccattgctttttgggctagcccgctttggcttttgagttctttgttttgggctaggtcttttttgttgaggacccttgcttttgtagacccagtggtcttaagaggcccctcatactctctggtgaaggtttgggggttcagaagcttcctcctgatccttgcattttgtcaactactttatgccttgagtttggttcaccttctactgatgtcgccctcttggttgaagcagaaggttttgtgagtttgggttcattttctgctttcttcttggggggtaggtctctcgctctgtctccttcttcttctctcaaagacgtggctatcgttggtgagggataataacttgcttccttagagggagcaaaatgaggagtctccgattgaaagtaaggttgagggttgcaagcctttgctttttccttctaaaaagggtttggaattggattgctcgatgactcttccttttgttgacaagagtgcgaacccaacctcatggtggttttaagaaagggttgactaaggaaagtcttggtgggggggaaggatgtggtgtctgatgagaacgtcgtcaatttggcttacaagaatttcgtctccttcaatgagtgcttaggttttcctaaggaaggctttgaaaaggaagttgactccctattgagaaaattggaagccctagagttgtagagtggtgggatcgagttttaagaggaggccttcacctacttctcggttggaaagagaacttcaaaagttggattgctccattacctacaatctctcaagctgtaaagggagaagaggtaagaagtgtgggttggatttggtttttgagtgtccaggatatgtttaaggtgtggggatgggaggtggtgaggaaaatgttgtttccaatcttttctttttgtgttaggttttcacagttgttggcttccttgtttttcttggggttgtgggtatgtgagctaggtagtggcttaggggtgtagctcttggtgaaagcatgctcttgatgctcatttttcttggtcgggttgttctcttattctcttagcaaattagggcttggttatattggtttggaagccctctgtttcattgtttctttgtttctttgtttcttaggacaatgcctttgatttgggaagtggtttgttattttctcctttcgcatttgttttagtgctctttgtacactcggtgtccttggtaagtctttttgttgtgcttttaatatatttggttatttatctatcaaggaaaaaaatattccttaaacgacttgtacattaagctttcactaacctaaaaaataaattggcccacaagattgaggagattgagggttaagatctttcttttattttccctccttataattaaataacaggtcattagttggtgttggtctgccatatgaagtcctaggaagggtgaattggatagagtccctaacctcaagagtttttgcatgaagcagcaactctcaggacccttgccatttcttctaatagtcatgatttccgatacatagactcttcaacttcccctgatgtacttgtgctgacatgataagacaagatatgtgggcgtgggtgtggggatccttcttggatattcctatcttgatttggatattcactattttttttttttttttgttatatcttttctaaaaatatggataaaagagaaaagaaagagaacattgtttttgtgaaggataccttaattatttgcttctaaattcactttcagttgatattttctcttcattatgtcatatctcagtgccattcaagatcatttttcagccggactactatatcctaatatttgagatgtgaaggatcagatatgtagacacacatccacacttgacacctatacccaaacccatttgaaataggttataattataaaaaattctttcatctttccttatggttgttattcctatcaataatatgtcactaaaaaaccaacaaattatttctttttcttgtacaatatataattttctttaatattttgttatcttcttctaccatttcatagggaaaaagactcaaatttttaaggttgtagagacccatgtgaacaactgttggaataaggattatagatgaattttgttcggttgaatggaggccctagtggaatatttagatcggtgtattgtgggtgctcttgccttgttttcaccttagatttttgtggatcatgactctttattttctggaggcttagcatatggattggtggaaagttcttggtgtacccacatgtgaattctattatctcagagtttcctttattttgcccaataattgctgattgggtcatgtttcagcttacaattggaaactgaagatcctacaaatatgaatggtgatactccttccaatggtctttattgttgttataatgaactcttgcag

SEQ ID NO: 12489 - DNA, 1768 bp, Vitis vinifera
  Intron number 7 from transcript GSVIVT01027643001 (locus G SVIVG01027643001) derived from phytozome v7.0 (chr-ID chr1 5; pos 14756897 to 14758664)
cccttcaacaaaatcagaagcttcgtcaggagttggtatgttcaaaagtgcttattgactgattatgatttttcattgtttgaacttgttcattttgctgctgtgtgtatttttttttgctctattgtatatttctgtgaattttagctataatttttagttccaaattccaatacatacacacccacacacacttatatatgttgttcatatgtatttgtttatgtgtcaccttcaaagtttcagcttcctatgtttgtcatcatttcctccacccaccaaaaaaaaaaaagaaagaaaaaaagtgtaaaagtaaatagtaagcaaaactttttattcctcataattgtcaatatcaacatatcaatcaaatcattcaattgacaattcctcaatatttattataagaacaaatttacttaattttcaacatatcatgtgtgcctttggcgagagtatatttttcatgtaggattaattacctctttattttccttttatgatcaaattttgaccttaaaagtacatttcaatgattaatacaataattctttaagaattttcttttctgtaaaatttgattttacttagaaactatgcaaaatagttaaaggtgtatgtattgttgtattgcatattgtattatatatcatatatgtattataagatacactgaagatatacactagtgatatgcatcgaattatataaaaaaatgtatttatcgttctcgtgtattttaagtttttaacaaccatgacctaaaggaattttaactgatcttgtcttagacaatggtcataaacttggttgcacttctttttggtttggtacctagtcaaaactgagccaatctgagacagttctcacttttgacttgttgagtatcagaagtgaatgatcccagcttatgtagctttgtggttggcttggatagttccagtcataacctcatttttttgcatggaaaattttgaatgtaggaggaaggaaagatttttcatatgtcctctgttagtgagtgttctgcaaacagcttgagccaaagctctaagatcaccatttgttttttcttgtttgtaaatcttgttagtgctttgtcgtttcacttttctttttcagatagagaagttcttttaattcaaggggggagggagaaagaatattctagtataagaatttttactactgatgttataaacataacacttccaatttgcatagcaatttaatagatttaatagaaattctgtaagattttatagaataagtaacattaaatgttaagaataagattttagctgttgtatatttgacattgaatccaacctacaaataagaagtaacattaaaatgaaggaaaaaacagatagagctgccttctgctgttcaagtaatgtcatgatctacttcccctggtggacaatataattaaagcttcaaattggctgctaacctgcacccttcattttctccagttgggatgaaagcattggaacaccatactggtagtctggcaatctgtctgatgccaaaatgaaaggaaattggttctaagtaaaaagttctattttactggtttccatacaagattgaagtagatgatgggcacaacatcacattaacatgcctgttgatcccctacatcctttctagtgaatatcgatggtgatttgtttgtttctgttcactttggatgtaacctgtcacaatgacatttttctgtcgaacaggagctggtgagaaaagaaatcagcaaaagtcgagc

SEQ ID NO: 12490 - DNA, 5891 bp, Vitis vinifera
  Intron number 6 from transcript GSVIVT01013387001 (locus G SVIVG01013387001) derived from phytozome v7.0 (chr-ID chr1 8; pos 794826 to 800716)
tactccgctaaataggagtgacgggagaactttttgtacgtcagatccaattgttggctacacagactacccctttcttgatcaaacaccctaaaaagttgggcaagttgccattgtacaagtacttcaattgaatttacagatattgtaattgcatgcactttgaaattgaatctagttgaataaaacagagttggaactcaatttcaacccaccaagacagcgatgtgaaataaatgatgcagtatacaggttaaatacgcaaaaatcaaagtcacaatcagggaatggtaatgaagcttttaatcaaggctatcaaagaagaattatattcccacaaaccaaacccttgatgatgaaggccaatgttttctttacattggtgacaatttaaaggcataatttttccagcaattatggacaccctatatatttcttttgtaactaaaggaaatcagagactaatttagcttgatcacaaaagacatgatactgcctttctcgcaaattgacattataaaaatatcatacagcttatttagatagattccacaaacatattgctggccataactacagaagtagagaactggaaggacagcattattttcaagatcattttatcatgcaaacttaaactaccaagcacccccaaccaaaaaacgaaggcgaaatgatagtaaacgcccaattggaaaaaaaaatcaaaatttcatcattcaatattagggcaacatcttcaactgttgctccagcaaacatcctctgaagaaaacgacagccattgtgatccttagccaaggaacaataatttgaatgcagaagcaattgggaagaactcctccgaccctggctgcttccacaaattcttcttgaatataattgacaatctacttcttcacccttctctcgcaggttatgcataagaatttcattgtgagaagtcttcttgtaaccacccttccaactgtcacactcattcttgatgacataattcagatttttaccccgtatcacagttaaaagcctcaacatcacctttctctggtgaccaaagagattgagaaacccgactgtttgggattgcactaagcaccctttgattgtagagaggatggccgcaacccaaagccaacttgggttgtatcaactgagaagaatcgagtggattcaaggcatccctgtctatattagaatatattcggcattgctgcgaccagacaacattatctttgaggtaagacttgctcatagatggactctgtaattgaattcccccattaaaacagccgcttcccagttcatttccaagctccattagataatccatatttcttttatagacactggggttagaacagaaagcattagactgattattaaagatattagaccccattaaattacccactctagattccttttgcaaatggagtcttgagttcatatcatgactattgaaactggcaggaactccatgaatggaggattgaaaccctccataatcagagtcaaaatcttcatatggaccatttgcaatatagtagggagtgctcccatttgagtcaaacccaaaccgatttgggtccattggaacatgttcattcctggaaaaaccatttcgttcatcaccaatatgcattctctggaaaaaataattaggggaacaccccgcttaccttttttctatttttaattttaatatatttttttgtcttaaataagaaaaaccatattttatatttcctaatttaaaaacaaaatttccaaaatgcccacttttattaaatatataataaaaaaatcataaaaagtgaaataaactttaccatctcatatttgattaaaaacacaagatatccctaaactagaaaaatgacttttattttttaaacatttgacttttatatttaacattggaatttgttttaaaaaaacactgaaatcaaggagataaaaagataattattataattttagaattttaattaaataaaaattaccttttatatcaaatctaaagaaaaatatgaaattttaatgatgtgtttggtaattattttcgaaaacaatttcaaaaaatattttttttaaactatatttttatttttttataaaataaaaatctgtttgaaaacttaaaatatttttaatctaacttaaatatttttaaaataatttttatatctatgattttattttaaattattttatatgtttatataattattacttaaaaaataaataaaaataataaagaatgttatttgaaaacatcttatttttattattaaagacataaaatataaaataattttttatttttgtacataatttttatgttttttttaaatagaaaattattttaaaaaaatagttctcacacaagtcctaaaattttttaaataattgaactttttaatatttgaaaagatgttctaaataaataataaagagaaataatataaaaggaaataaaaataaaaggagaaatataatattatatatatcaatatatatatatatatcaatatatatatatatatatatataaaagttaataatattttagattttgggatttgttcatttattttaatagtggcaaaagtgtcaatacaccagtcagaagcagtcaggtccaattcaaagcatccaatcataacattacaacccatcacaaatgtcatcagctctgagagatggatgcatgaactcatagcttgactcgaagaaaaatgggttaattttgggtcctttttagcgtggagaccggccgggctctagtttagttgaatttttgtaccaattttagatcaaatgtgccaaacgactcaaacccaaataaaaaataaataaataaaaagagagagagagagagagagaaataaggaaagaaagaaggtagaaaattacaaattattttaaaaaaatactattaaataaaaaaatccgttttaaatattttattgtaatgtattttaagaaataaaaaaaaaatttaaaatttgaaaactttcataggacatgatttttatgaaaattatctatatttgagttttaaaaattatcttatcatatagaattactaaaatcataaccgtattaaactttttgtcctaaattattaaggtgataccatataaactcttaatttgagttggtgatatatataataaaatttgagtcactaaatgataataaatacaagtaaataaagaaagaaataactattagctatagaataaaaatgtatttgacattatttatgtgtaaagtgtttttagtgaaaatttctttttgaaacgagaatcatatatcacataatttgtatttcataaaaattaaaaatgatttttcaatatcaaaagtgatttttaaaatttttaaaaatgttttctaaattgtgtcaaatatcttctttttttttttcagaaacattttttaaactaaaaacacgtcataaaatctttttcaaacgaagtctaaataagaatatattaatttattattaataatcattttgcatagtattacatcactaagttattttcatagatttttctattttttcatcttgtctctatcaatcttaaatttggtacatgtgacaccttcgtatgaggtgcatgtgacccctaatttgaaatccaatccaaaatggaaggtgggtttgaagttaattaatttttaatggaaaattttgggtttttcaaagaaaataaaataatttattaaagcaactttacaggtgagaaagtggaggagatactgagaaataaaccaaaatgaagggcccattagaacggaaaaaaaggggcacttaagactttaatctcaattagataagtgcttctcaactttagaagtgaactacaaatctttgaatgaagatcttctcttcaatacatttatgtagtcttgcatgtcactttcattcccttctaagtgccccaaaacttcttgttttctttcttggaggcttctttgaattcttttgcccagtgggtttattacttccatggcatgtttggatcactatttattttactcctcgtttactatcatcctcaaatcacttattaaaaaaaaattatttatggaaaacctaaaactcgtaatactaatatttatttatgtgatattgtaattcacaatgggaatctgtttgttagtaattataaaaagcgtgtataatccttttaattcttgaaaatttttattttttaaatattaaaaaaaaataaaaattattaccaaacacactaagtcttaaatttaaatttgccctaaaaatgatcaattatttataaattctcacattgaaaattggcccacttgtacataatataatttcaattttataaaaataaattcaattaatgaaattctcattgaaaaaatgtgaatagtgaaagagtgaaggagttattggattcttgttatgagaagggcatggttggtgtaccgtgtacctaacaaagagaacatcaagtccaagttatgctttgtttgcagcacactcaagccttcattgatattacataatgggcctaacctaccacacttataccaaatcttccaatgctctttttatcatttggtttttcgctttccttttttttttttaaccgacctaacatatttcacttaccatatgttaaaactttttaaaacatttcaattagatttaatattattttttagaaaaaaaaaattaaatcggtttaaaatctccctcaatgctaaaagcgagtggtatacaattctcaaaggtttctagtataatttttaaacatgggtcttacaatttcctttgcattttaaaattttatcaaatatcttttttattatttttattttctcttaattaaaataaaaaattatttaacaaatttttaaactaatagggaaacaaatataaccaaatcgtgtgagaaggtgaacggaactactaaaaaaattaaataaatattaaaacataattttttttatattataaatttttaaaaatcaaatgtaatttatattcatcgaagtttttttatatatcgctatttcttttcactcatattttttcttaatatttgttggatacaaaattagcttaagtattttcaaattgaactccaattaaacttcatatttgtttgtagtcttatggagtatagatttgaattttatttttattttttttaacgtccaaatttagcactcatttgacttttattttccagttggtaaaaataattacagattaacgtatcattgcatctaacacacatcattattacattgacagaattttcaaccgttaacacggcattgacagcaccccattagttgttactttattatgtttttttgaaatcacgagtaactcttttttagggcttcataaatatgggattacattcgaattcctttattcacttttcatcaaaaaaaatttcaaaatatactattattaaaatttggcacttggtgtacaaacgaatatggcaaaatttttatattataattttaaaaaatcaaatataattaaaattatttaaaaaaattacatactttttaattaaatattttcagaattgaatcctaattaaacttcatattaggcagccatacttattagcggtctcagggagtataaagtttattttattttttgaaaggaaaaaaagtccaaattcaacacatgatttgactttttgggtaaaaataattatctatgattgcaacattaaggcacatcattattacattgacaacattgaaccgttaacgcggcattcacagcactccgttaattattacttcattatggttttttgaaatcacaacaaatttctttagggcttcagttttttgatccccttggactgccatct

SEQ ID NO: 12491 - DNA, 4002 bp, Vitis vinifera
  Intron number 1 from transcript GSVIVT01012239001 (locus G SVIVG01012239001) derived from phytozome v7.0 (chr-ID chr1 ; pos 297321 to 301322)
gcaaggtcttcttctttttcctgctattcttctccttttcacctgttctaactatggatctttaatgggtttcgtacctttgatgtattgggttttatctctttgtggatgtgtaatttcttgtttgtttgtttttttttttgcactgatattatgggttttatttatttaatgcagatagatgtgttctattcttctcctatgcttagtttgctttatatgcttgcacctggtttcatttttttaatttatgaatcatttagagatttagatctattatgggcggttgaatagtttcactatcattgttttagattgtatgatttgggatactgttaatagatgaggctgtagcatttgatggattaatagccttgtgctaaaagtttttgcaaatttttaggtggttttgaatcttagttttgcccaattgacaatcccaaactattaactattttgaaggatctcacatttacaacatacgttttcttttctctaacatgaacaaattcctttttcttaccgttcgtgatttttgaactatttatataaatgaatgatttttagacccaaatttgctggcatgttgcttgttcatgtaggagtttctcatatacctgttttatgatgcctatgagttgtaaatcacttgaatatatagttgggatgtagatatgttatcaaaggtgtagtgtataaaatgcccttaatttataaaacaaaaaaaaaaaaaaggaaaattagttacaatgtttacggcttgaaattaacttattccagatatcatgttccttcatccaattgtttttgtacaaactccttcaatttaattgaaggatgcacccaatgtttttttttttttaattattgttattattatcacacaatatcggattcatatgtcaacactccaatcctctgctggtttatttgttcttttattgatccttataatgtattcagctggtaaaaccaaacaaatttttattgttatttgttttctgaaaactgttctctaattgcttaaccaaattgttttgtcttcttattttcaaaagcctattcttgaagactgtttgcgaagagcagaaccaaacatgactatagttattagacatatttttatgggggaaaaaaatttcatatatctacttcgaaatgaaaaaaaaggaaataaaagtacaacaaaacttaaccttaattaattattattaaaagaagggagtaaaaggtggtttccttggctcaaataatagttctagcctattacctctagcctttctattgcttgggttggtgtgaattctaaggttctcctttatggatatttgtgtaaggagagtgtcctacatgctatggatatttgtgtaatcttgaaaatagcttctgtaaatctacacaattgatacttgtactcaatttacataaggatgaatcctcagttttgttatataattagactagtttcttctggttcctttgaattccatcttggaaaaccttgttctagtttagattttcaatgtttatttgtaactgcctattggtattattatcagattttgtgctctaatgctacatgttacgaggtgaacagtgaaatcggtaaattatatttgggaaattgtgcaattgaaatccaatcatgatgcttttctttggaatagtttgcctaaatattaggttagtcaatctttgtaacctccattttttgtagtccaaatggttactgttatggaaacacgattggatggttagagggacatgtatgaatatttaaggataaaggaaggccagttgtttcgttatggggctcagtttactttactcttttccctttgggtgtcagtcacttcagagttttcagacaccaataccatggttaatatgatcattttaagtttgaggttcatccatcactccagtgggacgattggggaaatggaagctgtgtggaaaactcctatcctgggttaatgaaacttcacttttgatggttgttttttagccgatcctgaaccaaagtgtattggtggacttttccaggatggtggaggaaatgtggttctagatttctccatgaagtccctccaagtgggacagatggctgcataaaatttttgatctttagtggtgatctctcacttggtaaccaaaagcctgattggcttgctaagttaggtgcttctttgctggaggtgtttgttgcagagttacctccctgagctaagtgctgtgctttgattcatgttggatcttcatttgtttttaagtgttgttgatcgtccttgtctcctcgcatttcaactgcactttgtggttgtattctggtttcctggttttctttcttgaaggactgtttcatccaatgttttaaatggctaaaggcggtcttgaggtgtttttcccaacttaggcgaagcgtaagcctcgaggctaaacaaggcgtaagcctcaactttaataataagaaaagtaaaaaaatcttaaaaattagaaagatactaataaaatcacatgaaaattaaataataagaaaaccatacaatgtataataatcaaattaattttatgttattttcaatagcttctaatttagtttgtctttttaaactctcttgcatgcatttatcaaataatcttcaaaactatcatcattattactgttaggaacctctaatgaatcataattatatctaattgctctattatcctctccatcaatgtcaatgtcaatgtcgatcaatttttcttctttatccattaattatagtgatctttttcctttatccatcaataataagataatgattatatataatctcgatcactataatgaccaacaattcttttatttcttcttcccaatcttttcctttcatttccatttaaaggattaattggtagtcaactaaggccttactttttaaaaggttaaaccctaatcttggatgtaagacaaaacttataaatctacaccaaaaccttgaagaagcacaagtcactacaagcttaaacctcttaacaaatgtattcaaaaagcgaataaaggccctaaacccattaaaaccttttgaatatttgaggcttgagcctcaataacctcaagtctataaccttaaagctataagcctcaatcagatgaggcttaagcctcagttaccctctattgaggctatagccttgagactaatttacatagccttgccttaaggtgaggctcaaggagtaagcctcaatagccttttgaaacactgatttcatccttcatgcccttttcgatctttaatcaatgaaatttttgttgcatctgataaaaaatctaatgtaatctatcatgtggagtgtggttagtttttccttttgaggcaaattagtgaactaggcattatgccatatagttggttagttgttatttacaaattaatcatctgttataggtatgcacattagattcatataaaattgagttgtgtagtctgcccactgtgctgtgttatgcttggaaaagtggaatcagactgcatgcaacatgggagttagtttccaggaggaagggacttactttatcaaatagtaaaaagagctaaaacagaatatttcttaatgggtgaccatagatagaaggagcatgttcatgttggcataatggggaggaaagaagtgacaacgggagagaccagattggtgccagacttcaattcttgctcaatttctcttgtggtttgttattttgatgactgggactttactaggtgaaaagattatacttatagcttcagaatgtcaggatctttgtagataatatttcttttggtaagtaatagatgttgttatcttctttgaaatcccttggaacaaagaaagatgaaatgtttcaaatcttggttatagtacataagaatgtcttcatcatcataatcatcatctttgtgtgtttttttggtatttgacagtggctttttgttttctttttccttttttttcgctgagtccaggtat

SEQ ID NO: 12492 - DNA, 8648 bp, Vitis vinifera
  Intron number 4 from transcript GSVIVT01038466001 (locus G SVIVG01038466001) derived from phytozome v7.0 (chr-ID chr3 ; pos 9757718 to 9766365 reverse strand)
ggctggtgcctgattcgtccctagcagcggcattggcaatggcaccatttgattcgaggttcgatccccggcaacggcgccatttgattcgtgcccaattggtgtctcagctgattcgtgtccagctggtgctccttgattgagggagtgatcaacaaaatttataacctataacactatatactagggtagcaaagaaaaagctactatagtatagtggctctaggatcgttcactgggatgggttttcacttcacaaatgatatcaattcaaagatgaattggtgccttttcatttcaaggttagctttaaaagaaaacataaagatgtttggttttaaactaataaaaaatagtaactgattttacttacaaagaaaagatgtttcttggagttcagatcactaggctcagattcctcatacaaaaagggagttccggtcacttgtttattttcctcgcattagagaattaacatatagttccttctccaaccggtgctgtacagatgcttcccattaatgggttcaaacactaaatccctctcactgatgcaacttgcaatggttcatgcctctcacgagcacttaccattcaaggtgatctttaaccttggacttcccgtcaaaagctcgcaagagataactaatggatgtctccttggagtccaaaagcttaccaagtgttggctattctagaaaatcctaccttcaagtcacctcccaaaggctcgcaaggggtaaactagtgcatttccatggttggaaatcacttgccttaccaagtgttggcccaggtgatttaaaggcgttttaagttaactaaaaagataaaaaccattaacgggttacactttctcttcattaaaaactaaaacaacaaaacttccaaattatacatgtggaaacttacctggctttccttactccaagagacaaaaagcttagcctctcatcctctgaggaaaaatcctcagagtttggttggctagaaaatgaaaatgaaatgaaaaatgaaagagaaggaaaaacagagcaaggctctgtatattctatatatgatcaatattacggattacatatatggtcctcctccctcttttacagtggatgcaagggaatatatatagaggagtttttccaaccttcctagctaagaaatcttgtggttggtggcttacaaggagaagaatggaaattcatacaaaaatatctgaagaaaaatatccaaaagagtcggtgcaaaaatatcgggaagcttcaggcacatttcgcaggtaaaaatggtgtctgcgagatttcgcagacactcaagagggctgcgaaatattttcgcaacaacaagttaaactcgtagggctgcgaaattggcttccaccttgaggttctcagcgttccagcttgcggcatgtatcgggtagcttcaggaggaattccatagcactgtacaaaaaggctgcgaaattctcgcaacaaaaggctgatttcgcaacactttggagtgatctgcttgaaatggctgtaactccttcgtttcaactccgaatcgtgcaccgtttgaagcattggattcttgacttcctgagctttgaaatggtatatagaatgtagaaaatggacttcgggaagtgctccaaaagtgcgcaagaagactgcagctgcttgtcctctattttcttcactctgtttttcctttctcctttcttctctccttgcatactttgaacgactttggcaaagggatatggagctccaaagcttggttcttcatgaatttgagctcttcattgctttgccatgaactatatacaattctccctcattcttggattgttttggtgatcaaattactaacaaaaacaccaaaacttacacaatttgattagaaatgattgcaagggtccttaacatgttaattgggttaaaaggcaataactactactcaaaagtgtttaaaagagttaattataagctacaaaatagcactttttgagtagtaatcactccccccaaccgacatattgctagtcccttagcaatgaaggagagaaaaactaagtaactataataatatacataaaagggatcatgcaaatcactccaaaaaatgatatgagtggcatgatggacatccatggatcaataaagatgtgaaactcaacctataataagagttgtcaaagcattcacttgatcttagagtacaaagaatggatattatgcaagtttaagcatcaaaagaatttccactctcaaaagatccaaatcaaattcttccactaaaagctaagtgttaatgtgattagcttccgagtatagtatggataactatcatctccccccaacctaagtctttctttaagcttagcaaaattaaccatctcttgataggctaggaacgcacctcttattcacaattcttttcacttactaaacttaaccaattcacccatgtaacaagcagaggatcggtgactcccaaccaataaaggcttagggcaccaggctttaaaggctttcgccaccccttcggaccatgctcaggtttcaaggcaagtaaagaagtttattctttttttattttcttttttattttcttttattttctttttttttttctacaaagactcattggtctttatgaggtgtcccaacactattaaagagaggttaaaggtgtcaaattatgatttctcaagcttagagggtgagatagtttcacatcttataaccggaatctaatgtatgtgtgtgcgaatagcttaaggtggaagagataagtttgcatgcaatggagtttcaacaattcatcaacttttaaaagagcataatacaaactctaagactcttgtaatcaagttgaaactcgacttctctcatttaattttgagagttaatccttaatatccatggagtttaaagcaaaaattttaaaatttacacaaaaagcaactaaattaccaaaataacttagcattattaacaatacttacttcctcaactctccccccaaccgagctaaacattgtcctcaatgtgacaaaagcgattaaaaaatagggaggaagtggtacctcatgagtgacatggagtttgagtcgtataggagaaaccacatgtttcaaagaaaacataagagttagtgagtagaggaaatagaaaaatgccaagtttaaacaaatatgatgtctatgtatgatgtattatcagtaatacatccaatcccagaatataagacatcaaaatatggaatataataagtagagacaaaaagtaaagagatgatcaagtaatggtaaggtcctgttgagctgatgcatctgtggtggcctcttgagtgggttggatcaggactttggcctctgttctggtagtctccttagatggcatagtctcatcaactggagctctcagctggtagctatgggatttgatggtttaaggaggtaagaaatggaatgagaggcttagtgtgtgtgatcccagggtgtgcagggctctcctcttcagatgcatgattgtgaggctctattggcattttagcaacttcccttggctttgcaaagtgtttttgcaaaccttcctccatttcgcaagtcaattttgcaatttgatggccatttctaagcttggaggtgatttcgcagccatttcaaagtttggagatcatttcacaggcaatgggcaatttcgcagcccatttctgaagcttggagcattttcgcagcaggaggtggatttcgtagaggaggggaattctcgcagcccatttcgtaacttaaaagtgatttcgcaggtgtatcgcagcttcaaaaatgaggagaactgtgctgcaaaatggcactcgtgtgccaaaagtggtttcgcagctgcgaaatacccttccaaatggtgtctcggttgcgaaattctcgctcagctttgcgtgcttgtcttcaaataactataacttcttcatttcacctccaaatcacataccgtttgaagcgctggactcctgacttcccaagctttcaaacaagatatcgtatgcataatttgagctccaaaaagtgcttcaaaaacgtgtccaacagtagcaaaattgaggtgcggcatttccgctcatggtttgcacagtcatcttcaaacagccataacttttccgtttcaaatccaaatctagcaccgtttgaagctgtggactcgtgacttcccaagctttccaacgagatattgcatgcataatttgaacttcggaaagtgatcgagatgtgtccaacaattgccgaaatggggtgcggctgtgaaattgggatttttcatgttttgggatttcgcagccatttcgcagctgcgaaatgagagtcactgtgctgcgaaatggcactcgtgtgccaaaaccggcttcgcaattgcgaaataccctgcggaatgggacttttggtgcgaaatcaagctttaccacttcgcaatgcgtttcgcagctgccaaatggatgctactgtactgcgaagtggcactcgtgtgccaaattcactttcgcagctgcgaaataccctgccaaatggagctttgactgcgaaattgagaattttcacgctttggagcttcgcagccgtttcgcagctgcgaaatgagggtcactgtgctgcgaaatggcactcgtgtgccaaaagtgctttcgcagccgcgaaatcctctgcggaatgggacttttgttgcgaaatcagcctttttcacttcgcaatgcgtttcgcagctgcgaaacagatgctcctgtgctgcgaagtggcactcgtgtgccaaaagtggtttcgcagctgcgaaaattttcgcagagagggcaattgggttgcgaactggtttcgcaacaaaatttcgatttcgcagaggctgcgaaatctcgcagacccctgtttttcccctgtttctcccctgttttcggtccgtttgactctgattttgctccgattttgctccgattttttttcttcaatttctttgcaattcctcttgattttgatcatccaaaaacctatattacatcaaaataaattagaattaaagcattgaaatcaaaattaaagcattgaaatccaaattaaaacattgaaatcaaaattaaaacaagaaattaacaaaacaaaaagatatggactagctagtctttaaaaagactaagtccatcaaaaaatttgctcctgatttagcttgcccggatcccatatgaagtttgcatccttcaattgagacttggtttgtatgattttcccatacaaagcttggagaaaaggtggaggcatgtgtttcttcatcaattcttccttgatgactatcctcagtggttctctttgtacattaacatcatagtcatctttctctatgcttttcccctttttctttcctttgatttcctccctcttttctttctctgtttcactatctaccttatgctctagcttgcatgtgggtagatcaacctctttaccactcctcagagtgatcacttcttcaatttccttcttttgtgaaggttctccctcctcagcctccatttcatggatactcatggaattttgataaggttgagaaggagagttttctttctcttgcattgtgttgaggttggaaagccttgagattgaatcttggagaatatctaacttctgagatagatcattttgcatttcatccatccttttattcaaagtactctccattctatcaattctttgatccactctgtccattctttgatccactcgagcattggtggcttcttgctttcccacaaaatctcccacgaccttgcaaagattcaccatagcttgttcaaggattgaggcttgctgtggtgcttgagcaggttgctgatactgaggtggctgtggtttccaagagaaatttggatggtccctccaattggaattgtaggtgttgcaatcaccaaacatttccctcttggctggaatggtaggacactcatccaccaagtgctcaaatgatagacaaatggcacaaggcatagcttgcaatggtgtctgagaaatggcttgcactggttgcatctggttcatttctagctcatccaatctcctttccatagctgcaatctctgccttcatgtctatgccatcattcaaaatatacatctcacccttagctttaagttgagacgtcattcttcccttatctctagcatttggttcatcccatcctcttgaaactttagccacataactcatgaagttcatggcttcctctgctatctcgtattcaatatggcatgcacaactagcaatttgtgaattaaaaacagagaacacaaaagaaaacaaaagaaaaacaattcaaagaaagaagattaaggtaaactaaaaactaaataaaagatatactaaaacatgaacaataaagaaataaaaagagttagtaaaaggaaaagaaaagtcaccaaacttgtgatgaagatcacaagtactctagaaaggtgttatcactgtaaagtggcaccatccccggcaacggcgccatttgattcgtccctagcagcggcattggcaatggcaccatttgattcgaggttcgatccccggcaacggcgccatttgattcgtgcccaattggtgtctcagctgattcgtgtccagctggtgctccttgattgagggagtgatcaacaaaatttataacctataacactatatactagggtagcaaagaaaaagctactatagtatagtggctctaggatcgttcactgggatgggttttcacttcacaaatgatatcaattcaaagatgaattggtgccttttcatttcaaggttagctttaaaagaaaacataaagatgtttggttttaaactaataaaaaatagtaactgattttacttacaaagaaaagatgtttcttggagttcagatcactaggctcagattcctcatacaaaaagggagttccggtcacttgtttattttcctcgcattagagaattaacatatagttccttctccaaccggtgctgtacagatgcttcccattaatgggttcaaacactaaatccctctcactgatgcaacttgcaatggttcatgcctctcacgagcacttaccattcaaggtgatctttaaccttggacttcccgtcaaaagctcgcaagagataactaatggatgtctccttggagtccaaaagcttaccaagtgttggctattctagaaaatcctaccttcaagtcacctcccaaaggctcgcaaggggtaaactagtgcatttccatggttggaaatcacttgccttaccaagtgttggcccaggtgatttaaaggcgttttaagttaactaaaaagataaaaaccattaacgggttacactttctcttcattaaaaactaaaacaacaaaacttccaaattatacatgtggaaacttacctggctttccttactccaagagacaaaaagcttagcctctcatcctctgaggaaaaatcctcagagtttggttggctagaaaatgaaaatgaaatgaaaaatgaaagagaaggaaaaacagagcaaggctctgtatattctatatatgatcaatattacggattacatatatggtcctcctccctcttttacagtggatgcaagggaatatatatagaggagtttttccaaccttcctagctaagaaatcttgtggttggtggcttacaaggagaagaatggaaattcatacaaaaatatctgaagaaaaatatccaaaagagtcggtgcaaaaatatcgggaagcttcaggcacatttcgcaggtaaaaatggtgtctgcgagatttcgcagacactcaagagggctgcgaaatattttcgcaacaacaagttaaactcgtagggctgcgaaattggcttccaccttgaggttctcagcgttccagcttgcggcatgtatcgggtagcttcaggaggaattccatagcactgtacaaaaaggctgcgaaattctcgcaacaaaaggctgatttcgcaacactttggagtgatctgcttgaaatggctgtaactccttcgtttcaactccgaatcgtgcaccgtttgaagcattggattcttgacttcctgagctttgaaatggtatatagaatgtagaaaatggacttcgggaagtgctccaaaagtgcgcaagaagactgcagctgcttgtcctctattttcttcactctgtttttcctttctcctttcttctctccttgcatactttgaacgactttggcaaagggatatggagctccaaagcttggttcttcatgaatttgagctcttcattgctttgccatgaactatatacaattctccctcattcttggattgttttggtgatcaaattactaacaaaaacaccaaaacttacacaatttgattagaaatgattgcaagggtccttaacatgttaattgggttaaaaggcaataactactactcaaaagtgtttaaaagagttaattataagctacaaaatagcactttttgagtagtaatcagtgccataaaaaaggagagctcctattggtttacgagttgttgccaaatggaagcttgagcacctgtctttttgaagaaaaaaccttgttaacatgggctatgaggtatagaattgctctaggcttggcctcttcgcttc

SEQ ID NO: 12493 - DNA, 1661 bp, Vitis vinifera
  Intron number 5 from transcript GSVIVT01032900001 (locus G SVIVG01032900001) derived from phytozome v7.0 (chr-ID chr1 4; pos 23940624 to 23942284 reverse strand)
tttcaggtatttgagcctataaaatatatatatatatatgtatgtatgtatgtatgtgtatgtatgtatgcatatgtatgtatgtatgtatatataaaattgagggtcttaatttcaaagatctgaagatgagttctatgtaatttttcatgttggatgtgtatattctttctgttgatatgttttatgaatttgttctttgtatggtctctcagttttagtttcatcatctttcatctaactttaacctgggctgcctattcttttttctttaagctcaaggagtggcccttaatcattgtattgagagatcatacctatcaaaaaaaaaaaaaattgtagtgagatcatcatctgccatggagtgatagagtcactgaatcttctcaatgcagtccacacacacaaagattactgctcactttcccacaaatatagactccaaataaagctgaacataagcccatcaaacaaacatagcaccatgcaaacagaagtacacacccacactcccacttacacagattaccactcactttcccacaactattggctccaaatagagctgaacatataagcccatcaaacaaacatagtaccatgcaaacagaagggcatgtcaaaattaatctctaaatcactctttttgcagaatttacagtgttagcaccagagcataacagatataacaaactagtgataaaaaattcatttttatgaatactggtgttgtaggtcagaccacaggaaagacaactaagcacttcaaatggaacaagagtattatcacaacaaaacttattactcagacacttgactacaacccagcttacagtggtagaagagtagccaattttacagtgctggaaaaaaatacattccagcaccttcattcaaagctttctagtatccagttgaaacccaaataatgagggggggggggaagaattttgtggcataaacaattttagtaatttgtaaactaaggaaatgattatagttccagcatttttttccctttttcatagcttataagtggcagaaaacttctcaagtgaagccagttgatcttcaactgtgtcccagagaacacctttgaggagatgagaaattagcaaccgacctttaacttctgactgatggctgtatggtgctgatcttgactgtctttgttttgaacacagatacacttttatgattaacttaaaagaaaactttgatgaatcaaggagatctgagagagcaaaactctttaagggtgatttattcaatagatgaggaaatttgtaggatctttaagggattttttcagagaaaaataaaaggagaagaggacgaaggtaaagattgaaactataactgatttcctgagtcccagaaatgtcgcttgggtgttatggtgcttggataattaatagatcagtaataaatccagacatgttttgtgtctgctgttgtttgttccgggggtgccattgttactgcacatggtttttttaaccatagttcaagttatagtatctctttattcttgaagcaagcatcctgcaccacctgttattctctttattttttcttcagtcttgattataattttgggttgggtgcccagaaaattaattcctttttttttggttgtatttcagtgtgatctgctggat

SEQ ID NO: 12494 - DNA, 2338 bp, Vitis vinifera
  Intron number 6 from transcript GSVIVT01032577001 (locus G SVIVG01032577001) derived from phytozome v7.0 (chr-ID chr1 4; pos 28500616 to 28502953)
gcaaaaacactcattatagtataagttagttcataattaaccaattattaatttaaaattatattatgtagatttcatgaaacatcaagtaatttattcatgtcaccctttagaattcaagttcagaaaaacattaaaaatatttttcaaaattaatatttttatttgaaatataaacaaaagtaataaataaaagatgataagcacatctgcacatggggaagagaggagttcacatgtcaggagggtgattggagccaaaatatgtgctctgatggcacatattcgatatgatttgtgcaccaaaggacattcaaatcacccaacttgacataaatcaatgctaaggccttagccatgagtttaatctatactttggagatttatctcaagttcaagggaagaaaattgtgcaaattgaatgactttagattttgaaagatcaagaaatggctaaatgaggaaataagtgagtcaagactcaatgaacgtaaggaaaggaaaaacaaggatatcatgaggttggaggatgataaacgaccattatggagtaagaaagaaggcaagaaagcatgggaaatgagacatgaagcaagatttagctgcatggaaatttagaactcaaaaatctaatggcattatatactctgattttgaggataaatttggagcactttctggaatccattatatatatacactatatatcgtttcgaagctcgggaagtcaggagtccaactcttcaaacggtttgcaaatcggagctgaaatgaagaagttatgaccatttgaagacaactgcaccaagttggagggtcatttcgaaatgattttgaaattcaacttatgaattcgaaatccacttcgaaatgacaccaatttcgaattcacccactgccactttgatgttccgcctcctctacctcgggaattgcatctaaagcactccatccgccctaggtggaccccacacgactagaaatcacaattttattattttttaatcatttttaggaaattattttgtaagaagtggccaatgagagtgtgccacatgttaggtaattgaggatattatataaactctctcaattctaggttttaggcatcttggattttttttctggaaagtttgacattgaaagtggaagaagacgagaactttggtttgttttctttttcttctttattgaatatattgtttttagtttcttttgattcaaattatggatttttaccctattatggattgtgaatgtgacatcacccccatgagaggctgagagccaacttggggcttgaagcatgaaaacctaagggttaggaaacctataaggacaatgggtaaattattttaacaatgagattaattattggttgggtgacaatttatcattttttttatcctatccttgtgagttcgtttagggaatgatacggtaggttattacttgatactagtgattcttggtaattcttgatcattagttatcctcgtcttacctaccgttatttgcccctaaacaaagctataaggagtaggaagggttaaaaagtcaaatcttaaattgataatcaatctcattcatttgatggttttaggaatctgtttgaaaaatgaaaaattaggtttcagatgcaattttgagttatagaacccaacttgatcgcgagtggccaaggatcccaaaaccctaagatcatattacttaaaatacccttgttttctataatttctataccctaggttggattgtggaaaaccccaaacttgaatcaattgaatttaaaatcaatattcattttctcttattaatccaatttcttttacttagtttcacattattcacatattgtttttcacttaaggatttaaacaaaaacaattcatttattctagtattgacaattttcataagccagtccttgagaacgatacccggaatactacaaaagtcgtagtgactctttctctagtttttcttgaccagagttactacgtaaaaaggctaagtattttggtacaatagagaaatttcggtcagagggtagaagtagaaaatcgccattgcacccgccatcatcaaagccccacaaattctcctcctcaacgaggcaaccaacgcgttaaactccgagtggagacttgttgtggtgatgatagatgttcaaccgctcattatagtctgctactacaccagacgggtgcttctcaaaagcatgtccgctaaggctagcaagacctaagaagaaagcaacaagctcgcaaccgaagctgtatctaatctctgaaccatcacagtcttttcatcccaagcccaaatcctgaaaatattt

SEQ ID NO: 12495 - DNA, 7442 bp, Vitis vinifera
  Intron number 4 from transcript GSVIVT01007794001 (locus G SVIVG01007794001) derived from phytozome v7.0 (chr-ID chr1 7; pos 8962000 to 8969441)
gaccaaaagaaagtactgtctttacccttccacttctctagcatatagttttagtgtctttttttccttatctttgtttttattaaatactaaaagacaataaaattcattagattcatcttgttaagtacaatgaatgcagcgaaggatgaaattttttttcaagatttacaaagaaactgaaaaagagcatttatgtctatgccaaagcaaagtaaactaaatatcttatgaagaaaaccgaaataatgtacaagctaagagaattatgcatgtcaagcaggtacaaaatccctgagtcaccaaggatgccaagtgtctaggccctcacttggctaagtgatctgtttcttagtaacatgcagaatctgtagttttagggcagctttccatttgttttgatggatacaatctgtatttgagattgtacatttgcacatatgtgtctgttaatatatttgcttatccaagagttggtggaatggtgaggaatttgggatagatttatttgaggacatcgtttcactttggctgattgagttatattgattaagaaatttgaaattttcaaatttttacctagcataccaacaaaaaaagaaatgttatgaacttttttttttcatctttcttttggggggtggccttggttgatcttttgttttttatttttcttttctttaggctttggatgttagtccagaccaaattgagagctatggttttgaatcatatggacccaatagattgttggttttccaaatctttaggttacctttgtcaagttgagttggaaagagcacaaatagcttgttcttccttccccttccttttcctgtggttcatcatgaagagttttcagttaattttcccctcgtcttccattcattattgatagaaatattttttgtggacaagttattctagctaatcacttatttctcttagtcaaatttattaggtcacatttcctgaatgcttcaggaaatcaaacggtaggtataaattattcctttgcctttttatcaaaattttcccttcgattggagtgggtgcatttacttcttgtgcgatgttcatatccttcagtttctggttacatctcaatattttctgggccactagattcatgactatgattttctacaacttattacattaaatgttaaactgctagatttaaggagagccacattttggttagtttttatctgttgtcctgtggctgtgcagagattgtttggaccagctagtatcttctgggtcaaccctcacccctcaaattcatcacagacacaagaaactcagatgttattataaatgtgccagatttgaaattgttgggtggtttgtggttggtgtcagcacattttccaaatttcttttgatcagacatttaccacatatttggagctatggttcttgaatatcagggaaaacatattctatgagaagccaaatttttatatctgttgtgtttaatactcctacttgtggaataatgtaattaggaaagattataagtatataattttctaataaggagaggatcaagacaatcccataatgaaggggatttgatagaattaggtgaggaaaatttctattttttgtgttaggagtatttgtataaatatgtgggatgtacaaattgaaatggaggaagaaatttattttcatttaccttccgattcttcttattctacatggtatcaaagccttaggctcttaaatttggaaagaatttttttggccttcattgctaaattgaacatcatagttggccttcattgtcaacttgacggtttccttctcatttgagtcaaccttcattgttgaccttaaggtttccctctcgtctaagttatgccattgctgcaaacacaatctcggtactcgcactgcaaacccagatcatgaactcaacaaccggagacctcagtcgttgtcctcatgccgttgtcctcacgctaacacccttgttcacaaaatcaaaatcatgccctcgacttcgcactagtatagatcttccttcttgcaagcctcacgctccttgtgatcaaatttagtagcactcttactagccctatccacctcggctttgctcgtcttcttcggcatcattgatctctctcacaagttttctaaggctctgccaatgatgacaatcctccttgcactactggaaacaacaaaggatagcgtctgctatcattcaccgtcgaggagatcatgctgccagcccttgccatcagctttgtctttgccttgtgttgctgtcggcgttgccgttgtcgttgccctaggatctagttgttgccatcagctttgcctctaccccacgacaacacctctgattgccaatgagggctctaataggagtatttaaagtttggctattatactagttaagtgtttagattaggttatttaagccttatagtaaaataacaaaataataataactaaacaaaaaacaaaaaaaaaaaaaaaagaaggaaaaagagatatgttaaaggtattagaaaccactgctcaatttgaaaaaatgacaactggttgcaatggagggcaaccaaaggatattggacaagcacacttgtcttttgttcaaccaattgaagaaagatccttgaaacaaggcaaattcaaccaggaggagattgaaaaactaagaactttgttgagaactcttgagaaacctttgcggacctcatcaccgatactttcaggtaagtttcctatttccattggattaaaagctttagatgtggtttgaggccgcttcgggaatgagaattaacttggataagagtgaacttattccagtagggagggttgtggatattgatgatcttgccttggactttggatgtaaagtgggtagtctcccgtccacgtatttgggtcttcctttgggcgctccgtttaagtcaatggcaatgtgggatggagtggaagagcggttccgcaaaagattgactatgtggaagagacaatacttatccaagggaggaagagcaaccttgatccgaagtactttgtcaaaccttcccatttactatatgtctgttctaagtttaccaagttcagttagaagaagactagaacaaatccaaagggattttctttggggtggtggcagtttggagcgtaaaccacatttagtaagatggaaggtggtgtgcttaagcaagaagaaagggggtttagggatcaaatgcctttccaatctcaataaggcactcctttctaaatggaattggcgttttgcaaacgagagagaggctttgtggaatcaagtgattagagggaagtatggggaagatagagggggttggcgcacgcgggaagtgagggaggcgcatggcatggggctctggaaagggataaggatggactgggatttggtgggtgcgcggatatcttttagtgttggcaatgggaggagggtgagcttttggagggatagatggtgtggggatgcccctctgtgcgattcgtttccttccatttatgccttatcgattgaaaaggaagcttgggtggcggatgtttgggatcccttggtgcaagggggtagggggggttggaacccttgtttttcaagagctctaaacgattgggaggtggaggaggcggaattatttttggggtgtcttcacgggaagagagtcattggagatgtagatgataaggtagtttggactgaaacaaagagtggcattttctcggctaagtctctataccttgctctagaagcggactgccctagttgtttcccatctagctgcatttggaaggtgtgggtacaacccaaaatcaacttttttgcgtgggaggccgcatggggtaaggcgcttaccctagatcttgttcagagaagaggatggtcattggctaatagatgttacatgtgtatggaaaaggaggagaccatagatcatctgcttctccactactccaaaacaagggtcttatgggagttgcttttttctttgtttggggtgtcttgggtgatgccgtgttcagttagagagactttgcttagttggcagacttcttctgtgggcaagaaacacaggaaagtgtggaaggcggcgcccttgcatattttttggacggtttggaaggcgagaaatcgtttagccttcaaggatgatgatatattaatacagtggttgaaatattcctttttatgctcgctttggtctgaggcaaagctgtttatagtagaatgccctcaaactttggtgaattttatagattgggtgagatcattgtaaggttttgggccttttggttggtgggtctcttatatgtttttggtctcttttggtggcgggtgtataggtttgtataccttccataggctgtataccttgagtcgctcttttggcgtctctttataaatgaattttctttacttatcaaaaaaagccttagatgaaacctttgttaattcatgggttatagattcagatatcatagatcatatgactcattcgacacaccaatttcacaattataacccttgtccaagcattaggaaaataaccacaactgatggttcattaaccaccattgtaggtgtaggagatctccacattagttctacactcacatttagaaaagtgtttcatgttccaaagatatctactaatcttgtctctatacaaaaggttacaaaagatatgggttgtaatgtgattttttaccatgctcactatgtatttcaagactagaatttaaggaagataactagacttgctaaggaacggaatgggctatactaccttgagacaccaagcaaatcagaggtgttgtgagtgtagaactaatgtggatatctttatgcatattcacagtccaaaaaagggaaaattggacccaggagtagtcaaatatgtttttgtgggatattcgtaaactgaaaagggatataagtgttaccatccaccatccaaattttattttttttgtctcaactgatgttactttcaatgaaagtgagtattattttcccacttcttatatttaggaagagaattccatcgagaagacaaggatcaagacttctgttttagtgatgcctttctcatcgaccttactgaccttcctaaagcgtccgatccaatatctataccatcctttgaacccgagtcatccattgagcttgctcttgagaatcaaatgattggcaaagcgtactcaaggaagaaagctacagttcctcgacttatacgagtccagaaatctaaaccaacttttagaaatgaggtaacaatctttcatcctcccttacaaattaagttagaacttcagtctgaaaaacccatagactaaaacctccctattgccatcaggaagggaatgagagaatgtactaaacatcctttgtatccacgttcccatattgtatcattcaaaaggttgtctcctcccataagagttttcttacaagtttgaaaaatatttatattcttaccgctctgtctgagactttatttaatgaaaattggagacaagtcatgaatgtagaaatggaggccttggagaaaaattaaacttgggagttggtagatttgcgtgcaagaaaaagaccagtgagacataagtgggtctatactattaagtatagagcagatgagacattagagaggtgcaagacaagattggtggctaaaggatatagagattggtggttaaaggatatactcatacatatggcgtggattatctgaagacatttgccccaattgtcaagatgaacacagttatagttttgttatcattggcagcaaattataactggtatctacaatagttcaatgtcaaaaaggcatttctgaatggagatatggaaaaagagatttatatggaagtccttgttggatttggaagtgatctagccactaaaaagctgtgttaattgaagaaagctctatacaggctgaaatagttttcaaaggtctggtttgaaaggtttgctaaaataatgaaaaacatgggatagagacaaagtcaaggaaatcatatgttgttcatcaaacattcagattcaaggggagttatagctcttctagtatatgtggacaacatcattgtgacaagaaatgatgaaaaagagagatagactttgaggcaatgcttgactaaggagtttgagattaaagagttaggaaagttgagatgcttcttaggaattgaagttgcacattctaagtagggaatcttaatttctcgatagaattatgtaacggatcttctcaaggaaatagggaagttgacatgtaaaccaacaagtacaccaatagattctaatcataagcttagagaggctaaggaagatgttatagtagatagagagatgtatcaacatctagtagaaagactcatttatttttcttacacaagacctaatgtggtatatgctatgagtgtgattaactagttcacgcacaatccaaaagaggttcatctgcaagctgctaattaagtgctacagtaccataaggggtctccaagaaaaggcattctatttaaacaaaactcaggactagtacttaaagcatacacagatgcaggttatgttagatctgttgttgacaaaagatcaacaattgggtattgcacctttcttggtgggaatctagtaacatggaaaagtaagaaatagagtttggtggcgaggtctagtgcaaaaacagaattccatgcaatggctcaaggagtttgtgaactcctatggttaaagattactttggaagatttgaagattaaatgggatggcccaatgagactttactatgataataaacctgaaattagtattgcacatgatccagtgcaacatgatcaaacaaagcacatagagatagacaaacattttattaaggagaaactagatagtgagttgatttgtactccttatgtatctacgggttgccaacttgcaaatattcttaccaaaggtttaagtagtatagagtttcaagcaagtgtatccaaactgggaatggaaaacatctattcaccagcttgaggaggagtgtggaaaaatgtaagtaggaaagattatagctgtatattttttgtaattaaggcgaggattaggacaatcctgtaatcaaggggatttgatagaattggtagggaagtttctattattgtgttaggagtatttgtataaatatgtgggatgtacagattaaaatggaggaagaaatttattccatttaccttccaattcttcttattttacactactttatttatttttttatacttggcatttgatatatgactgagaaaaccttgtaggaaatttgaatttctatgacagcacttttcttttcagaaaggccacttggctgtttaaggttatattcttttgtatttgatatttaactgtgatctggctgtgatggctgcaggcctct

SEQ ID NO: 12496 - DNA, 2353 bp, Vitis vinifera
  Intron number 25 from transcript GSVIVT01013270001 (locus GSVIVG01013270001) derived from phytozome v7.0 (chr-ID chr 2; pos 5850192 to 5852544 reverse strand)
ttacagaagttgatccagagatacgcgtggagtaagcattttatttactgctaacctaaagccagtaaaaaataaataaatttgaataggtttctcaaggtatgcaaaattagcataattggctgcctagctgatgcctgggtgactccttttgtctgtctgggatctgactcctacttttgtgttttcactatttctcttttctcttatgatcgtaaagtagtttctagttgcaccaaacaactaaaggatgactggtacttactatttgaaacccataaaaaggttagatggtgttttgcctatgagacctagctcaattggcaaggagttgaaattgagaaaagggaggttctaggttcagttccatgtatagataaaaaaaaaaaagggtaaaagttattacctaccagaaaaaaaaaaatatatatatatagatggatagatggatagatagctagataataagaagctagatggtattttaagttattatgtgtgtatagacatgcctccgtatagtgggcaccaatctgagctaccatccctgccttagattattctttaaatatagttttcaatttggcaaaatatatgttggtattgatgttttacttttgtaacctctctctctctctctctctctctctctctctcgcatccaatatccttttaatgttttaaattttttttatgtttgaatttaaaaattatgtgtcttattttccactttaaaaaaaaaatccatgcaatttattattttcagtgaatgtagttgcttatgctcctttttctttgtggtttggtcttattatgctttgtatgtacttttcagttttttatcaccaataatggtgtcttcaatttggcacggtcgtgtcatcctctaaagcaactccttaactactctttatgcttgctatgccttcttatatgatggacttagtatccttcattgtcacctataaaaaataaacataaaaaagaaaacaaaagtcaacttagtgtaaaccaactttcaactcaaggacttaatttaagttgttgagtatattaagtcaaaattaacttaaactaataaattaaaaagaaatcaggacttagtatccttcattgtcacctctcaaaaataaacagtaaaagaaagcaacagtcaacttagcgtaaaccaactttcgactcaaggactcaatttaagttgagtatattaagtcaaaattaccttaaactaataaattaaaaagaaatcatttttgtgaatccgaagtcggttcacatcctcattgtccaaaactttgatttatcttcagctctgtctcaaagccatctactattgtgttccttatttatctcctataaactcgtcactaatcaatgaagataaatctgtcatatttattatctgataaaaaaatgtcaaaataaatagtttcaagaaacttttaacatccttaaagtaagaaccaaataagaagttttaggtcaccaaattcagcaaattcattttcagtcatcttaaagcattaagttttcagttctaccaagtgccacctaaatatgctttatagctgtttcaccaatgcttatgtttaatatactgatatttttgctctgtgataattgattcttgaaagaatgacgtaggctagagatcatctaatggaaaccattttacaaagcacctttatgctggtaaattaggagtttaacatctagtccagcaggaactcatgctcatgcaattgttcaatagaatatggtcgacttcgctagaatcaacagacaggaacagtgtcttcattgaaatttttactcaatagttttcgtacaaatataaatatttcatggttcatgtctcaatggaaacattctgcaattttaaaccagaatcatgctataatatgcattattggttgcatattaggttattgggaaaggaactctaattttttatatattgatatgtttgaggatttattattaccatttagtcatttatcacatttctatgtaacagtgtattatagggtgggagatgggtacagttaacagatgcaagcatgttaaaatagctttataacatgttaaaaatggtggtatatgttacatgtattaaatatggggaaataatactggtaatacaattcgacatcatttaatcagtaccttgatttgaatttgtaagcacaatgatggatgagaatctttccagaaatacccaaactgattaaaaggaaagtggactttaccaattgtctattgaaatattatatgtattagtggcatggaaattgcttgaagattggaatggaaatatgatgagcacttgtcttaaattttttcagcctaatag

SEQ ID NO: 12497 - DNA, 4574 bp, Vitis vinifera
  Intron number 2 from transcript GSVIVT01037889001 (locus G SVIVG01037889001) derived from phytozome v7.0 (chr-ID chr3 ; pos 6675553 to 6680126)
actgggtatgtttatcttcatttcatgcgtgcctgttatttatttcttgagactccatttggttttgaagaagatggaagacaaggaaaaatatactttgaaatcttacagctgtttattaatgaaatagtggttgtaggaaaccaggcttactctctctttgttatccctcaaagcctatattcatgatctccttccttttagtttgaaaaaattattgtcaatatgtattggttcaggaactaatatctagactcatttctgtggagaaaaggaattgatgctgacatcataaacttttatgttgcattatttattattgaatgttgaaatatcacatctctgtcatcaatggtgcattctttgcaaaggaaatggagagttgattgaccacctttttcttcattgtcctgttaccattggactctggcacaagttgttcaatctagtagggttggtttgggtccctccaaggagttttgaggacatgttggttattgcttttaaaggcttggggaactcattaagaggcaagacactttggaaaatcgcttgccttactttgatttggaaggtatggcaagagagaaacaataggatctgaggataaggggagaatggaagagatgttatgggatttgattcggttctattattctctatgggcttcttgtactgaagcttttagaggagttcctcttaagtgttttacaactcaattggattgcggtttgcgcttcaaaagtttgaagaatgttggattttctctttgtttttagatttcttttgttgagagttttctcttttgttcagtttgtgtagggaggacctctcatccttcccttggtttcttctctttcttttgtatcttttctttctcttgtatcttttcttctactaatatatttttcttcgtttctgataaaaaaaaattaaaaaaatcacatctttgtcctgcctttttgtgcaactagcagggaaatgaccaatgtagaagatacaaatggaagcatataatctatctactgaataaagtaacaataagcacactctagatggtgaatattgtttattgatccctttagtaaaaggaaaatgtaagggacattgtctatgcaggacttctcaagtaaaagaaatgcaaagacagaatagtaaggtgaatggtgaatattattaggctaatacctttcgtcatgtgtggccctatgcatgcatgtggagagataaatgagaagtatttgcaaattacaaataaatagatgaggacagtggcaattggagagagtcaaccttgagacctatacctacatgatcagcagcatgggtcctttgtgggtacagccagtaaaaatgcatgacaagtggcccttttatgtatattttggatagtgtggaaggaaaggaacttgttagcgtttgacaatgaggagttatcaattcaaagattgaaaaattcttttgtatgtaatctgtggtcttggtctagggtgtttgtagatatgagccctaattctcttgttagcttcattcattggttaggctcaaagtaagggcaagtgatgttttttgcttctttcccttttcctttggtttgagtctttaggcttttgttgtatgcttcctgaacacttggggggtgctgtttttggcgtctcctctttctatatatgcaatttttctttacctatcaaaataaaaataaaaaatgatcagcagcagttacgggtgacacataaatagatggggacagtagcaataaaagagatttgaacttgagacttctacaaattgcagctaaatagatggggacagtagtaataggagagactcgtacttgagacctctagggattatagataaatagatagggatagtagtaataggagagacttctacctacatgatcagcaatggttatggattacacataaatagatggggacaatagcaataggagagactggaacttgagacctttacttgcatttggaaagaaatcagtggtggttatgaattacagatggggcagtggccatttgtgagacttgaacttgaagcctagttaatggtagctttgatatcatattaagctactaatgttcccaaaagttgaggttgttaggatttagggccacaatgtatgcaaggataacaatgtcaatcatatattaaaacaaacagattttgttcaattaatacactaattagtttggagagtcttaaagacttaacctggattgctggaccttgctttcttataaattgggttgggtttgttggtttagttttaattaccaagctcataaagcttcaacatgaaccaatattattaatttttttgggtggattgggaggtttgggttgatgattgcctgctgttaagttcttttatggtgctttggagacaaggaatgcagtcccgtttccatggagcatcatttggagcccttgtgtgccttccaaagtgggcttttttgcttgggaagcttcatgggttaagatcttagccttggatcaattaaagaggagggtgtggatgctagccaatagatgtttcctttgctttgaagaagagagtctatagaccacatcctaattcattgctttaaggctaaggtattatgggagttaatttttgcactctttggtgtgacgtgggtccttcctttgttggttagagagaccctctttggttggtatggttcctttgtgggcaagaaacgtcaaaaggtgtggaagacagttcccttatgtctcttttggatgatttggaaggaaataaatagaattgcatttgaaaatgaggagtttttgattcaaaggatgaaaaattcttttgtttgtagttattggtcttgaactaagttgtttatagacgaaagacctttatctttaatcaacttttttgattggatgggtactagatgagggtggatgagtttttttgtatcctctcttctttttggtttatgctttgaggtgccttttgtatactccttgtatgctttgggttgaccaaggagagcttaatttggacttaaaaggatttttaattggcatggagcctagaatccttattttgggattctaaaatttatcatatgtcacacttgttgaccaattgataaccatgacatctactagtttgcggtattacatgtctcctcaaatgttttacccttgaaccaatcttgttatacttataaacttgtaagtttcctgagcaagaaaggttatttacataatttttccaatttttctgatgagagtttcttgagctggtggagggtatgtagtgaaggacaccatcctccattcatttatcaaatggctttcttgttcagctttttcctatcatccctcaagcgtgtgtctaattttgtatggtctcttctaacatcatattgttttttgccccatatcactcttgtagtacaaaccatcatccattttttatttccaaatcagccaactgcttctattgaagtgaaccatacatcttgcactagcctccatcatttagaaggaatcatcaaacatcaaaatcaagcctacactggaaccaagggctcttgtaccacttgtaaggaaaccaacattatcctatttaagtgaatatcaatgaaaaaactgaaccatgtggaagataaagctataataagacattgaataggtggtgaacccgtcaatataaagtcggaacaccataggatcaagcctggataaaacttcatctctccataataatgggatttgaaagaaaaaggttttctttggacttagccatgggtgaataaactgtaagtgaacatcactcttggatttgaccaaacacttgacaagattgtgaacaaaaagttctctaaatatgtgctgaaaaagcatcttctggacagactgctattgatgctgacctataacccctacaattacagcctaattttgtagagaatgatgaaattggtggtcaaaatgggctggttttccatttcttccttaatgtgactttggaccttacaagagtgctgaaaattatgaatgggcagagtttctaagatggtggtgtgatccttctttcatgagaacaaacccaattttgaaagagagtcaagtcatgcactaaaagatctccacctaaccaccaccctttcttctcatgcaaaccagactagctgtggagataaaacaaaaatagaaatgaaattggagtgttcctttcaagaaaatcttttgagtggatttctccaacctaagacaacccgttccttttgtttcttcattcaaacctgtttgtttcccaatcctccacactaggaaggaacagctaatatagtagcataaatgatacatttccctttttttttttcctttttttgataggtaaattttttgtccctattgggacttgaacttggtacctcccacaaaccccccaatcctttaccacttgagcaaggcctcaagaacaaatgatacattttcatttttgttctttaccaattgatgtctataaagatattttagaaatttataaatgatatgtcttcttcattgcaggtatacattgcgga

SEQ ID NO: 12498 - DNA, 3794 bp, Vitis vinifera
  Intron number 4 from transcript GSVIVT01010361001 (locus G SVIVG01010361001) derived from phytozome v7.0 (chr-ID chr1 ; pos 19810206 to 19813999 reverse strand)
ctcctccaagcctgacaagcgtctcattctcgtcggtatacactcgtatcatagcttttttttttttttttttgaaattttaatatctgttctttttgttccgaggaaatgatttttttttctcgtatctgagatttaggaaaattttgtgttgagataaatgaaggtatcggttacattcttattctttggaatctgttttggacgggatttatttggcggtttacttgagaaagacctctgtgtttttttgtgtataacgtccatggtttggctttgatgatttgtaagggtttcgtttctttgggctgtgtcttaggttcttgacctctgttttggttgattttgatgtttaaagcatgcagcactcaaattttgaggtggtttctttctttctgggtttctttatttttttattttttattttttatttttaattaaaaaaaaagtggagaaaaagggcttagcgaaagcaagtagctgcattggggttagttgagtgaagggttttgtgtcattgctttctaaatgatgagaacttttagattcagataattttaatttctgtctcttttcccacgagtggagccttaaattctgcttacggacactgggtttaaaatttttgggatctgatttttgtagctggatgtaataaatttctggttctaaagtattgaagtgcccaagttgtgggctatctctctatccatgcagtgatgggcctgatgactgaactgcgtgttcagtttacttgttggctttgatacagggttcaaaatttggcccgagttggatattttgttgactcatgaacaaacttggttgaattgaagataaatgagtaccctaggagtgaatcccatggaaactttgagacaactccaagatcatgttgagactaagctatttgggtaattggtaatggaaaaaaagtaatattggagtagaaatggtggagaagtcaaaacccacgaaaacgaaaaatatagagagtttagacccttgcatcttcatccctatttgcattttcatccttatgtatcttcataaagatattttgtctttggtctaaacactcttcaaaaatggatattgtgtagagaaatagggagttgtgggcttagaggagaaatgggtatcttggagagataggtgtttgaccgatggatgggggttatgggtatctaacagaattggggatttgggttttaaataatgggtattggtttttaagtagataataaatatttggtggatatttgttttttaaaaagtttgatgaaaattagaatgataaaaaatgaataatgaatattgggtttatatcaaataaataagaagtgaatatttatataaaaattaaaattaatgaatatatttgataagaaaagtgatatttattttttttaaagatgaatcatggttttatttttttaataattgaaaatatttaaaaaaaatcaatatatttaatttaaacattttttataaaaaataaatttaccttttattattttcatcttcaataagaaacatttactatcaagttattaaattaaaatatttttatggatttttaatattattataaatcatcccgaaatatgtttttattacaatttgaataattttaatataatggaagtttattttattaatttttttactatacttatttgtatttatttctataataattttcataattttttaaaattatttggagttctcaaattagaattttttgcgtatcacctgataccgatcgagataccgagagtgatgtgccttgggacctctcgagttagtgactgatactgcgactttgaaccatgctttgatatgaaatgttgttaatgtatttaatcaatgaaattcctaagataagtggagtacggcaagttattgctatgttagccagttgtgattgtaccgaaggtgggctgttgagtgtttctgccactttgagtcatttgcattaagagaggaactgccattcagaaacaacagtgttacatttttattgttgatgcagttacttcctagagccttctatgatactgttataaaccatgtgctgggcccaatttgtggtgttgtgcacacattatgatggtcatatcacatatggctacatctatatgctgccagatgagcggctccatgtcagccatgaacatgttacacttattgaccagcagctctttttcccaacccaattcaggagacaatgcaattttctattcattggcatctttttgtcatgcctgggctcctttaatctgctataaattgcaagaagtgctacacttgttaatgaatcattttatttaaagtgtacagccacaaggcatgactttttcatgtttgacctacatatatttgtaggtaattccatgttgcactaagctcattgttctaaaattctgctaaaaatccaaacatattgttgtatattcaaattggtttgtgaactgtctatttcatacttttgggctgtttagcactaagacattcccattggaccaccttgtagtctagttcaatgtagatgaattgaaatgcacaataaaaatggggtgttgaccattattatgctttggtttctgttcaaagtattgccataaaaaaacctagccctagatgtgaaatgcggtcactgaaatctcattttggggtagggtactaaattcttggggttttcatggaaaaagtcttaggccttgtctggtgtgctgtttggaaggtttaaaagaagttttcccataataaaagctctttcacaagatttttggttatgtccttaagaggtccttttagtttaagacattaggacttaaaaaatctttcagtggaagttacaataaagtagcttttggaacaagggtttaattaaaaaaaaaattacatatttatctatgaacttataaatttataaaatgacacccaacatccgcaaatatttttctaggaaactcttctctgtacaggtactttcaaaaaggggtttattagaatttacagctatgcctcccttgtctgaaatggttacagctactccaaatgaggctattgttgagaatgcacctaggaaacattttggaaatttttttgcagctgtaggttttaatttcaaacttggaagctcatgccctacaacttctaattcttccattgtatttcctattggtttcctatgtcttcttctagtctttctttttttttttttttttgccaaagtttttcattaagcttctttgtaggtttcctataatattttcaattttgtcatctctaggcagttgtggtctaaggctcaaggttaagcaccaataaactatataatttctcaaattgacatttgttaccttatgtgcaatttgagatttcttccagcttggctgtaatcttgtggcatggaagccctggaacctgcaaaatgggagagagtctctatgcccttgctccaataaatggaatgtacaaaatattgaatcttgcaatggccttcaagtgggtctaaatatgcatgaaatatgcactctaataaattcaaggcatcaaaatatgcccaatggattttggtcataggaagcctctctctctttccctctctctgaaaggattttttcttcttttttttttcccttctttttttggttacttctgcaattttagttaactgaacttcctataagtttgaggaggtggctgatttaaaatttgcttaattatgaggtatttgatgaatggcaggtccacctggatctgggaagggcacacagtcaccc

SEQ ID NO: 12499 - DNA, 3760 bp, Vitis vinifera
  Intron number 1 from transcript GSVIVT01023876001 (locus G SVIVG01023876001) derived from phytozome v7.0 (chr-ID chr3 ; pos 2801555 to 2805314 reverse strand)
ataaaacaaggaactttttgagaattcaaaacttggtaaactcaaatctatgaaattgaacattgtattaaacaaaataaaatatgtaaatattcaaataatcacaaaaggtgaatttcactcaatcattagtttatgatgatgaagatgatggtgacaatgattttgtggggtttctacaaaagcaaaagctattgggtttcatcaaggaagatggtgtggccattgctattcagagctttccagaacagggtctcatgggttagaggagaaacagtcgacgcgggagaagacaacaacagtttgggttttaaaataacaatgatcattttgctctctctaatagcaaaaaaaaaaaaaaaaaaaaaacacttttgcccttgatcatgcagagcgcacatgtcatttcattaaaaaaaataatgttgtctctaataaaatgcacattgcaggtaattataaatcatagagggtacattgctcgattttgaatttgagagaacaatgtgcaaaacatgttataggttaaggaagtaaagtgtaataaaacctaaacattttaaaaatcatacatatatcataatttctttgtaaactttgaatatatctaaactaaataaatttatataaaatatattttcaaattcaatatacaaatattacaaattatattatacatatattattaactaaaaataacaagaataagtatattatttgttattttatcatttttttccttaaaatttctttcattgatattatttgtcaaattttgttttgatatttctcaatacatcctagtatatcaataaaatctatctatcgatatatttgtgaagaccggtattttcatcattgcaatcaacccattaagattacctttctagtcattgagttagaaacccttctattttgtgatcaactgatatactttaacttcaataaacatgtgtcaaatactcctaaaggaattactacgaccataaatttcataatcacatgtccttgatttcactcgaagagacacactatttcaatcttacaagatatcatggtatctctattaataatacttgttgctaccaacctccatcaatagtgaccaaattcatagaaacgtatgactatattaaagtcttacgtattggttaaagtctcttgctaatttcaacacaaacccaatatcttctcaagattaaaagtccatgcaacataatagtgtagtgaatcatgacaacttgatagttttatgttatgattcactatagcttatgtccaatgtttaattatacatattagtgcattcactatgtgaaatccattttgatgaccaaaacaagtcatcctgcgaataaggaggtaatgcattatagtctctattaaattgctcaatataagtgtaaatgatgaatagaaaagtggaaactcatgtctaactttggtacaacatatctcgcttttaaggattttgtccgaacaatactttataataaaacctaaattatgtaaattttgaagacctcgactatattattttaaatgtgatggggtactttacattattttttaatgaaaaataacaatttctaacatttctcattgtattaatgttgtgcttgtgatctccaaccttttgtttatttagactgctttctatttttatttttttttaaatgaaaatagattgaaaacatgtttgtatagtattttttaagtttcatatttttataaaatttctttaaaatggaagaaagcgaaatcaacaatgtggtgttttcaaattttttttaagaaaaatgaaaattgttttccaaaaggttaaaaatggaaaatggaacaaaatcacataaaaggtattatgggaccataatataaaaggaatataaatattaaaaataaaataaatgttaatatgaataaaacattatctcatatatatttgaaatcaaatattatcttatatgtatgatataggtatattttcatcccatttttattttaataatttatttgtaaaaacaatagaggagaaaagcatatattgagttaatcaataaatagaatatatttacaaaataagtaaaaaatctaaaatgaaattaatttttaaatgcaattaatgttgatttaaatgataaaacgttagagaaaaagacgatggatttggtgaggtggacaatgtacgtggatgaggtaataaaataataattatcataaatgccccatattttttttacttctacaaactattatttggcttaataatgagagaagttttactattttattcatattaaatataattattgtttgagaaagtgacaagacaaaagttattttgcaagtggacaatggtgagaagaaacaataaagatcatatttgacttaggtgtatagacatataataatattataaatggaaatattaggaagaggaaattaatatttacccaattaaataataaaaaaattaaaaaaaagagaaaattaatattgacctaaaaatataaaaaaaattgtatcatatctattgacacatcaactcctatacgagttgataaatgacaaataatatttacctttttcgtttaaataggtagtatcgaaaaaaaatggtcaaacaatttctaatattacccttacaaaatccagtagttttgatcgctttgtgagtagtagcagaaagatggaaaatcaagaaagaaaaggctatcaatttctgctgcctatcaaaaaaaggaaatatcaacttgttacggacgtggaaatagataatcacatgtttgatgaagatgaaatttttgatctaaatcttcatttcgtcactgctattaacaaagggaaagagagcatcaccaccgacggagaagacaaagacaaaaatccttcgatcatcgcaataaataaaggtaaagataaagtagtagatgaaagctctccgatcgtcacaatgaacaaaggtaaagacacaacattagatgaaagttcgatcaccatcgctagagataagcacaaagccaatacatcatatctaagtcatccaatggttaaagtcgatgacatctccgtggtaatatttcttatttactattaaattcaatacaaaaatctaataaaaaataatttttagttgatttagcacttaattattcttattaacaatgtttttcatgtgttattttctaccagttttaatcatgaaggaaatattttagatgattaaaatgctttattggttgtttgatttcactttcaatttattttattttttcacttccaatattatttttaattaaaataaaaaatacacatcggaaatcttcgaattttcttacacatcaatggggagtggggttcaactgatcaacacaccagcaaaaacatcctcagagaaacgccgcaaacgcctacctccgactatgggcccgcacactgccacgtggacacccgaagacaagacaaaattactccacctccgtaacgggccccaccaaaaaggtccgctgacgtcagcaagggatgaaacgtgtcgtctctctacgcgcaactcgtgcgtgggagcgtcacgtgccgagcatgagataaaaaatagaaacaaaaaaataaataaaaataaaaaacagccctgtttagagagagagagaggagagagaagagaagagaggagagagaaggaggcggaaatgggtaaggtagtggaggagaagaagaagaagaagaaggggaggccgtctctgttggatcttcagaagcggag

SEQ ID NO: 12500 - DNA, 5218 bp, Vitis vinifera
  Intron number 2 from transcript GSVIVT01030894001 (locus G SVIVG01030894001) derived from phytozome v7.0 (chr-ID chr1 4; pos 18485357 to 18490574)
atttatcaattcacctggtggctctgttactgctggtatgtctaaagggcccatttattgagcttgatgatcattttttcttcttatgtataactctatatgttcatggttatcagagctaatattgaaaagtgttctacatgcgcacttcaaagcatgtgaagtacctctgagacatgacataacaagagtttggtgtagggtatgcattcaacattcctattggtcaaatatgtatttgataggtgtagtattcaactaaaaagagaagaataaactcttatttcattgtaacataagactcacattggacattctatcttaaccatacacttcaatttggaccaggggatactacataaagagaaagcaaattatttagtcatatcatgtatcctaaaatctggggattaaatgaatttgagacttagacacacacttgcacccgacccttgtacccaagtccaagtagaacatactagagttgttcagttgttgaatgaaatatgcttgtgaacagatggctttcagcttgttctccaatcaaataattgaagcttgaactacactcccaggattgtctgggagtgtagtgaaccctttgcaaaaagcagtatggaactccagaatgggattaataaatgctaggtaatataatagaaaacaataaacaatatattatcttgtacatgcatcgactaatgaacttgcagcagaccacaaacctgattttaaggatagtatccttcactcaccattattatgtcttcaatccacatgaattcaccaactttcttgacctaggagaacttagattcactaagttgtaatcatctgctgctgattaagatataaaaccactttcaatatcttacctatcaaaaaaaaaaaaataaaaatgaaaagagaaaagaaaaccactttcaatatcttcatgacgaattaatgtgctctatcttgtaggcttgcattttcattttgatcaagcatttcttagtctcatttactgctaagagtgcctcaaaaccgttttcttgcacaatttctgttgaagttctagcattccctattacagtagctcaaaagtctgcgctttccaagctgaataaaatgattatcaaaggcatagagagattagatttaagaatgaaggacttgttcctcaaatcattatttgcttggtatatggtgtggcaggaggatgcagagatttctttgttaaacttcattagagggtctagtctatgagatagtcttttctattttttatattcctttttcttttatgtttaccttcttttctgtcaagttacttcagttttccccccatttattggctcttttaataaccttctctcttgttgcctatggaaaaacagatatagaaagtaaaaccaaacatcagacataaccaaatttccactcaaaacttcaacaaacataatggggaagaaagtaaaaccaaggagaaagagaagaaaaaaatagaaaatcttaaagctttgttaggctgttgtagaaatcccactttgaaaagaagataatggaatctcaaaattagtatgaagatagagatagataaatcttggattctcactaaggcctttgaggagtgtcattaaggagataaccgagtctcactattaaataatgcaaggatgcaaagatcatgatgattaattgtgctcttgttttgtggcaattaacattatttgtaggctttagacaattctaaaaacttagcaagacaataaactagaagttttactaataaataacctattgggactttaattctttttctcaccttctctttgcggatgacacaatagtattttgtgaggcaaagaaggaagacatgacctacttgagctggatcttatgttggtttgaagccgtttcagggttaaggataaatctggctaaaagtgaaattattccagtaggggaggtggaagagattcttgagatggctgtggcgctgggatgcaaggtaggtcagctgccatcaacccacctggggctgcccttgggtgcgtccaataaggcctctttcgtgtgggatggggtggaagaaagagtgaggtggaaactggccctttggaaacggcaatatatctccaaaggcagaagaatcaccctcataaagagtactttggctagtatgcctttgtatcaattgtctctcttccgtatgcctaagatagtggtaagaaggctagaaaagttgcaaagagacttcttgtgggggggaggaagtatggaaagaaaagcccacctagtcaattgggagagggtgtgtgcaggtaagaagaagggggggcttggtttgaggaagctagtccccttgaacaaagctttgcttggaaaatgggtgtggagattcgctcgggccaagaacgagatgtggaagcaagtgcttatggcgaaatatgggcaagaggaatttgggtggaggactaagaaggcaaatggggcgtttggaaggaaattctgaaggaatctaattggtgctgggataatatgacttttaatgtaggaaaaggcaccagaattaggtgctggactgatccttggtgtggggatgtggagttgtccctaaggttccctcagctctttgccgtggctgcccaaaggaacgccacagtgggagatatgtgggaccagaattctagtcaaggaggctggaatctaaggtttattagagacttcaacgattgggagttggacgtggtaggcgaattactccaagtcttaaggagcaaagaatcaccttggaggaggactcggtctcttggaagggaggaaaaaatgggaagtttggtgttaagaaagcgtatagcttgctgatcagccctagtgtctccatgtttcctaaaaatgacatttgggtggagaatgttccaactaaattagcgttctttgtgtgggaagctgcttgggggaaggttcttacctttgataggcttcaaaagagagggtggtagcttcctaattgttgttatttatgtggtagcaaagaggaaaatgtaaatcatttgctcattcattgtacagtggccagagtgctgtgggagattgtccttggtttgtttggtgcccagtgggtttttccagaaactgtaaaggaggtggttcttagctggaagggcttatttgtgggtaaaaagaggaaaaaaatttggagatccattccgttatttattttttggatggtttggaaggagaggaatagattagcatttagggggggggagttagctattcagaaaattaagaattcttttgtttgtaatgtgtggggttgggcaaaattgtatagtggagcggagtcacgttcccttgtaggattcttggagtggttagcctccatttaagggctggtgggttttttgtctcttttgtcttttgttgagaggccttcgtcgccttgtatactccttttatttatttatttatttttttgataggaaacgacaaaggcatatattaatataagggaaagtacaagagaaggatgaggaatcctcccccccaagaaaacagaactacaatgaaacaagtacgagaaaatacaaagtagatacagacaactactatgagttaggccaacccaatggagttgcacgccgctaaccaatcaaggtgaatcacattaaggggaatccccttaaaaaccttagaacaagaaacccaaagagaagcaaggaaatgaatcatgtcccaaaggttctctgaattccttgatttatcctcaaaaatccttgcatttctttcccgccacaccatccataatatagcaatgcacgcagcttgccataatacaatccctctcttagaagatccaaaaccattaaaattgatagatatcatgtcaaagacgctcctaggaggaacccaatctatctttgttaactgaaataatctgtgccacaaccccatcgtcatagagcaatgaagaaaaagatgatctactgtttctccctgctccatgcacaacatgcaaatgtcgggactaagtgctttgtatactccttttatgctatgcggtgtttttgccttttgttaatatatgtgtttacttatccaaaaaaaaaaaaaacattcctaataatgaaattaaaagaaaatagaaagtcttcagaaaatagaactttttaaaaaatctcacataatcaactatttctagtatcaactgccaacaacctaattgtgcagaagtgccaaagcttcttccattttgaataaaccttaagggtctctcctcatctccctctttctcacatgtgcacactccatctcttcgaaccacttctatgcaatattatattcttaatcagaagatcttaaaaaaacacacacactcacacatgatctctactctgatataattggtatgctgtaggacagcctgtcgtcttaccactaggccatgcccttttggatttctcttcaacattaataatatttatcaaatgtttgtgaaatggattagattgttcctggtatttggacatgtgtgtatgtatgtttgtggtgtctcatgttcatctctctctatgtgtgtgcatccctctcagtaacaaatgcacagaatgagcaattttgttcaggtgacactgtcaccttttttaaattgtaattgggcattaatattatgtaatgctttgatcagaagtggctttgtaatagatatttttttagcctttttttttgtttgcaatctaaaattattcattgtagtcttttcccttatttaatttagtactcggttcttcctcctattctttctgaaatgtaagatgctttatactcataatttgcttaattttttatttgatttctaattctgttttcatttaaacaagattttctgctaatttctttgtagcatatttctagcagaacatcattttagtttcgtttcatgtgcttagagtctaatctactactcaccggtcccaaatttggagggagggtgggattgggtttgacagagagctgaaacattttgtggaccttgtgatgaagaatcctttaggtttgtgattgatatgcctttagatagagctgagttgcagaaaagtgtgcatttacacttatccaagtagctagggataaggttttgttgagtttagtacattcaaagaactttttggtttgtttttgatatcatttttcttcttgcacttactgctgcatgtaggattggggatat

SEQ ID NO: 12501 - DNA, 3650 bp, Vitis vinifera
  Intron number 1 from transcript GSVIVT01008864001 (locus G SVIVG01008864001) derived from phytozome v7.0 (chr-ID chr1 8; pos 2899196 to 2902845)
accaggttggtgtttaaccttccccacaacatttttcctcttgattcccctttttgccttgggcctttggtttgcttgtgtatgtctggttaggaatccattaaccggaaatagtctcaagcatcctttgttgtgcttgtttcattatgttagaatagttgcattcggctctttctgttgagctaacctcttaatggaggttgcatattctggcgaattcaaaagtttgacaatttcctctgtgaaaccctgcttttcatagaagttttctttttcctccttataaagagtttgaagattgaagttgcagagttgaattttgatgtcaattaagatacacggaagccattattctttggtgggtattagttgcccggctgtcctccatgttttccatttttccaaattccttcactgaacttgctctgttcaatcatgcatgagagagaataggaccactggattgtcccaagcgggtggacttttctggtttctgtggaaccactacaacttctcgtgggtccaagtccttgagcaattcaagttgctcctatctcttgcctaataggctaccactagagcacatcatccctataaaaatctggcatttgggtccttaatataaatgataaaatgccacaatgtgttcccaagaaatctcattttattgtgattaacttccacgttgaaatttgtctttgattgaagacattgagtgacaatattaacaattgcaaatgtgtcttattatggatgttttatatgatgtccaagacttgtcaatcccaaagacctctctgtttaaaatcccaagcatcaatttctttcccaatggaatgttaaaagatgctttggccaataagtttaaaggggtaaagaataaaaatcatctaactaggtttccagcttgcattttatgtcacaagtgtaggtaggttctggcatatctagggtctctctgtagcagagtgcattgcatttgcaccttgttagagcagctcaaatctcatggctagacatggcttgttataggccctagttacaagggtcctgttaaataatttcaacattactttgatttttgacttatggatacctggcccaatgtactgagctttaaagacaaataatcttcttgtttcacttgggaacaaaaagtcctaggtttgagtctcaggcttatccaaaacataggtcttgggagagggttcatgtatatgtggttttctgggttggggcagggctaatggagtttctgcattataaaagaaattattcttgcttctagaacttaattttttgagattgagaactttgcttttgagatgaccataactggtttccatttttgtgtagtccacatttgatctcagatttgatcctttcgatattataaaatcaaattcttgttgtttcttgaacttaatttcttgatattgggatcttttgcttttgacacaagcataacttgtttcaaattaggatcattttttgtgtaagtccacatttgatcctttctaagcaacattggtaatgtcttctgagctactactttcagttcattgaggatttatctccccttgaaattcactcaatattttgagtagttgatcctaaggcagtgagctctgctggaacatgaaactggaaatgataagcagctactcctatcagccatttaatgatgtacttgtgttggttctgacaatgaagtagtatccatatgataggcctgtggctatcaaagagaaaatggatttaagtgtatcttttgttgaaactccttaatacagtgctgtggcaagtaaaaagagaatatgagcaaacatataaagaaaattgcttgaacagtttctcttagctgaaatgcctatggatactacacattccctcttgagataccgacttcaaagtctctttcaacttctttgtctgaatcagctgttttcagtcttgcctgaattgcctgcttctttacattagcagtaccaaggttttaaaatgcaaccttttggatgaatagcaccttagaagggctccaagttttatcttccatttatcctagcaccacacacaaggacaaagaaagaaaaactagaagtaaatgagtacatacagtcattgcaagcttgatggatctgtggaaaatttacaatgctaggcctcctgtcaaagggtttacccaatgtagatgtccggcttttactagtgagggaccttcaaacaggagttgggagcaatatgaattccaattgagtgatttgagaactgttttaaaaattgttgctaaagaggtccttattctctctctgttggcagttcttagaagcagtcagtaagatgtgattatgtgaatcacttttttacaataggatgaggcaaatatgatcatttctcctgattctggtgttgctggcaatggggaaaagttttatagactcggaagacattttacattggttgaagcagtttcctacagtgtgatctgaagttatgattaactagcaagtttcctggaaagaactaaagtttttctggataactcttagcatttggggaggtgggaggaagttctggagtcacatgtaaggatgtacttgcaattttcaagcttgcatgcatggtttcttggtagcttcactggtttccaactagaaggaacttttggagcattcatagaggaatttaattgtaatcatagttggattcacttgatgtatcactgccttttccccttctggatttagtgatgaatttcaagtagtgaaatttcctgtttagttattaaattagaaattaccaaaatatttaagtgaatggtagaataattggaggattctgcttgtggaagaatgctatggcaatgttaggattccatgcttgcctacagttcccttatttgcatttctgttggagatccaagatactcctctcaggttacttgagagttaacagtatgagcatactatcatggagaatcatagcctttgactaagcaatttccatttcttcactatcatgtaagctgaatctatttgatgagttgatctctttcctcaaaattttaagatctctggaaacatctatctctctccctgatgcatatatatctgtattaattaaatggaaagagaacgttcttttgtgtatgtgtttgtctttcaaatgcatcattgtgatatttatggtttacaaaaacttcaacttcaaagctgcactcataaaaaacaactcattatactgcaagttacatatgaaacaaaatctgtgtgaaaataaacttcaatgcagtatccaaaaaccaccattactttactttctaactgaattttcatgtgtactaacaggcatatgctagatgcattgcacatcttgatacaatgggtcttcctttgtacatacaaagacatccttggcaatgtcaagactaaaaaaacaaaatttggaaactgtaaatgattcatagaattcctcagttccagcattgattgggaaccttgttccaaatttatgtcttatttcacttcaatgcttcttctagctactccccatcaatctgatggtcaatgttctcattttatggattcaaattcttattgggttgtgtaatgttggctctgattaaccctttatctaattactggagtagg

SEQ ID NO: 12502 - DNA, 894 bp, Vitis vinifera
  Intron number 2 from transcript GSVIVT01024998001 (locus G SVIVG01024998001) derived from phytozome v7.0 (chr-ID chr6 ; pos 5398799 to 5399692 reverse strand)
agtgtcaccattattggacctcccgatactctgtagtacgtgttccaatctctttttttgctttgaatgttgtgtactttgttatgttttaggttttactctgggaaggattggatcaaggttgagattgtgccttttagttttgattttctttctaaagttttggttaaattggattcttggtaatttctaaaaattgcagccttttcttgatcgaatttggtcattttagggttttaccataactacttatttcaaaatacagaggatcttcatgtaggtcctttttcggttgcaaatgggttggggtcaaaataaatgttgtgagattctaggaatacatagttctgtttggtaattggaaccttggaattggatgccccaattcaaattccagtggtttcttgcttcttataccagtggatttggaatcaaattcaactcccttacaccacccctattcccaagaagcactcttgcaacaaaagcatgatattgaattccagaatcggaacttcatctcacttcaattctgtgtatgtgtagctgaacaaaatttaagctctagttcgtgattttaaggttcttgagacattgtccagtgggtgggttatcactggttcttgaaaatccatgattctcatcaatgcttgtttgatggttagataatatattttcgttgtatcaacttgatctaatcttaatatgtactttctataaggtattgttagtgtgaatgtggttttgtagatatgtgtttattgtttagtatctttctctctcaatttagatacacaattaggctaatgacactattttttgttttcaattaaggcataaagcatggattgtttcccaattgtgttgattattcactgaaatatgactgcagtg

SEQ ID NO: 12503 - DNA, 13194 bp, Vitis vinifera
  Intron number 2 from transcript GSVIVT01029063001 (locus G SVIVG01029063001) derived from phytozome v7.0 (chr-ID chr5 ; pos 11703652 to 11716845 reverse strand)
gacttggatgtatttgtttatatctctgtcagtcatttgtgtttattgtgttttccccttgattcttatctctccatggaatcaacacacacagcctccccttaaaccaccccccccactactcttctcttccttatataattggttatatgattccctgttattaattatcatactgctgctagaataagtaattgtggttcttcctaatctctgtccaaatcacaactgatatggttttccctcctacagaattacacaattggcttaggggaaaagggaaatcctattgccagggctgctttgtctatttccactttttaaaagtagcttatttgacatgttcaaaagatggtggaagcaactctagtagtagtgcttttgttataaaaggttcatgcgtattggttataacaaaagttcaataaaatgtttaccatgactctcctaccatgagtcactagatggtggtttagcttaatttgttcaatgtttgaaatcttctctattgtgtgatttttatcatacatacattgttttcttccataaaacaacttcaatgtgtatactatagacatttttaaaccctaccctttgagtgtaattcaacttagttggctctcaatttgtacacattagggttgggttataggggctgctgttgtcatacttgtgtaggccttttgtccttattgtatagccttccttgttttgtggaggtttacttagttacttttgatcaggtttgtactttatgaggaggatctctcatccttcgtatgtttttttcttttaatatatttgtttgtttctgataaaaaaataaaataaatatgtatactatagttgaatgtcataaattatatcaaaacaagtttaatatctatgaatgtatgtatgtatatatctattattgtttgttttatcatttcttgaagtctttcctattatttttatgactttttgatcaattttcatcccactaatatttttttgtttgatattttccaatatttgcataaaatccaaccttcaatttttccatgatttatgatattttaattgttggttccaactagtctcttgagtttgcctttaatgagcatcccttggtatcctcctcctttggtgggggggctaaacacatcacaatcgaagaatccctttttaccaatatgtttctagagtagagcttatttctggcctcaaaaccacactatgatttcagctcagtgcaccaaccttggctagctggcttagaaaatgcatcaactaaaaaaaaaaagaaaaaaagaaaatgaatgaactagctccatcttaccagtgttgtcaaaggcgattgcctggtttgctaggccaccaggcgaagcgagaaaaataaaaaacgcctcttgaagacccaagcgaggcgacttgaaagaggcgacgcctaggcagtcaccttaggataaagtttaatgtgtaatagcgattgtcttttttcataaggctgaaaacttggaaaaaaaataaaataaaatattaaaaataaagtttggaaagtttaaatatggagaagctgaaaggttgataacaaagccttaataaaagggaaaaaaaaggaataacaagatttagggcttgagaaaaagacaaagtggagggaagaagaaaagaaagtcttttgttaccttttagcaagaagaagacaaggtggaaggaagaagatttcatcagcttcatcgttcacttcggcaaagttttctcctctttctcttctctataactcttcttatggcttttgtcttctgttcttcacgatttgaagttttgaaccatgaagccaacctttttttaaagaaaaaaagcatgttatgactggctgactgctgcaccttttaattgacccgtttttattttattttattctttgcaaagaaaaatattatctttgcttttgttttgaagaaagaagactgccctcttttacacacttcatagctattgaccgttgtttttttattttattctctgcaaagcaaaaatttgtctttgcttgtgatgtgaagactcacatggaccctttttgtttatgttttttgctctgtgttgtcacactatactgcacactacaaagctgcctgtaacagtgtcactacacagagagttgaccattttctgctgccactaggcccactacacattgtagagacccatactctaccttcctgagacatatttttttttatgcttgtaacatttccactacacagtacacacactgcaaagatttcgacaattttctgttgccattgcacatttgtagagagccataatccatcctgagactcatcatttcaatgggtcccaccactttcatcacttataagttcttatcattgaaaatatatcattcaacagaccatacttcttgcatgagaattttattatttgttcatcatttcaatgggtcccaccactttcatcacttataagttcttatcattgaaaatatatcattcaacagaccatacttcttgcatgagaattttattatttgttataaaaaataaaagtgttttgtattttataacttttttacattgttgtcttattttccttatattttaaattttaaatttttaattctttttttttttaaaactaaatttagattttggaaatgacatcagaagatgacacatcatcaaaaggatcgaacaaaaaagatccggcttggaaatataattttttgaaagatcttaaagatacaaattcagtaacatgtttattttgtgggaaggagacaaaaggtggaatttttagagcaaagcaacataaaataggaaaaaaaggaaactgcaaggtgtttaaaatgtccagaggaagtaagagaagagcttgagtagtatatgaccaataaaaagaataaaaaagacaactatagttcttttcctgaatttggtggcttagaaaacattgttgatattgatgaagaggaggaacttgaagaagtcaatttgcatgaaaaaaaagtgattgataatagaagaagtggcatagcaagtaacaagaagatgatgtcaacaacaaaaggtcccattgatgcttttgtgtctcaaaagccagaaaaagtaattcaacttcggaaagagggaaagatgaaacaatttgatcaaaagaaaagagaaattgtatgtcaatacattggtcgattcttttatcaagtaggaatatcatttaattgtgcaaatttatatagttttaaatggatggttgaagctattggacaatatggtccaaatatgaaacctccaagttatcatgaattaagagttccaatcctttaggaagaagtggagtacacaaaaaatttattgaaagatcataatgttgcatggatgaagtatggagtttctattatgtctgatgggtggatagatagaagaaattgaacctggatgaattttttggtaaattacccaattggaacaatgtttattttttgattggaaacgacacagatttattgatagataaaaataagtacaaaaagaaggatgaggaatcctcccgccaaagaaagctaaactacagtaaattacactgaaaaacaagcgaacactctaaaaagaccactccttatggggtacacacggctatccaatcaagttgtatcacgttaaggggagtccccttaaaaaccttggaacaaaaagcccaaagagaagcaaggaaaacaatagagtcccaaagatactctgaattctttgctttatcctaaaaaatcctcgcatttctttcccaccacacaatccgaataagagcgatgcttgcagcttgccacaaggcaattcccctcttaaaagaaccaaatccattaaatttgatggacatcatgtcaaggatgctccttggggtgggggggggggggggggacccaatccatcttagctaactgaaataacctgtgccacaacccaatcgtcaaggagcaatgaagaaaaatatgatctactgattccccatgcttcatgcacataatgcaaatatcaggactaaggactttgtagggtcttctcgcttgtagcatgtcattagtattcaccttcttgtgtgccactaaccagacgaaggacttcactttgaaaggtacttgagaattccaaacgaacttagaagggaaaacttgaggagatccagaaaattgagataaagctagaaagaaagatttaactgaaaaaagccctgaagaagataagggccaaaatctggcatctggaattgaaggagataaatgcaatccatcgagagaccgcatgaggccttctaagtcctctatcttagaatctgacaggttacgacgaaaatttaaattccaagagaaaggacgagtaggactgagaactgaagaaataggtatgtttttatccaagactactctaattagtcttggatattgggttcccaaaggttggtccccccaccacaaattttcccagaaccgaattctttccccatttcctaccacaaaccgagtaaatgaggaaaactcctgaaagacttgtgtaatagccttccaaggacagcgatgtgactttctaattaaagtgttagcatcccaaccattggagtgtgaaccataaatgcttagtatgacctgatgccatagagttgaaccctctctagggtacctctacaaccatttccctaaaagagcgagattcctcagagaaatattcccaaaacccaaaccccttatttccttcggtttacacacaacatcccacttgactaaatgatttcttttgccttccccaatccttgaccataaaaaatccctttgcaacctctcgatttttgcagcgattgaagcgggtaacttaaataaagaaagaaagtaacagtgcatatgggtaaggcaagattggatgagagttattctctctccgaaggataggtatgccttttgccatccatctaatcttcttgaaattctctcaatcactggatcccaaaatccacctgccctggggtttccacccaaaggaagacccagatagagtataggctagctagaagccttgcattcaagcgtctcagccaatcttgaaagatgagcttgatccaaattgataccataaatattactcttgtcaagattgaccttaagcccagaaatatgcccaaatgctaacaaaagactcttgagagtctgcaagtcttcctccctagtgttagaaaagaagatggtatcatcgacaaattgcaaatgagataccctagttggaacaatgtttatggagtccattgatcctagttcattcatgaaaactggggagaagacatttgaattattggacaagtttgtggagcgcattggggagaagaatgttgttcaagtaataactgacaatggatctaactatgtattggtaggtaagattttatttgatgaagtttaggatttatttgtgccatttgaattgaaacatgttattatgaatttaagatattattaatcatttttatttattatggtttttatgattttaactttatataggaaagttccttgaggcaaaatgaccacatttgtattggacaccttgtgcagctcattgcatagacctcattttagaagatattgagaaacttcctacaattaagaggactttgactagagccatcacattgaatgggttcatctacaatcatgtgggggtgctaaatatgatgagcgagttcactaaccaaagagaattggttaggtcaggcataactcgatttgcaacatgttttcttaccctacaaagtatccatatgcaaaagcgtaatttgagattgatgttcacttctgacaagtggttagctagtaaatgggcaaaggaagcaaagggaaaacaagtctccgaaatagttttgatgtcttcattttggaatcatgttgtctatattcttaaggtgatgggtcctcttgttaaagttcttcgacttgttgacaatgaaagaaaaccagctatggggtacatatataaagctatggatagatgtaaagagactatcaaaaagtcatttaatgagaatgaggataagtacaaggagatcttctcaatcattgataagagatgggaatgtcaactccatcatcgtcccttgcatgcagtaggtcttaaacccagaatttttctatgacaacccttgtgtggagtttgatgaagaagtgacatcaggattatattcttgtatagatagattagtttccgacattgatgtgcaagataagatcattcgtgagttgtcgacttataagaatgcagagggtctcttcggtattcgaatagccattagatcaaggaagatgttagctccaggtataaactataaagtactttaagaaagtttatatttctaaataagatattaaattacttattttgttagctattagataaaaaattacttgttagtctactaattttttgtttacatttgaaacattatagctgaatggtggaaactatatggcaacacaaccccaaatttacaacaactagccataaagattcttagcttgacttgtagtgcatcaagttgtgaacgtaattggagtgtgtttgagcacgtaagtatttaatactttgttgattatataatatgtaaatttataacattagaaattttatcagttaagtaacttaagttgttataactaatatagcttgtgtaacatttactaataaatgtttacagattcataccaagaagaggaacaaactagagcaaaaacagctaaatgacttggtgtttgttaaatacaaccaagctcttaaaggacgatatgatagatgcaatgtcattgaccccatctcattagtagatattgatgaaagtaatgagtggttgattggaaaaataagtgaagaagacaccaccattcatgcggaggatgacttggtttttgaggatgatagcttgacatggggtgtagtggcaagtgcattaggtgttggagatgcaaatatttccactagacttcgaccaagatcaaagacaagtttaaagggggatttagtggctgctacttcacaacgtgattttgaagagaaagagagcaatttagaggacattgaagaggatgataatgagatggagggataccaatctagtcttgatgaaagtgatgacaattttaattttaatgatgactacaacggtgatgcttaaagcttctttaggacgttcattatcttgttttgtttcttattttaatttttggatgtttggaacattagaatatgcatatggatatgatgaatttatctaaatatatgacttttcttatgatttggggtattatatttaacactttgaatgattattactattttcctaattttataagccattagaggggatgaaaatttagtagtattgaatattgaagaatatttattttggttgagtatagaataggtaaaatggtaaatatatatactattttattgccttattatagttaggcgatcaccttaattttcacctttcgccttaggctaaaaggagtcctatcgccttggcatcaccttttgcctttgacaacactgatcttgatctctaaaagaacatcaatgcccaaattcctaggttgtagtggaagcacccatgaacatatgtgatatacctagactcctcaacttcacccaatgtactgtgttgacacaatgtgacaagggtgtggggatccttgatgaataaacttattttgctttagatattcactattttgatttttcattttccttttccaaaaatgagaaaaagagagtgatttttttttttttgaatatatcaatgtttttttttttttttttttttccctttattatgttatttgcaagtacctttcagctaagttcccatatttgagacgtgaaggatcagatgtctatacatacctgacacctaccatttgacatctgacacctataactaaacctgtgtagcatagtgatgcgggacaaggaagtgaaatacaaggggagggtagatgtttggtatcactgaaagaactctagaattactcctagagacctttaggcttcacacctaggtgctttttttaccacacaaaaatagtggatgttggaaattttatcattcattcattgatttctttcaaattaaaacttctctagagacttataactccttgtaactattcacatagttgtaatgtagcttgacaatagcctaaacctggattgactactggaccaaattaaaagacttttggaaaatgatgactttttttttttataggaaacgacaatggaatatattaaagaaaaaagaagtacaagagaaggatgaggaatcctcccaccaaagaaaactaaactacaagaatatgaaaacaaataaatacaatgtaataacaaacaaatactctagactagaccaacccaaaggaattacacgccgcttgccaatcaagttgtaacacaataaggggagtccccttaaagaccttggaacaaaaagcccaaagagaagcaaggaaatgaatagaatcccaaagattctctgaattccttgctttagcctcaaagatcctcgtgtttctttcccgccacacaacccaaattatagctatgcacgcagcttgccacaaaattgcccctctcttagataaaccaaaaccattgtaattgatggacaacatatcagaaatgctcctcgagggaacccgatccgtcttggctaattgaaataatctgtgccataactccatcgtcaaagaacaatgtaggaaaagatgatatgttggttctccatgtctcatgcataacttacaaatatccggactaggagctttgtagggtcttctcaattgtagcaagtcattagtatttactttcttgtgtgccaccaactagacaaaagacttgactttgaaagggatttgagaattccaaacaaacttagtagggaaaattggaggagattcagaacattgggataaggcaagaaagaaagatttgactagaaaaagccttgaagaagataaagaccaagatctcacatctgaaaccaaagataacaaatgcaaacaatccggtgaccgcatgaggctttctaaatcttctatcttagaatcggataggttgcgacgaaaattaaagttccaagataagggacaagtagatccgaggattgaagaaatagaaatatttttatccgtgactactctaaatagtcttggatattgggatcccaaaggttggtccccccaccacaagtcttcctagaaccgaattctttccccatctcctaccataaaccgaataaacttggaaaactcctgaaagacttgtgcaattgccttccaaggacaacgatgtgaccatctgactatggtgttggcatcccaaccattagagtgtgatccgtaaatgcttaaaataacctgatgccatagagttgaaccctcgctagggtacctccacaaccatttccctaagagagcgacattccttagaacaatctttccaaatcccaagccccctcttgccttcgacttacacactacatcccaattaacaagatgatctcttttaccttccccaacccctgaccataaaaaatccctttgcaatctctcaatttttgtagccactgaagcgggtatcttaaacaaggaaaggaagtagcaaggcatgtgggtgagacaagattggataagagttatcctacctccaaaagataaataagtcttttgccacccatctaatcttctcaagatcctctcaatcaccggatcccaaaagccacaagccttgggattccctcccaaaggaagacccaagtagggtataggtcaactagaagccttgcaatctagcaactcggccaacctagaatgatgattctgttcaagattgatgacattaatgactgaaaataattacttatgactattgactaagctcataatctttttttctataaatcacttctaggcagaacccatattgaattgtataagattccagctaaagccaattatcatccaaagaatgccaaattaaagcttggacctcatagcccattctttgcgcctttagtatacttctttaggtggctgccacttctcttcatcacatagatcaacattaagtttaatccaaccaggagtacatcattgacaactagtattcctccctttagaactggaacaaattgttttccaactcatggatatcaaaataattgtcatacaacactttcctttgttgttgaaacctgtgggaaagtcaagaaaccaatctggtcctacagatcccacatagagttttattatcctcagaagattctcctgttcctttctagccatcaaatttcccacaatgtggctaatgcataatgtgatggtaccataaaagactacatctagatttactgctgaaactctgaaaggagatgattgaaggagatgcttaagaagaatccaaaaaaggaaagtaaaaataatttacccaacactagcatggtttctccacttcttggcttctacaacatcatctctctctcctgttccctttattagcaaaggctttctggcaaagtatagtaggttgatgctctctattatgatgattcttatttcaagagtagacatgaagtttagtttgaggttgatacagtattgttacactaaaatcaccctaatctgttatgctgaaattgttgaaatcttccagaatgtctttattcatttttaattttgttcaatggatgctagatattggcactaggtttacaccaatatctgtatctatctatctatgtatatattatgtaatattttccaatattgtaaatgtgtatataaacatataaggtcatgtttggttggttggatataacatgagatagaataagagatgagataacctattctatgtttggttgacaatgagatatagtataatatatccatggaatgatcaaaataaggtgtcactgtagaactcaaacctggggaatggtattcgcttttcaactaaaaatcagcttatgatgttatagaaccaaatcacatagttaaaagttggatcttggtttatgctgatgcaagttgcacccgcattctctgcatattgtcctgtaattttattttatttccgtccttgccattcatacgatttcttaatgtcaccaaccattggaccttttccttggattgggactgagccatagtgtttgagatctatttaccaccaaaatagattctggacatattgtgtccctttctttcattctttctttctttcttatttttaattgttttttttttctttggttgggttctttgtgatttttatgtttgcgttgtgtgttgtgtagtttgtccatccatgcctttgaatctatactagttaaatttaatttattattttcaggaaagtcagttgataggaattaactatgtttaaagatagacatcagattaatgggagataatttcaaattttcgccatgatctgttacactaaaaaatctttccaggttttgtatttattcatttttaattttgttcaatagatgctagatattggcactaggtttatgccagtatatatattatattatattttccattactgcaaatatgcatataaacatgtaaggccatgtttggttgattggatttttattttttttattttgataaaaagcaatagtattgaaaagcaccaaaaaaggggcgtaccaaagcacacaggatgtatgcaacacccgccaaaaaaggccaaaaaaagggacggaaaaacaaaaatactcccctccctcaagccgaacccaaccaatcaatgaaatcaaataaggacaacaatctctcctataaacagcttggaccaagaaaacaagctacatagaaattggactttcagtctatgatcaaagagctctacattcttaaacaattttctgtttccttccaaattatccaaaaaaaggcataaaggagtagttcccctaacatttttctgcttcctcctgacaaaagagtcatgccaacctcatagagtctctctgacagaggagtgaatcacctgtgaaataccaaaaagagagaaaagctaccacaacacccttgccttgctacaatgcaaaaggattagtcaattgactccttgtaagatgagataatatatcctatactctgtttggttgaccatgagatatagtataatatatccatcgaatgaccatcataatgtgtctgaaaaccatggaatggttttcacttttcaactaaatcagcttatgatgttatagaaccaaaacacagttcaaagttgaatcttattttatgctgatgcaagttgcacctgcatgctttacacatgaccctcctgtaatatgattttattcacatgatttcttgatgtcaacgactgttggaccttttccttggatcgggactgagccatagtggttgagatctatttactaccaaattagattctggacatattgtgcctttctttcttttcatttctttctttctttcttctttttttatcatttttttttggttgtgttctttgtgatgtttttttgttagtattatgagttgtgcggtttatctatccatgccttggaatctatacaagttaaatttgatttgttattttcaggcaagtcagttgaaggtggatttgactcttcatcctgttgaaattaatttgatcatttttttagtttactatcttgatgacttcaaaaagcatttgctgaaaatgtttggttcaataaactggattgccttatggatttaattgatcaaaagaagcttcaaatgataaaggaagtggtcattgtacatagttcaggtttgggtgagagtttttaataagtttttttcctattcaatattccttttcccacaagatttttagcagaggtgtatgtttcttaccgaagctgcttttaatttgtagtttacaagtttctacatagaaccttctccttcatttttttaatgttactgtatctttcatcccctttattctgtttcatattggtgattattgtgttgattgggggttagttttacatttgtgcaagtgtcattttaaaattgtgatgaatatcttgctttctcatgcagagaattgatatattggaagcattagaggctgcagt

SEQ ID NO: 12504 - DNA, 6981 bp, Vitis vinifera
  Intron number 1 from transcript GSVIVT01035005001 (locus G SVIVG01035005001) derived from phytozome v7.0 (chr-ID chr5 ; pos 835198 to 842178)
gcagtcaagattggcttcgatctgatattggggaagccgtgcgcttatccaaagagaaagaaagtgcaagttgtgttgccttgcatttccaccccaacactgcacatgacttttgtctcttatcatgtttgggggctgtttggagtgatatgcttttaacttagagggctgattgggagtcatcgtcttagaagtgcacttatgccccgtcgctggtagttttactagaaaacgaaacaagtatataaaaaattaattagtatttgaaaataatttttctttttgagaaaaaggtattttaaactttcttaaatgttcaagttggtaaacgattttaagaattagcatgtcactcctgtttttcccaaaaccgaacttccaaatgatgtcttaatcaaggtctgagtgtgatcttctagtgcacttatcaacctctctaatctgggttatgatttagttccttcggaaactaaaaaattgaaatataaaataaaacacaaaagctattttttatattgaaatttttaatttttcaaaatgatttattaatgtttttcaaaactattgccgtcaactaattctacgatagaatggggaatgacaaagcatatcaggaaatgatatttattattaaattagccaaattttactacaatgagatgcatcacagtaaataaatagaaaaggtttaggcctgttttaatggcagttttttattttttaaaataaaaaaactgaaaaacaagtttggtatttagaaactattttatgtttttttttctattttttattatcagaaaatagaaaatatggtgtttatagataattttttaaattgttttcggttgtatttttagagtgattttaaagaataattatacaagtatatataattattaaaaataatgttatgaatataaaaaaaaatttaaacatattcaaaagtattaaagacaagttaaaaacaattttagattcctaaataaacttttatttaataaaaaattatggaatagttttcaaaaattgttcttaaaaactattttttttagaattgttttaaaaaacaattatcaagtaaagtcttaacctctagaatgctcaagtgctaacatagatgatagattacatatcatccaattaagttttctaaactcattatgcttcaataagagaatacaaatgattaaacttaaactaatatcggcttgatctaggtgagattgttcttatatacaagtttgtattcatcttgaatagtctttcaatttttaataacttttgaattaaaaatagcatttgaaggatttgttcaagaatggaaatgagcttttagagtaaatctaacacattttacagtgtttttttttataaagtgttataaaaaacaattaagaatatgtagaacacttttatattatatataatagtttatcatatatttatgaagaggatatcgaaaaaatgtttttcatatgcatttgaatttctatattgaattgtatttttaaaataattaagaaatatttttgaaaaaatagtaaaaactaagaacatgtttgagaccgtttttctattttttttaaacttagaaaccatgtttgacaaattgttggttcaaatcaatttttaaagaatttattttgaaaatcatattatttttaagaataaatttgagtgttttcaatgttttttcacaagatatagaaataattaaaatatgaagaatacttttagaacttttatgactcataaaataggttaagaaaattatttttttatatttaatttttgcaaacatcctctctctctctctctcttgttcaaaacttaatattttaccctctaatatttgttaagtaaataagcaacgttaaaatgtaaagaaaaacgtctattgtccaagtttgaaactattgcatttcctaattgtatatgaaaatcccaaaaaataattgtaggaacatctctcttaaataaaaaatcaaaactaatagttactatattttgaaaaatatatgaaaaattccatggtaaaatgactattttaaaattgattttacttaagatcaaactaatatttgaattagagtaccaaaaatatcaattttttataattttatggatggtttgttaatgtaaagagaggaagagtattgatttttaataagtttgggaataaaatgtggaattttaaatttaaaaaaaaaaaaaatagaacgtgtgttatttgtttttatgtatttatttataaatagaagtgcgagtcagttaacagcattttgaccgatttaaaatgtcgtttaccgagtccaagatgatggaaaagttgaaacggaggagaaaaccagaccattatcacactccgcgaacaaatgcaagaaaagtggaagaaacaacggctattaatcctcgcgcctccccctctttccttggatgactcccaaacactccctcttgtaactcctttcatcaccttccccataatatatctctgtaattccctcgatttttttcttctctcttctactccttaattaattaaccaacacaaaataaaataatggagcttaagatcaatcaatcactcctcatcttctcatttttttctctcatcttcttgctcaaccatgcggaatccgtctgcgttcctcgccatgcctcaaaacaggcggattctccagaccaagttccagaggtctctccacagccgcagccggtgccgtcttcgccgccgcccaagtcatcgtcatctcccccacccaagtcttcgtcgccgtcatcgtcatcatcatcgtcatcgtcattgtcgtcgtcgtcacagccaccaccaccgtcagatcccccctccgattctccggacgggacgatgttgttcgacactggtttgatggggagaggacccggattcgtctccaacacattcaaaccctttctggacagcaagacggaccattcggtaggagccctcaaccacatatgcaagaagaccgattactccgatctctgcctctcctcgctagctcctttattcgatggacacagcgaccccgtttccatgctttatgttgcgataaaggcttgcacccaacacgcccagttgtcgctgaacacggcccagaagattgcggaagcgccctccactaaccccaccacggcctctaacctcagcgactgccaggatagttacagtgacgctttggataatctgcaagcagcaaatgatgccctgggcattcgtgactttggggcagttaatagcatgctgagcgcagtggtgactgatgcttcggattgccaggatctctttccgggaaagagttctccgatgctccactacgaagtcaagcttcgacagatggctagcaattgcctggccattgcttcattggccacttgattggagattttacatgggttcttcctgccatttcagagtctctatgtatctatttcttgatcgttttgctttctgggttttgattttggtctgtttgaggtttgggatctgggcttctagcctgttatattgtatcatatttataaattctcgcaagtcttttttactttttttggggggggggggggggttctgcttgctgtgtatgaaaacgtcacgtcttcgctttgcattaggagaatgagagattactaggaataagagggctttgtatcataattccgaatgaaaaaagggaaattcttctctgtccaaaatagtggataatgtccggtattcaaaacaattattatttaaacactaagttgaaactacgaaaagaaaaaaaaaaagttttaaacttaataaattatttttatatattttctcaaactcattctacttattcacctctattatccaaagattaaataattttaaaaatataaatttttgataaatcttaattatattatattttattttatatttttcatggtaaaattaaatataagaaaaccattttttaaatttttttttccttagtaaatcatacatgactaaaatatttcagatcatgtcattgagtgggaaaaaatctaagagataactctttgattacggtgatacttaataggaataggatttatttaccttcatttttttttggtatgatacaaattcttaaaaaataattaaaggtaattgcaaatatttagatttataattacctttttaaaacattttttttttaattaatggtgattattatagaaggtgaaccgctttggcacttactctgagtggtagaccaatgaagggcttaagctattttctactcaaaagatattatttcctttgatggtattaaattatctgaacgtacatttaagtgatttgtaaaataacttaaaatcaagctaaatattatattcttaatgttatgtttggttttaagaaagtttgagaaaataaaaaataaaaaagaaagataaaaaaaactcctatttagttcatctatgaaaaacttgaggaaaaagattaaattattggttgcacggaggaaatcctatcaattttcattttcattttcttaggctttggtcattgaaaagtatcgaaggaaaaaaaaagaggttaggttatatttggctcccaccaaatttgaggaaaaatatgaaaaaaaaaaagaaagaaaaaagttaaaaggtaataaaaagtaaaaagtaaaaataaaaaattatatttaaagataataaattattttttatgttactttaaacttattttacttattaactcttttatgtaatgatcaatgattttaaaatatatgagtttttaattaattttaattatatttttattttttatcataattttcgtagtaaaccaaatataagtaaaatgaagcattgaggaaaatgttgttttttcatgttcaatttatcgtataaaaagtactaaagaaaataaaatataattttaattaataaaaaattatggattttcaaactgttaaaactttatataaaagagctagtaagtaaaatgaatttaaaaaaaccaaagaaaaataatttattaagtttaaattcatttttaatttatttcttgtaatttttttctatttttttctcacacttttcatgacatccaaatatgaaaaaatatttatttaaaaaaaatattattttagttagtacttttcaaaactcaaacttatcctaatgactcaaaatcataagaactataaattacttgatcattcaaaccctttttgatggttttggagacttgaagctgaaaatacattaaagtatttaatagcatttatggagatgaaactcattgcattcaaccgctaaattatttttctttccttgttgaaagagtttgcatttctctcaatatcttatttttgctgatttgctaataatcatcttcttctcaatttgctttaaattattattattattattattattattattattattttggaaaattagcaacatcgagttcaatccctctgttgaatgcatataacttgttttcttgattaatttaattaaaatttgtctatgtatatataaaaataattaaaatatttatttgaataaagaataaatgatttaagcatcacttttataataattttttaccactcttttaaataataaaataaaatatattatatagcactatcttgactacaaactcacttataatatgtttagtagtgattttaaaaaatatttttaatatttttaatatttgaaaaataaaaaatttcaagtattacaaatgttataatcacttcttaaataattgtcaaagacactcttagaatccatttggtagtgattttatgaaacatttttaatacttttaatatataatttttttattatttaagtattataaatgttagaaacgctttttaaaattacttctaaacgcattcttagaatttgtttgacactaattatagaaaatatttttaaccttaaaaaataagtatttgacaaattttaagaaacacttttaaaaataaaaaaaaatcacttttattgttgaaaatttatttataatgcttttgaagaaacatgttaatgtgtctaattctaaagagtgttactaacttttttaacacttcaaaatttttacctaaatattataaatgttgaaaatacttttaaatcatgatcacaaaatacccttaatttaccaaaaactgaacatattttattacacgaatcatacaactcgtttttctttcatttttttaaataataataataataatataatgaccaaaactatttacttgtacattaagtttaatataatttattttataaacttaggagcaagtttaaaaatatttttagcatcactttttattgaaacactaagctaaaaataaaaaataaaaaaattgtaaccttggtcaaggtttaatacaatacaatcaaaattaaaaattaaaaattaaacattttcaaaacatatgaaaaatattgctcttgaaaaaatcaatgtcatctctgaagttttgttttattttgaaaaataatccaaaaattttcagtgttgcactaaaaaatttaaagttattcatcctttccaacaatattccatatttttattttaaaaattaattctcaaaccccagtttaaattacaaaaggaaaacaaatgaatcctccaaccccattccattttttttttgtttgtttgtcttgatggaaatcactgtactgttgtggcctataagaattcacatctcaacaccctcaatgaaattaacgattataattgaaagtagagaactaagaaagaggcatgggtacgtgacgcatgtcaatatcttggtatgttgacctgcaagtatattagatataggaaaattctagaaatatacccctgcaacataaaagtgggtttctctctcagagtcactcttacagggaagaataataaataagaaggaaaaaagaaaagaaaagaaaaaaaaaaaaactaatacaaaagggata

SEQ ID NO: 12505 - DNA, 6953 bp, Vitis vinifera
  Intron number 6 from transcript GSVIVT01014611001 (locus G SVIVG01014611001) derived from phytozome v7.0 (chr-ID chr1 9; pos 5699133 to 5706085 reverse strand)
gaacagtggaatttgttgcttcaaaggaatacgttagttaaatttttaagtttgtgggttttatattaattagcatcgtctttttctatcatgtgaaaagagaatttttctcgctgttgggttggaggtaggggtttattgaatgccaaccatagtcatgggaaatagagtttgagggtagaaaccaatgaaaccaaactacactgaccccactacactgcacctgtctaaattttttaaaagaagtctaattccagacatgtggctgaaactgtggggatatattgtagacgcattctaggatggctttttttttccttagtgtggaaagattaaaactgttcagataaaatttaatttgtaaaaattgtgaataagaaaaccttgttttggggtagctttttgcttttggctttctaggggtcaatggattccttgagtggggcttggtggaagctaggggagtagttgttttatgggatagttgggttttagaggttatcgagatggaggtgtgtgccttttccatttcttgccaattcatgagctattaggataattttgtatggatttttactaaggtgtatgggccttttctaagggggcagggagaggacttttgggaagaattgactgacatttgagggttttgaactgatccttggtgtgtccatgaagctgtcaatatgctaagattctgagggaaaagaggaagtgtcccaagtgttcatctactatgaggtgtttcttggacagaactgaggagcttaatttgcatgatctaactctaattagaggaccctgtacctggtgggaaggtataaataatcaatttgcttcaagatttgattggttccttgttttgaaagattaggatagtcattttggtgatcttttacagagcattctgactgggtcagtgtttgatcttgccccaattttgttagatggagatgggaagaatgggtggggggggggggacacaaaactccttttaggtttgaaaatatgtggcttagagcaaaagcttcagagagtagattaaagtccggtggacaggctattgagtcaaggttcttctagttttgtgttggcttggaagctggagtagttgagggcctaaaatttttggaataaggaggtatttgggaatgcttcatttaggaaaggagtggctttgaagcagattgctttatgggattctaaggagcaggaagcagcctttttttccaaatgaggctcaacttcatttggtcaattgatctatggtatgcatgcctaagaaaaaagggtgacttggtattagaaatcttactcttctaaacactgctcttttgggcaagtggagttggagtcttgcctaagaaagagagtctctattgaagcgggctattattgggaagtttggggaagaagggggaggatggtgctctagtgtgctaagggaaggttttagtgtaggcttatggaagacaagtagaaactaatgggaggtttttaaaagtagagttcactttattttaggcaatgaaaggagagggaagttttggttggataggtagtatggtgactcttctttgagagactccttccttatattatatgagttgatttaaaagacttgtgggcagtagatgcatgggagtaggttggggagaggagactttggggcccttgcttttaaagacaattttgtaattgggaattagagatggtggaggcctttaggagtgatcttcaaaagcgtatggtgagacgggctacctaggatgggagcctggttggagtctaaaagtggaaagttcttggttgaagctttttactttccatgcaaaaacctttcccaacacatgtaatatttgcatgggaagtaatgttgggaaagattttgaccttggattttctaaaaaggagaggggtgtttgtagggaacaaatgttacatttgtgaagggaagaagaatccattaaccatattcttctgcattgcaccttagcaagtatgttgttgtagttggtcttttccatttttgggatagctggggcgatccactcttcaacaagaccgatgttgtttagttggaatgactcctatgttgggaaaaggcagaagagagcatgaatgattgccctttagtgtttattttggacaacttggcgggaacaaaattgaagggcttttgataataatgctcaaatccttttttatatgcaattttttggaatgtgttaggcattgtataaaggagatagctatgtctctttgttttgttgattggttgggtttgaagtggaagaatgaaggagctgtctctttgttttgttctttttgcttggcgttctttgtatactccttgggtactttggcgtgcccccgttgtaactctttttgtatatttttagtcatatatatatgtatatatttatatattgcatgcttataaaaaaaaggctttttgcttttagctttagctagatcctgatattattaaagttttttatgtatgaagttttttgcataagctaaaaaagggttccatgagaagcaacatttattttttgcttccttagttttttttttttttgggataggtaaataagggtttgcattagaaacacttaaaaatggcgaaaatagtacacacaaagtatacaaacaaacgcctaaaaaactaggcagtaaggagacaagaaattcttccacttaacaaacaacccatttataaagttaattatagacaaagtgtgatcctctatctacaccctagcccaattcacaaaagtacacaagaaagaatatttgatagcttggttggaccatttgacatcattgaacgctcttccattcctttccttccatagtctacattaagtataaaggggcagccctccaggccttctcccttcttttacccactaaagctccgtgccaaccaagcaaattcctcctaacagaggaatgcaaaactcactacacatcgaaaagggagaagatcaaattccacaacattttagccttgttacaaaatagaattagatggtcactggtttcctcattttctttgcagaagtagcatctattcggtatattccatcccctcattttcagctggttgatagtcaaaattttgtttcaagacgcttcccaagcaaaaaaacttaccactagagcctaagacctccaaataatactccacgggaaaagatcactaaaagccctcatgtaggaatagtaaaggaaactaacaaaaaagtagccattcctactctctcaaactcaaaatatcctccacatctcttctcacaaccaaaagttgaagtttccaaaacaagaactccatttcttaagggctaagtttttggaggaaagtcattcgtggaaaatttggggaggtggaggggggttggaccactagagaggtgagggattcttatgggctaagtctttggaaagacaatagaaaaggctgggaaaaattctttcttagaaccagcatctgcattggaaatggtggatgcacaagattttggtgggataattgggttggggagattaagtggaaggatgtttacctaactcttttcaagctttcttcccacaagaatgcaatagtggcagatttatggggaagggaagggggtggaggtggatgttgggaggtttcttttagaagacccttctaagattgggagctagaggaggtgtctctgttttttgaacacatttcttcatcaaaagtgcatgaaggggagaacactttaatctggaaaaatgatgggaggggaaagtatagtgtcaagtcttattataattctctaagggctgagaacaatcttttatttctagctaaagaggtttggggattaggttcccctcttaaaactcgtttttttgcttgggaagtattgtgggggaagatattaactgtagatacgttgatgaagaggggatgacccttggttaatagatgctctctttgtaaaaatagtgaagagtctgatcatattttgattcattgtgataggacaagactgctttggtcagtgctgttaacaacttatggtttggtttgggtgttcctggtttcagtgagaaatcctctcttagaatggaaattcaaggtactagggaagaagaagagagcaatttgacggttggttccaatttgtttattttggcgtatttgtggagagcgcaaccgaaggatcttcgaagatgaagaattgttggaccaaaggttgagggttctcttttttagatcctttgtggagcaatctaaatagttattggatgtggtgatcccctctcatttgaattttttggagactctctattgtggaaagccttgcttttttctaggctttttctttattttttggtgcttgggttggtttttttgtgtatactgcttgtatacgttgggtacgccccctttttttggtgcttcttaatacaagcttttgtctctataaaaaaaaggactccatttctcccatctcccaatcattaagatgtcttgagaagctaggactccaactacccatctccccaccctcctccctagcttttgacacccaaccatctttatcaactgccaaaaggaattaattagggaaaacttctttcaacttttggtcctcacaccacaagtccttccaaaacttaaccctcctctcattccctactatgaagcgagatctacatcgtatgccctcccattcacttctaatggttttccacacccccacaccatagcctcctctcacttctctcaaacatcacccctcttccttctaaaccaaactcgccaatgatgacttgtttccaaagggactccttttctttagaaaatctccaactccacttcctaagcaaagctttgttaagggccacaggactacgaattcctaggtctctctccttcttcttagcacaaactattttccaattcaccaaatgaagccttttctctaaggcaccaccgccccataaatattctctttggatctttttgagtcttgcacgcacttttcgaggaatgataaaaagagacatgaaataaatcggaagacttgatagggtgcttttgatcaaggtaagccttcagcccttaaagagatattgtctcttccacattgttaatcttttgcttccttattgatatttaagcaaaaatttctataaataaaattacctaattaaatagaaaagctcttatttggcttaaaaaagagcttttgatttcccagaactcattccaaatgggacatttggggtttccaattagtgtagaggttgaagcataattgtgtccttctcctatttgttctatttttatttatttatttatttgtttgtttgtttattttgaagattttgcatgccaacgtgttcatattgtgtgaaatccattccccatatcaatttaggtgcgcaatataggccataccattttcttgaggatcattttttttttttttttggataggcaaagacacagaaaaagtatatattaataagaagagggcgcctaacgattgacccaaagcatataggaagtatacaacaagtgcctaaaggcaaaagcaaaagagagaggggataaaaaaacacacccgccctcaactagagcccaaccaatcaaaaaagttgattaaagaattagatccttcatctatacacgactcagcccactaccgaaagttactaacaaaagaatatttcaacctttgaattgagaactcctgattttcaaaagcaatcctatttctttccttccaaactgtccaaaagagacacaaaggggctgctctccaaacctttcttctcttcttgcccacaaacgagccatgccgcccaagaaggacctctttaactgacgaatgaagaacccaggacacactaaaaagggtaaacaacaagtcccacaaaaccttagccttgatgcagtgaattagaaggtgatcaatgatcttttcagcagtacaacacaacaaacgagccattttcttgaggatcatgttcccctttctaaaagaaatcagacaaactttaaccctttactgatactggcaataagacatgagaataatcctcagttacaagccaattcaagatagaataaagactaacatataccaagaatgctatttagtgggcaatgttctgcattacttagattattaaggacaaaagaatagaataaagaaaatgttaaggttttccttcctgttggttggagataaggctatggcctgtaatgagagtccaaaataatggtgcaacatgctggcctatgtttttggttttctgttttctattgtttagtgtccaaaataatgggtgcaacatgctgccttatgctcttggatttttctttgcatttcgttatttattgaaggttgctttatatgatatcactagcccaaaatgaattgaggtattgattttctattttgctcttctgtcataggacattttctgtttattttaactcttccacctattttggaagctatattgggtcagccatatgcaaatcggtactctgttaaagagttcgaaatggaaaccaaaagaataatatttttggaactgaacttattggcagtgacatgctgcatagattttctatttaaaaccagttatttttaggaagggaagccccttgaacattttctctaacttgtggaaagtttatattgtgttcaaatcttgttgtggggattcattatcacaagaacatctatagcctaacttttatattctgtgttatatggtcatttaatcttacctaatgttgtattaactggttgagagtggctgcctattgttttgttgggaaaccattcctcctgttctttcatcgaagttgttctttggtatgggggtttttgggtctaaagataagtaattctttgcatgctttgtcttatttccaggtgcgtgagcca

SEQ ID NO: 12506 - DNA, 4997 bp, Vitis vinifera
  Intron number 5 from transcript GSVIVT01001790001 (locus G SVIVG01001790001) derived from phytozome v7.0 (chr-ID chr1 8_random; pos 3218892 to 3223888 reverse strand)
tgtcgctgcacaatactatattagagaggattcaggtctctctctctctctctctctctctctctctccctctctaatgattttccatggcaggaccacgctccaaagagtgagttctgcattctcattcctggagatggaattcctgaatggtttgaacatcgggaaatgggttcttcactaacaatggagctgccttcagattggtacgaccgtgacaagttcctaggattttctgtatgctttgtctttgctttcaaggatcaactgcctcagatccacaacgacatattatgccagttgaacaatttttcatttttctatccctactgggacaagtggagtggtgagcattcatcaaatgatcgccacatgtggttggcatatcaaccacgctctggagtcgatatttgccacccagaggcatggaatagcattcgggcttcctttgaactgtctggtgtgactgatgcgttgtcgataaagtgtggccttcatcttatctacaaatgacgtcattaaaaagtaattgtaatacccatccatagggataaactcaagggaaaggtcttctacaatggccacaacattatttgaactcttcttctagggatctctgtttttttaatattctttgattttccatgtttccaattatcctatttcttgtttcatgcatacattattttatttaacaaattgttaatttgtgcattattcatacccccaactatcgaaataagtagacaacatcctaatatgagcaggcaaaaataaatcaacacaaggaacatcgaatttttagactggaaaaaccctcccacaagaggtaatacaagagaatgagaaatatttaagggatatattaggaatttttaataagtaattatttaaatttttatgaaaagttattaaaaaagaagaagaagatatgttatatattagggagaattatcttttgggggtagatgggcccccaaattaacaaatggtacatgtaactcttcaaattgagttgaaggatatgaaatagtaacggacaaatataccctttaagaacacatataaaatattttataaaattaagttaaataattttttttcaataattttttttcaaaaatactaaattaaataaaagtagttttcaaaaatattaaattaaatattttttttttcaatttttttttcaaaaatattaaattaaattaaagtatttaaaaaaatattaaattaaatattttttaaaaatatttttttaaaatattaaattaaataaatttattttaaaaaaatattaaattaaataaaagtattttaaaaaatattaaattacataaaagtattttttttaaatattaaattaaataaaaaatattaaattaaataaaagtatttttcaaaaatattaattttttttctcaaaatcaacaaagggcatttttggaaatactgaagaatgatatccttcaactcaatttccatactttcattgggtcttgagctcaatttgaagagttacatggaccttttgttaatttgggggcccatctacccccaaaacataattctccctatatattaaagaatcaagaaacatggaaaaagaaagaaagaaagaaagaatgagaggaatatgaaattagaaggtttaaaaagaatctatggaacatattagggaattttagcgtaaataaatcatttatgttataaatgcattaataataaatgaattcaatatcttgtttggttatggccaaaaattacattcaattctcatttaatactatcattggtagatgcaatgcgcaaattcttatgcagtccaaaggtatgtaaaaattattcttataatccgaaactatttgcaaattataataaaagttatgcaacaattattttacttaaacacaatcaaaagctgtaaaaactcaatccatttcacttttatattacttgttaatatattttcagaataaataaaattctaattttgttacaaggacctacagatcgcaaatatcacaactttaaaaagaaattatattaatttttaaaaatatattttattgtatttaacttgtcggggaaaagttttaatttttttttaaaaataaatcattatagattttatttcattcaagttttaaatttttatttgaacaacaaaacattactttttgttccttcggagtccattaaaataaacttaaaaatgaaaaaaaaaaaaaaaaagaaaaaggaaaaaacctttgtgttaattttgagtttattaatatattgcaaccttatttagtataggtcacatcaattctttgctataaaacatttatatggtattaaattatatatttacataattaaacaataaaaagttaaattttactataacaatatatattattttttataataaatttcaataatttttaaaaaaaaattatagttcaattaattttaaattttatcttaaaaatcaattaattcaattttttctaattattttttaagttgtagattgtcataaaatgttgtctgcattgaattcttatatctaagataaatgatttaaaaggaaaaaaaaaatcactttcctcacaattttgataaagaaatctgctctttaaaaaataatgtataagataatgaaaaataaagttatattgtatctaacttctcgtagatgagaaattttaaagaggttttaaagaaatgaagttgttatatatttcacctgattttttattttttttttataataaagaagggacgaagcattaataaattcattattaattttgagtgtattgaattattttttaaataaaaattgtttctttgccattttaaaattaatttgattaaataaactttaaagttgaaatatttattattcatcttaaaaaacaacataaagtacccaaaaataaataaattagtttttgtgtggtgaggataatcttcaatgtagaaaatatgatgttcatgataaaatacatatacatgatatatagttttgcaataatgttatttataagtaatacaattggaatatttttggaattgattgagtacgtgcagactaaaacatgatcatgtatttccataattcacgggaatcgattgaacggcagattaaaacaaagaagaaacactgtatattctgacattgtcacatggtcatttcgatgaatacaaaataaggagaaaagacttcaacaattcagactgtatactctgacattgtcacatggtcacgtgcatttcgatgaatacaaaacaaggagaaactttcttccacaattcacatcaatccattgggtggcagagagaaaagacacttttcctctaccattcacttaagggagaattgtgttttgggcctacagagcccaaaaattaacaaatgatccatatatgttacagaattaagcccaacactcagattaaggtggtgtttgttttttggctaaatagaaaaagtcaaatattttgactttttttattcaaccaaaaaacatgttacttaagtctcaaaattgataagaaggtgtggaccctgcatttcagctgctcaatgcgtttcccactcgatggagagctcgatttttatttgaaaaatgatgatttttatttgaaaaatgatgatttttatttattaagaaaatgacttggagtcgccacttatttttgttttatttttaaaaggtaaacaaaataagaaagaaaaaccctaaatgtgactccttttttttggaaaagatggtctgtgaaaaaccggatcgggttcggggtcaggttacttatcgggaaagtacggtaaaaaccgtagcatccctctaagcccctaaagtcgagtctctactaataaaatgaagctgacgtggcaattgacgagtaaatcaatgaatatcctgaatgattatgcacacataaaaaatcgagacatgcatagacaacgattagaggaaaatgggtacatacctgggcaacgagccaccatgcgctatcaatagagggggttagtgcacaattaaagaataatttcaagcatgtcatagggcagaatagaaacaatcatgcatagcaactaaatcaatcaatcaattaattataaaatcatatatgtcgggctcccaccaagacccatttattttgcatgaattaatgtcacagattccattattatggaattatgaaaaattcattcatgcttatgtaaaattaagagaaacatgagattatttgaaaaccggaatggaattaaaactgttcgggtaaagactggatttttgaaatttgtctgaaaattggagtattaggaattaaatttaagaattggaattttggaagttaagttcacaaattggatttatttaaaaattggaatttatttaaagatggaattttcaaaaataaataattaagatgaataaaataataacaatagcgaaaataataatgattagataaagaaatgtgaaaaatggaattttgagggattatttaaaaatggaattcttttaaaaatgaatgaatcaacaaataaatggatataataataatgaaagtaataatgattaattaaataatgtggaaattggaattccgaaaaattggatttgaaaattagattttgagaattaaagtttcggaaattaaatttggaaattggagttttaaaacttatttgaaaacaatttggaatttctgaaaaattagttgagaattgagattttggaaattagatttaaaaacctaagttttaaaaattttatttgaaaacgtgaagtggaaattaagaaagagatgagagcatttaataaaaaaagaaaatgggtccattgtctgcgggcttcaatattttataatgggttgtgtactactttgttgactttttgtttttttttttgtttttttatttgtttttgcttcaacctttgctagagaccttcacagtagagaagcccattttctgatttttttgaaacaacgct

SEQ ID NO: 12507 - DNA, 4508 bp, Vitis vinifera
  Intron number 4 from transcript GSVIVT01026652001 (locus G SVIVG01026652001) derived from phytozome v7.0 (chr-ID chr4 ; pos 20670063 to 20674570)
acacaaatttaactctgaggtgacttatttatcccagctcaatagcattttcttctttgtatgtatgtgtttgtgtgtcctgcttgcatgcatgtgtgttgtcaacatgcttcctgagtcccgaccaaggtggctggtagctggttgcctgggtctagcactttggtgattgactgatcttaaagggtctacattgttctttggtacatatagttcactaaagctttagattactttcttatcgcccttctatcatgattgaacgtcttgtaaggtattaagtagtgtaagccttgaaattgaccaaaaccagaaccagagcctgaaagccttatcacagctctttggagtctggtttatggatcaaattatgatccatcaaggtttgagtttattagagactggcactcagcctcaagttatccctctatgaatcgatgcttaattttaggatgctatttggtggcaggagaggagcctgaccattcttcagatgccagttggtgttgggacaggagctttccaataaccagttggtagataggtaaacctactgttaaggttataagccttgaacagttgagactgtccttggaaagcagtagtggagaatttgaattgttgagactattcttggaaagcagtgtggaaaatttgaataatgctttttaaagtagcaagtgatcacccaaccaggtggttgcttgtgctttcctgaagtacctagtcaatcatctgcttcacttaggtggtctagtgattgtctgtactgtagtaggctaacctaacttcatcttgttagaggttagtctaacctagggttggcaatctgtcttcatgggttgtgttcttatcatgttgaagcacgagtatataaaatgggttaatcccagcaagacatcagtcacaatcatgttgaaaatgcaaacccaaacctgatctgtttattaaataggtaacatgaacacaacccttgtaacttgtctagtaattaagatatcaaatttcgttaaaaaatcaatcttaaatttttatcaaatgatctttacttttctttcccacattttctcaacatccaaacacaacatgttccaaacattttcaagaaccataaagaaatgtccttgcattttgttatcatctagatatagttgaaacatgaaaaaaaaggaaactatgcattctcagtaattaaacatggtttaaacattttcaagaacaatgaaaacatttttatcctttttcctattttatcaataatgaaaaaataactttcatcgtatcttggcaaccaaacatggacaaaaaagagacatcctaatggatttgacaataagtttttgttttccattttcagcatgtttacattcaagaacaacaaaaaactatttaaatctaggttattttcctttttttttggcattcctctttataatattctcttttttatccataaaaaaatattaataaagtgccaaaaagggcaaaccaaagtacacatgatgtatacaatggtcgccaaaagaccaaaaaaaaaaaaaaaaaaaaaacaagagaaaacaataaactactccctccctcaatgataacctaaccaatcaatgaagtcgaataaggacattggtctttcaattatatacaacttggtccaagacaacaagttacaaagaaacaagtttttgagactttggtcaggaaactccttgtcatcaaaagatcttctattttgcttcttccaaattgtcaaaaagaggcacaaagggtttgtaccccacacttttttctgttttctttcaacaaaggagccttaccagcctaacatagtctcttatacaaaggaaggtactaaaaaaatgccacaaagggaaaagaaaagctgccatgaaatcctcaccttgttgcaatgtagcagaatgtggtcaattgactcctcttggatatgtcaaaggaaacatctattagtcaatgaccactctttcctttgaagttgatctagagtcaaagattttccctaagacgcctcccaaacaaaaaaactcgccttaggtggaatccacacattcccaacaactcttaccggaaaaggtatcgatcttctaagctctagaataaagagacttaacagagaaggttccaacctttcgtcttcaaccaaatcaccttatcctctcattccctattcaccaccttatcttgcagcctcatcaagaaaaacacccctcaaccttaatctctcaatcattaagacacctagagaatctaggagtccaaataccttttcacctgattgaatccacaagtccaccacccatacctcttttgagctagttatggaaaataaggaaggaaaaaaaaaaactctaaaaggctcatctctacaccaaatatcctttcaaaactttacctttctcccattacccatagagaatgagactctactattgatgatctccctcaatctctgtatggcctttcgtaacctaacctcatacacatctctcacttccttagaagactaccgttcttcaacctccctatatttaccatagacaacctgccttagaaaacccccatttctgttgcaaagcactagttccatttcaaagtagggccttgttgagtgaggagagacgcctaactcctagtcccccctttctcttatctaaacaaattgtagcatagttcactaaatgcgactttctctctaaagacccaccaccccataggaagtccctttaaatttgctctaacctcaaattcactatccctgacatccaaaacaatgacatgaagtagatagacaagctatttaaagcgctccgaatcaaagtaagtctaccccttttggaaatatattattttttccacattgccaatcttttactaaacctcttttccacttgtcctaagccaccaaagagttaagagaggcacttaaaggaagctccaaataagtggttggaagctaacccacttttcaaattttccaagttctccacctcacctagtttattttctcataaaacaaataaaataaaaataaaattaaaagcaatgttcatagcttcaaaattgtgattccaaatcacaaatccctgaggattcaaagatatagagagagggaagagttttcagttttccatattgccttttaagctgacaaatattaggagatcttggagagatgtgggatgtggaacgaaaaattaatggagataaaggattcttgagagaagaacacaatgatttgggtgaagaagagctgtttgggcatgaaatactataagatggttaggattttcttttctctagaaaagtactttttagctcgatgttttaaatcatttcacttatttaatttgtttgttttatatctaaaatttgtaaaaatatttgaaattatatggataaatgggtagtattggtcttgggtcataaatgtgtcaggttaatatggtaagtaaaggggttagttaggctgaagcccttaacccaaacatgatacatttcaacccagcatgatacttactaagcagattattttgatcagtaccaagcagattatgcatcttatataattatgacacaaccataattatgatacagtgttatgggaattattatttgctctttttggtgttacttaggtcctgccttattcggttagagatacctttagtgggtggagtggctttaatatgggcaagaagcgcagaaaggtgtggaaggcaacccctttgtgtatcttttgggcggtgtggaaggaaagaaataggatcgcttttgataatgaggagctatcgatgaataggttgaaaaattcttttgtttgtaatctttgggtgtggtctaaatcagttgtaaatgaaggtccgctctctttactcggtttttttgattggctaggtgctaggtgagggctggtattgtattttcgttttctttttgtgcccttgggcgcctcttgtataccccctgtatgcttttgggcttgctttatggggctccttgctaatatatgcttattgtgtgtttgccaataaaaaaaaaataattatgacacaaccatgatcacaatcaacctaaacctattaattttgtgtcatgtttgagtcatttgaaaatcatgtcaaatattgctacctctaggaccctaactgcaaaaatgactctaaaaccttgtgaagagagatgaactcatgattacctcattgctccctcaagtttgatcagacaagtagtgcagaaggttgaacctgataattagcagtaaaaaagataacctttcatcttcttttttaagtttcaattgaatcttgaatttctgaaattgatgcattacaaatggctggagttaaactcaaggaaaacacttagatacttttgacatgtaatatttatataattgcagcatttttatcaatttcctccggttcttttgacattcatggtgaaatatctttattgataccttgtgatgcttccgctttccagtgcacaacgattgc

SEQ ID NO: 12508 - DNA, 7667 bp, Vitis vinifera
  Intron number 1 from transcript GSVIVT01023203001 (locus G SVIVG01023203001) derived from phytozome v7.0 (chr-ID chr1 2; pos 21182451 to 21190117)
gtgatcaaaaaacaattaagtagcatgttggaatatctccttaatttcaattgggacaccttcattaagcatttttttttcttcaaacttaactacaacttcaaagatcgagttaccttgtaagaacaataccctcagtttagggcaatccggattatccagtagcttggatattttattattcatcaaatgcatctcattagcttcccccatgtctcattttttggtgcatccatgagtcattctccatcttgttcaacaagtagttttggattcatttcagcttcataaaaattctccaactccttatggacttcatctcgcattcggattgactctccatctcgaaagctttccaacaagagggcattgacaagatgttgaacaacttgttttccttcaccgagtgttccagtttagtcttctttcattcacctatcaagaaaatccactttctttgctccatccatctctaggtaagatgcacaatattttacacatctatttgcagtacctaaataccgcaaaacgaatgctagtgcattaaaataaacaaccattgaaatacaatcatacccaaaaatgtcatatcgagtctgcttcaattggaagagttaagcatagatgtgaatcctgaggatgaaaggtggaatgcagcaaccattgaagatgttgtaaaggaagtttgttgcttaaatcgattgtgttttcctaaacttcacttgccagaagttttgcttttgaatgaatttaagaatggattatcattgataaatctgtcatggatgcactttagatttattgttggcaatcatctgaagcgcacaatatcccagtggccacatgattctttaatgaaatttgaagaataagaaagttgctcatcccggttaacgagtgtggaggtttcccactgtttatagacagagtagcaataaccttcaaaaagaacgaggaaaatgatgtattgtggaatcgaggattgttgtgcatacaaagatgggatagcagcaaagttggaggcatagatgaagtgcttgaattcttggagctttgttaccaggatttagatgaaattaaaaagggttgttttttttacaactcattgtatcctgaagaatgtgagatttgtgtagattacttgctggaatgttggagagctgaaggttttactatggattatacaaatgagtttaaagatgcacgtggtaaagggcatgcgatcttgaaagaactcattgatctctcgctgctagagataaccgacgggaggaaatttgttaagatgaacaaagtgcttcgaaaaatggccctcaaaatgtcatcacaaaggaacgatttcaagttgttggtgaagccacgtgagggactgaatgattttccaaagaaggaaaaatgggaacaagcaactaggatctctctgatggataaccaactacaaactttgcctgatactgatctagactgtcgcaatcttttaacattgttgcttcaaaggaattggtagctaaagaaaattcctgattccttttttgcatttatgcagagtcttcgagttctagatttgcatgcaattgaaatccaatccctaccttcatctttatctgaattgatctacctcagagggctccatcaaattcttgtagttgtctgagagaattcaaatttgatataaaagcacttgtggatcttgaggcacttgacattcgaggcacaaaaaccagtttacttcaaattggaggtctagaaaaagtgaggtgtttgaagatgtcattatctaattttggcatggacagcgatattgaagggaaggtttcaagtttcaattcattggaagaactcactattgaggtttgttcatccaaattatggtgggacaagattgtaaacaccgtgaagaaggaagtagctgccttagaaaaattaacttctcttcgattttgcttccctgaagtggactgtcttgagttgtttgtcactacaagcccagtatggaagaagaatccgtgcatgacatttcaatttgccagtggtcaccctgattcaacctcccctcaaattcttgagtccttttgttatgcaagcaataacagcctcaaattagtcaatagcaatggtgtgaatcccataatgttgaagctgcttatgaaaacctatgcatttggacttattaagcacaagggagtttcatgatctgatattaattgctgcaatattcaaattaaaccttctatcatttgcacgattattgcacattgatgagtttgacgggtaaaagtataatattataaaggcttttaaacgtacaaaaacttttccaatttttttttaattcaaatatattaaaagtatgattttcatatgctttttaaattccttacataataaagattcaagtactctaatgagccaagtgcaatttcttcttcatctgcaattaaatagtatgaatttaccacatttttgtaatgcacaaaattttggattttttatatttccaatgttagaattctgataaactggtaatcaattagatgatgatcaaaaaacaattaagtagcatgttggaatatctccttaatttcaattgggacaccttcattaagcatttttttttcttcaaacttaactacaacttcaaagatcgagttaccttgtaagaacaataccctcagtttagggcaatccggattatccagtagcttggatattttattattcatcaaatgcatctcattagcttcccccatgtctcattttttggtgcatccatgagtcattctccatcttgttcaacaagtagttttggattcatttcagcttcataaaaattctccaactccttatagacttcatctcgcattcggattgactctccatctcgaaagctttccaacaagagggcattgacaagatgttgaacaacttgttttccttcaccgagtgttccagtttagtcttctttcattcacctatcaagaaaatccactttctttgctccatccatctctaggtaagatgcacaatattttacacatctatttgcagtacctaaataccgcaaaacgaatgctagtgcattaaaataaacaaccattgaaatacaatcataccccaaaatgtcatatcgagtctgcttcaattggaagagttaagcatagatgtgaatcctgaggatgagaggtggaatgcagcaaccattgaagatgttgtaaaggaagtttgttgcttaattcgattgtgttttcctaaacttcacttgccaaaagttttgcctttgaatgaatttaagaatggattatcattgataaatctgtcatggatgcactttagatttattgttggcaatcatatgaagcgcacaatatcccagtggccacatgagtctttaatgaaatttgaagaataagaaagttgctcgaagtatgcgaatggtaaagaaattccaattgaaattaaggaggtgctccagctttctactccatttttctcggatcgtcacttatatgcaaccagtttgtctgaattttggattgaaaatatgaaaaatttaaaatgttgtatattacaagaatgtaatgagattgaaaccattgtaaatgcagatggtccagttaaagatattgtacttagatcactagagtactcgagtctacattatatgaagaactttaggagcatctggaaagggtcaccaccttattggaggggtcctctagagtttctaaaagttttggctctatattcttgacccaatttgactaacactttaaaaccatttaaatgtagatgataaagaaattatatttgacacacaagagtacttgaatctttgttatgtaatgaatttaaagagcatatgtaaagggttacattattttagagactttcaccatatttggatattaatatctttcaaaaagtttctattatattatacttttatccatcaaactgatcaagattgcatgtgtaatatttgtgcaataataaaggacataatttgaatatggagtttatttaacagtgcaacaattaatatatgattgaaaagggttaggagctttggaaatgcttggttttgtaatgacatgttctctactctttttttaatgtatatgtattctctaatcgtaggttggtttcaaactaaataagatctttaccaaaaaaaaaatttcaaaaaattcatcgaactctaaaaattctttttaaaaggttatgacttcttcatggagttcccatatgaacttggagaatttagttatcttgaggtacttgatttagaaaaaactgaaatcgtaaatttacctactgctcttgaaaaaaatagaaaatttaagatgcttgaagtctaataacaaagccttaggaaaccaagaattttcaaagcttataactctttgatcatatattaattgctgcaatattcaaattaagtcttctatcatttgcacgaatattgcacattgatgagtttgatgggtaaaactataatattataaaagcttttaaaattacaaaacttttccaatttttttttaaattcaaatatattaaaagtatcattttcatatgctttttaaattcgttacataataaagattcaagtgtactctaatgagccaagtgcaacttcttcttcatctgcaactaaatagtatgaatttaccacatttttgtaatgcataaaattttagattttttatatttccaatgttaaattctaataaactggtaatacttagatggtgatcaaagaacaattaagtaggatgttggaatatctccttaatttcaattgggacaccttcactaagcatctttctttttcttcaaacgtaactacaacttcaaagatcgagttaccttgtaagaacaataacctaagtttagggcaattcggattatccagtagcttggatattaaatatttaacaaatttttaaagaaattaaaaacatttcaaattctaacaaatttttgttctataaaatataagagaataatttttaaaaattgttttttaaaactattttttaaaacatttgtcgtaattatcacatcacttttttttctctctaggtcatatcaaacactgaacagaatagtaaaagcccaaatactttcatcataatctttcccattatgttaattcatgggaaatgaagaggttaattaagtataattagatcttatcagtgattaaaactgaaggtgtttcaactttcaagcttaaaataaaaagatgaatgaaagtgacagtgcccgcttcatcgatggttatgtgtgtttggctgctgagaaaatatcagagatcgatcttttgaaagcaatactcaccgaacgtcatctaggtcctcatcatcagaatatcacttgcatcgtctccaccatcgacgctgagttccgtagaatccatggcaccgaaagccccagaaccctccgccggaaactcttctgtcttcctccgcttcgtttccatggctcactgcaccagaagctgtgattggagtggataaagtgtttgttccgaggtcgaatcccctttttgacacccacgtatcattggactcagtacattttgaagatttctatgaggggcatcttggtccttttagaaattaaataacaatttttgtctataccagcagtaaatctcttttttgaccccacaaatgtgtatgttgttctagtctactggctatttcttttatgggcaaatgggtcaactcccaagtcatgactttaccttctcaccccttctactctagttagagtcataccaactcggcttcaaattcgaataaatttgtataaatgatttaaaatatattattattattattattattattattaatttattattattttgttattgattataatcttatagataaatgtaataagcctcccttcaagaagatgtttttaaaaataattttttattttaattttgtaaaaattaaattataaattcaatttgaataatataaaatcaatcgaattcaaatcttattaaaaataaaagtaagtttataattacaaataaattattttttaataacatataaatattaatattataataaaaatataaattatatatttttcataaatattataaaaatatggatattaataccttataaaagtataattgatttattttattaaaagggcactagaaagcaaaaagaagaagagaagagtaggaaaaaaaatcattttaaataattaaattctaattaagaaataacaaattaattatagatgaagatgaaaggaagggggagggaaggagagaagaaaaaatagcattttttttaattgaatataatttgaaaaaacaattgaattatagaggaagatggatggattaattgactttgattaaaaaaaagacatgaatatagagaaacaccaagggaaggatataagaagaaaagtcttaattgccttttttttttattttttaaaaaataaaattgaaaatagaggaagttggagggaaagtgaaaggaagaagaggagaataaaaaaatatttttcttaattgaatttcaattaaaaaaacaattgaattataagggaagagaaagaaaatgaggagaggagaaaagaaaaaaacattttttcttaattaattttcaattaaaaaaataaaggaaaaaactaattgaggggtcaaactaatcatcttttacttggtttgatgttacacttaactcatcctaaacaatacacctatctcatcttaaattattcggatggactcatttaataatcgtatcagaatgaccttaaacaaatatagtttatttattttataaaaaccacaatacgactcgtttaactcatttaataaattagttaaattgtatacgaataagttattcatttttcaaaaactttaatggatattactagaaaaaaaaaaaagggccacacttgctttcctcctttttcttaattgactcaaacaaaattttagtgcatatttgacaatatttttgaaatagttctcacataacaattaaacacttgtttaatgatttttttttagagaaaaagtctatttttggaaatttgaaatgttgttaacatatttttaattaatttaaattttttttttaataattgttatatatgatgttatttttaatcatttttcattttatataatcatttttaaaacaatctcaaaaaaaaaaaaaaacaacttaaaataattgaaatatgttattaaaaaaaacactatattttacaaacaagttaaaaataatattttttaaaagttgaaaaatatttattttattttattcttatctttcatttatattctcaacataaaaatcaaacatctttgttttcctttttttcaaatattaaacagttttttttcatcctttttaaatatctatttatatgcaaattgagatagaaaaaaaattatatttaataatattttttttccatcccaaagtcaaagtcgtctcttgtatctagctcagggattgctctttctccccccttttcttctctgttgaggtgggcagtggaaggaacaccattgacgagatctcatgctctgaatttggattcttcatccacatctctccctcttagtttccgtctctccaatcaggttccttcggatcttt

SEQ ID NO: 12509 - DNA, 3349 bp, Vitis vinifera
  Intron number 3 from transcript GSVIVT01031076001 (locus G SVIVG01031076001) derived from phytozome v7.0 (chr-ID chr1 4; pos 21896596 to 21899944 reverse strand)
cattggttgcaaaggtttcaaagcttgagagcgaggttggtaaatttttttgactcttgcctgtttttatgttggatacggtaattatttgaaactggtgatttattaaggccaattatggtgccttgtctttttgttgaattttttaaattttcttaattttaattgattgcgatgagctgaagatcaaaatcgttctttgacgtttgagggattagagttgaagcaccaatttgaagtttggaaagggaacatgtgtatttatggtttttaacgtatagtttgtttgatgcattgtaaaggtatataaatgtggtttttattttgggtttatgatgaaacaagcatataataagtgaaggttttggttgagttacaaatcatcgagaacatttatgttcctctctatggattatgttggcccaagtaatgcaatagttgccatgtttcctcctgagaattagagatgatagaggaacagtttaattgggaggctgtccaccctccgctgattgggatgagaatttaaacttatgggtaatgacattgatgagttggtgataatagttttccatctttcatgagctcaaataaataagaaagtgagaaatgaattaaggagttgattactttgtaattgttaaggacatttgtgattttctctactagcaaagtagtaatcctgaaactaggaggccttccttattttcttaagtatttttatttttcattggagggcggcctccttgtttaactcttaataattagtaatggtaacatgacagtcaaatttgtgaactccttgactgctttgtattgctttctggcattaatgaagaatattcagttgtaattgggccatactaaaaaccccttgtcctgcctccgggcattaatggtgtatgtcttagcagttgtgagaggaacttgggtagctggctaattggtatggggaagggagccttagccattgtatttgatctttataaggagtttgcatgactgggtattgggttgacagcttttttggcatggattctatgaggagagagcatagttttaaaaggcgcaaggtgcacctaaggtacaaaagtctttacagcttaggactcagactcaacacaaggcgtgcgcttgagccaagtgaaatgtgaacgaggatgcatattaattgtataaaatacaaatctaatccaatcaataaaaaatttaatattctaaacatttaaaagaagcattcaataaaaaaagtaatgaaattatataaattttaagatgtggttacaaatttcaagaataaagttgtataaaaaaggaaagcatgcgaggcacactttttcaacaaggcacatgctttggcaagcaagacgttataactagggagtggttacacctggggcctaggtgtgcttaaaactatgggagtgagctaatgtggagaagttagacggtccttgttggaaattgttgaataagagctagctttgtggtctcctttttcttctccatactggcatgctcttacctaggccattctagaattttctagcttcagctgtctaggcttcttgtgggctgcctatgtcacgcttcttcatgtgaaaatagttccagaaagttcccctccttaggctagttgaggtgtagagttgctcatcttgtgatctgttggtgttaattcaaaaaggacgaggggctggcacaccctattcttctgtgttgtgggcagcatcttggtctcttctatttcctaggtttggagtttctcagctatgacgagagtggggatgggttgagtgcttctttccataattgttattttttggtatttccatttttctttggaatatttggttaaaaggggcaaaataacccctaatttgcaaaaataaccctcaatctttttgctgatacataaccctttttgaactaaattacccttaaaccacatagaaaagaaaacctaccaaaaacctgtgaaatcaaatgtctttcttctcctatctttccattgtctttcaaatctctttctttctctctttcttcattgcctccactcatttctttgtgtaactccacttctttgtaacatcgttcaactcacctctcttgttgctcttttctatctcttagttgaaacccactatcatccttctttcaactaaaatttcattcatttctttgttatttgaaagtggttaacatgaaatgaagttttaattgtaggaagacgcgactttgaactttcaataaagaatattaaagaatatgttgaaaatgcaagtgtttttcattttaaatttctagcaatatttggggatctaattatattgcaatggcttttggagcatgagtaaactcatattaagtttgttgtaaatgaaacttaatcttgctatacttcatgtaaaaatcttaaatgaaaacttaaccataattaagtaatttgtaaatcaaacctaaccatagtgcagttcaagtgaccattatgatataggacttaaccctagttaagttttttataaatagaacttaatcccaacacaatttaggtgaacacttcgtacgagaatgagttgtgtgaaagataagagaatgggtagcgcattatgagatgagaaagatttttctcaaaacgttgcgaagagagagaaaaatgaagttaacaacatgagggatgctcatgaggcaataatgaaagaaagtttgaagtcacacttaaagattaagacctagcagtgaaacgaactttgctagtatcaaagttaaggtgggaaagggaaaaaaataagtttgagagataaatgagtttagagaaatgattaaatgattaaaataggtgggaagatatgtttttggagggaaacaaaatgtaaaaggatacaagtgtccgaaaagggtcatctttcaacaagattagagagggaggtcatttttgcaatttgacagttattttagcatgtgtccaaataacctttttctttctttctttccttttttctgctaatctttctagggtggttttaaattatcttattaattttcatcttttctggcttgaccttgttctttcacttagccactattttaattttgtaacctgttaggcttgttttccttttttcttttgtgcccaaagcagaccagtgcctagagtgtggagaactctggtcattttatgtttgttttactatctattccataagccattcgttgtttttctttttcatttattctcaacgtttcagttcctgctaagtgatcaaattttgaatttttgatattaaaaaaaatacattaatcttatcacgacttgttttgtgaacagatttttgaataccaatacaat

SEQ ID NO: 12510 - DNA, 15443 bp, Vitis vinifera
  Intron number 7 from transcript GSVIVT01038082001 (locus G SVIVG01038082001) derived from phytozome v7.0 (chr-ID chr1 9; pos 17668982 to 17684424 reverse strand)
aatcaaagtaagtctttataggtttttacattacatgtttcttttatgaaatttctttttagttcaaaattcaaatacatcttttcttatgcaaaagtttttgcatggtatatagcctacatttttcatgggattgtatttcaaatcaggctaatatttgaaattgatacaagaccaagattgttttgaaattctatttctgtggaactaatcaatcattcaaattgcacgaaactcattgaaacacattgacactactaacatgcactatatgctttttaataaataattttctaaatctcaaatttggaattttagtgttataacatgatatatctcctgtttggtatgaactgtggacatgaatcttgtgatgcagttccagaaaaggaaaaagatttgtgtgtgtgtgtgtgttgttttttgacaaggattgaagtcagctattcttgaaaacctgtccaataccactattatattagaagctgacctttattggatgattataatgcaaaagatccatgctaagtgctacctatggttgatttgattcctaaagggaaatataaagtcctgcattagtagttgtgtccttggaccatgacatatatgacatctttccacatgccttgtaacattttgcctgaaacttgatcaaaagtgatctttttacaccaagtttatgctcttatcatgttaaaaatgttccaaaccattcttgtttaacaattatcttatcccttaagagaacaagttaagacattcttttggtgcccccttttttaaatacacttttattttacctatcaaaaagttaagatacaaaatcaaacacacttggagagaaccattctagaagctatagttgcactggctttgagccataacatgatgaaatgggaactaaactagttgtctttgtttaaacctccataataatgggcttgggtctttcttctatggaggcaaaagaaagttacacaaatagatgcacatgctaaaaatgagactcttgacaccaaagaatttcttaattatggaaatagagatttacaaaggaaatccttgaataccgatcaaaatcctcagaacattccaaaacaaacacaagggtctaaccttccttgtcaacaaaactcacaatctaatggcaggaagtaccttaaacagaatgaggtaaatcccaagcagcctaagcaatgcaaataacaaagaccataaacctgcccatatgaccataattgatgagaatataatttgctggttcctctttttcttcacatgaataacacctattatcaagaggctaacctcttttcatgagttgatctataaactacttttgcatttcttcctaaacaaataatcaaaccttaggattgtagaacttcacaactccctagtcagagatgaggcataggctcctgaagacaaatatttgcagaaagacttcataaagaagcagcctttttgttgttccttgacatcaacatatccttactctctccatgagttacgactcaagaatgactattaattccaactcccaattatgataacccctcacaaaccttgagttctagttaccatggccatcctctggatacaacaaaccaatcaccaatcatatttgttgattaagtccagcaagtgattcaaagtggagctcccaaatttgttttggaacctttgtttactcaaaggcaagggcaagactggaagagtttatagcttcccaaagatcttatccttgagcaattctctacctgatagatgacactgacctcccttctccactcaatacctgtccataataactttcctccataaattgttctgcaactataaacctccacagcacataacaagtggggttcaatttagcaccaatacataacccctttggccctctccaggttccttcccatccccaaatttctcaccacctgtacaaacatctcactaagtttggtttcctgtaaacatatcagatccgacttcttcctcatcactgatttgatagcctttcttttatttggatcatgaagacctctcacattctaagaaagaatatgcaaatttcatttagaaattggaatcaaagactgatcgttatcgctcttgtctgcatctctatccgacttccctcataattggagtgaaataattttcttaattctcttatctcttcttgaactggctttccatggattcaacttcacaacccaatcttgaaaaggaggctaatttagaggacattggatgggaagataatgggatagaagagtcgtcaacatggtgttgatggaagtgataagaatttgattttcaatgatgattatgatgatgacacctaaagttcatctaggatttttgtcttcttgtattttgaactgtttgatgtttgtaaaattatgatatggattatgggaggatgtttaccattatgagtagtattatttagttaaatccacaacacaagaaatgaactcttattaagtgttgattgtagaatgataacaagataatgatggtaagtatgatgtttatttatttatttatttattttttgataggtaagcattatgtttattttgttttggcaaactaaaaggaaaaaaaataaaatatcttgccttgcttcacataggctatttttttttttttttttgcattgcctcattttattttatttttttgtctttcaccttgggcaaataaggttcttatcaccttctcaatgccttttattgttgacaacactagtagttgtagaccttttcattgttcaatttgcaagcgacctcaaccgtctagtttctagagttaaacattagcaatgaggattatgaccagcatcacaaaccaagatcttcacaagtagcttatttatgcaactaaccaagctaattagcctaaaatctttgatgtcctccaccttccctttctgggtaccaacaaaacaaacatggtattcaaactctgccccaaaaggtccatccaaatgaaaatcactaaggaaagtcaccacattcctttaccaccattttgccaaaaagcattcgacaactcatctagacttggagctttatcccatcctaagttgaatatgacaaccaaaaacatttcactcaaatgctcctcaagccctttatcaatcttgtcaatagatttgaaaccatctccctttatgccaagtagtttaactactaaaagtagtttaagacccataacttaatgttggatacctttgaaaaccactccccatcaaccttgaacttattggtgaagttgcctctattataagtggtggcctctaggccttcttctccaagctttctctaggacaaaggcaataaagctagcattggaaactattgtctagtgtattgttcttgtgggcatacctagaaattcattgcaaacatatttattatatgtttttgcaggcttttccttgttgcttaaaaataccctgagagacatccttgatgctcagttgacacaagattgtgtgtgtgtgtgtgtatggtagctaaactggaaaagattcaaagggacttccttcggggaggaggggctttgtttaacaagccccatttggtgaattggtcggtggtttgcttggaaaaacagaaaagggccttaggtttaagaaaccttttgatcctcaacaaggctcttttggggaaatagtcttggagatttgtgagtgaagggaatcttctttggaaatgggtaattgttggtaagtatgggcatgatgatggggattggtgctcaaaataggtgagagagaggtatggagtgggggtatggaaggcaattgggaatggatgggaggctttcaaagataaaactagctttcatgttggctcatggagtaaggtggagttttggatgaataactggtaaggggatttgtctttgagggattccttcttgaacctttattctatagcctctacaaaagatgcttgggtggtttgatgtttgggatggtggtagttggggtcctaggtttattagataactgaatgactgagagttggaggaagtagatgccttttttgggaggttgcatgattactccatctctttgggtattgatgttattatgatatggactttttagttaagtctttctactccttagctagtaggagagcaaagccattccctcgtagtacaatttggaactcttgggctcctagaagagctagcttttttgcttgggaagcaacttgggctaagatattgctgctttatgccttttttggtccatttggagggagagaaataggagaacctttgagaattgtgaaagcttggactaagcgattaaaagtttttttttgtatcttttttgggattggattagattgtatattgaggatgttctgtctctattagattttgtgaattggttagactcttcatagggtggggttgctcgtgtttgtgtattcacaccttctggttttttagttgcattgtgtatgtgtgcactttttaattttaatataatctacatttacctatcaatatatatatatatcctatatgtgcctattaaacataaagctattgcatcatataattaggatagagaacctccctttttcagagttagaaatcttgtaatgtttgttcaattaaacttagatgttatttaggacatttgggatttgtaatgctatatatatatatatatatatatatatatcattaaacattgttataatgtacttatctagacccaaatcctatggggtagctcagttggtccagtcttgggtttgctccccaatggtcaccagtttgagtcccctcagggccactggaggtttacccggtcgttaacttcagggccccatgggattagtcgaggtgcgcgtaagctgggccggacatccacgattatcaaaaaaaaaaaaaaatgtacttatctagacccttggtctataaaaagagatgctcctaactttgcatacttggttataatccagaaatgtggttaattgacagtaaacatagagtggtataaaaaagttctaagaaccagaatccaagaagggtaatcttattctaagcttgtgtttaaacttctatgtcatgcaatgaaattaatctttattttcttttattttattttttgcacttcttctatgatcttttactgtaattttatttctcatttttaagttaatctttttattttattttatttgtatttcctctattgtagttttatttctgtgtcttgatttaatcattatagtttattcctaaattttatgcctcatgaggggggaaagagtttttacctccatttcttacctttgaggactatggttgtaatattgtacacttaaacctaggtccacccttgaaaatcaagcttgcttttcttgtaagttattaaactgattgtgatatctgacattacttttattttatatttttggctcaagttagttatgctaaagttggtactaggtcttaagagtttgatatttcaagatgtataactcttatggtgccaatatttaggtgatgattgcatttatttatattgagtacctcaaaatcacttttgcataattttttatgactaatgtgtttagtaaaataaataaaaatgaaaccatgcttgaaacctacaagaaaaatgaaaaaaaaaaaaattattatcataacatttacctaaataaaaaaaaggtaaaataaataaaaatgattgttaaagaatctgagtcactttggcaccagttttgagaagtatgtaaaatgtagcctttttaaagtgattttcaaagaattaaatgttttatttaaaattttttataggtaaaaacaaatagcatatataaaaaggaggcaccaaataagtgtcccgaagtatacaagaagtatacattggccaccaagaggcacaaccaatagagagaggaagaaaacaaaaaacatcacctgccctcatttaaatcctagccaatcaataaagctaattagagacaacaagccctcatccacaaacaccctagaccaagaccacaaattacaaataaaagagtttttcatcctttggatcaaaagctccacattatcaagaacaataatgttcctttctttccaaactatccaaaattgttgtccgcaaataatttctttacatatttattgttttcttcatcattcagctttattcctgaaccttgtccattgagatttatgttttatattactcattataaaataaaaaagaaaaaaatatttataaatatgtttacttgaattaagttaatatagaaaaatgagattttttaacaataataataataataagacccttattcaaagaataaaattctgggatttgacccttattattattgttataataataatatatatacttaatggaacttccctcaatccttcccaaccccttatcacttgaaataggcctcaagaacttgaagattattgaatccttataccaaggatttggcttttggtgagggaggagggtctctttgtgcttttctgaattcacttctgtatgcttgtgtctttgtagaggtaattcttttcccaatgttttgataccatgttgttttgtccccaaagtaccatgtatttacatgagactgactttgacgtaggatcttgcaattcctaaaatttaaaaagaaattttgcacaattagggatttgatccccttcccaacaattctgcagggattctacagttatctcctaagttacaaaaggagttttggatttttcacccccttggactagtttcctagctttgtcattgaatcttatatgaatcaacccatatccccttccttgagttcaacaaaacatctcctaaaatcaacatgaaccttgtattttgattgtttagtgcaaatttgtacttcagcatgaaacttccctcatgtgacttgcaacagcttccactttctgctatcaatcttgcatttggtggcaaaagaagtaaacaaatgggctttggaggcttcaagctagttacaagttcaaaaggactgcactccattgcgccattttattgaactgtcataagcaaattctcccatggtaagtaattggtcccaatgcttagtatcgtcacaatctatgttaacgatcatcaaggttacaattaagaacttcaatttgcctatttgtttaggtttggaatgatgaagagagatttagtttggtattaggccacccccatagaattttccaaaaatagctcatagactttatatcctaatttgaaacaatagtcttagacaaacaatataagctaatggcttcttgaaaaaaatattttagcaagtttgccagtatctgatgtctttgaacaaggaatgaaaaccatctttgattgtcgatcaacatcatgaatatgacatcatgacctctaaaggtctatggtagcctaggacatagtttatcctaaggtcttcctaaggggcatgcagaataggaaaaagtattgagaagagttggcaattacgataatgagagatgatccttgcaatatctcgttttaagctaggccaatagaaaggaaattccaacatggtgattgttttatgatgcccaaaatgaccttctaccccttacgtgtgtagttcttgtaccatttgttctctaagggaagcgttatgcaaacacaaccgagttcctttgaagagaacctcatggatgcagttatatgtccctcttccctgagaacccctctaattctcacattaaaagcatttgttgctatttcaaaaactttagaataggtgacatacaagtgtttccatctcatcctttgtttcacttctttaaaggctttgcttgctgccagtgtaggaagagatgcctttcttcatacaagcagttattggagctgtaattatgctgaaatttctaataatctactatagaaaatggaaactacaagcttcatgcaaattttgaaggttggggcctttgaaggatcaggttccataccctaataacaaagctaaaaaatataacatgagtcataaacaaacttttctttttaaagtgttgaactacttttccctaccattgcttgtggtatgtgtgaaatgcaatagtatatcatcaaaataaacaacaagaaattgactaatgaaggtttaagagtacttgtggtatggccctcataatggtgctctatgcttcaaagagaccaaatggacataaatatccacttataaaggccattccttgtttcgaaagttttccactcatctttgagccttatccttggtggtagccactttctttgagaaaattgtaggatctgcttccttatccaacttatcatgaaatcaattacaacaaatccctttgatcacgggattacctaattctcttctacaaaatcacaacttccctaattctattcttccacactccctctcaagctagtgaatagatattttccattcccagcttggatacacctacttgaaactttgtattgtctaaaccttttgtgagtatatttgctagttgacggacaatagatatataaggagtacatatcaatccactatctagtttctctttgataaaatgcctgtcaatttatgtgtttcgttcaatcacattgtactagattatgtgcaatactaattgcagatttattgtcaaggtaaagtctcattgaactatcccattcaatgttcaaatctttcaaaataatcttcaactatagtagttcacaaactccttaggccattgctcgaaattctatttctgcactataccttgctaccaagctatttcttctctatattgccaaatttccaccaagaaaggtgcaatactcagtagttgatcttctatcaactacagatccaacataatctgcatctatgtatgcttcaagtactaatcttgagcttcgtttaaataggatgcccctttcctggaggccctttcctggagaccctttaagataatgtagtactcggttagcagcttgcagatgaaccttttttagattgtgcatgaatagactaatcacactcaccacatgtgctttggtcttgtgtgagagaaataaatgagtcttcctaccagacattgatacatctctctatctagcacaatatcttccttagtgtctccaagcttatgattagggtctattggtgtgtttactggttgacacgccaacttccttgtttccttgagaaggtatgttacatatttctgttgagaaataaaaattccttgcttagtatgtgcaacctcaattcctaggaagtattttaaccttcctagttctttaatctcaaattccttagtcaagcattgtctcaaagtttgcctctctagttctttggttcccatcatgatgatgtcgtctacgtataccaaaagagctgtaactccccttgaatgtgaatgcttgataaacaacgtatgatctctctgactttgtttgtatcccatgtttttcatcatttttgcaaaccttccaaacgatacccttggagactgtttcaatctgtataaagatttcttcagtttacacaccttttttgtggttaggtcactgctaaatctaggaaggacttccatataaatctctttttctagatttccattcaaaaatgcgtttttgatatcgaattgttgtatatttggttttaatttgttgttagagataacaaaattttgacagtgttctttttggcaatcggcgcaaatgtctctaaatggtccacaccatatgtctaagtgtatcctttagtcatcagtcttgccttgtacttttctaatgtcccatatgctctatacttaacaatataaacccatttacatcccactggtttttttcctgcaagcaaatctaccatctccaaagttttatgcttctccaaggcatccatttctacatttatggcttgtctccaattttcattagataaagcctcagatagagtggtaagaatatgaatattgtacaaatttgtgagaaaactcctttgggatgaagacaacttttcgaatgacacatgggaaaatggttacaaagggtgtttagtgcattccttcgttctcttcttgatggcaatggagagattttgatcaatagatttttcagattgacttggtttgtgaggaaggatgagaaattgtttcatttccaaaaggtggtttagatccttagatttgtataagtgtaggaattgcaactttcttccttgagtacactttgctaatcattcgattcttaggagtaggctcagactcgggtttagagaagtggggtacggatactagaggttcggagaactagggtacgggtatggatactggatcagacattagaccagagactataggaaggtcaatgagaaagggatcaattagataagaatcttgatcctgattggtctagatactagaggttcagagaattgggctacgagtatagatattggatcagagattgtaggagggtcaatgagataggaatcttgatccttgtcttccttgatggaagtaccccccctgaagataaggagtaggaaaataggactcactctcgttgaatgtaacatttgttgagacaaaatttttttggatggtggatggtaacacttatacctcttttgagttgaggaatatcctataaaaatacatttgactgctcttagatccaattttcccttgtttggactgtgaacatgcacaaaggacacatcaaatatcttaggaatgagatggtttatggtcctcatattaggataaaatgatgaaggtatatcatagaacttttgaaacctaagactctagaaggtaatcagtttatgaggtgtggtggttaggatgacttccccccaataagatttaggcacatgtttttgaaataaaaaagtttgtgttgtattaagaaggtggtcatttttcctctcaacaactccattttgctatggggtgttgacacatgatgactcgtgaattattccctcatgttgaaagtatgaggttaggatttgattgaaataatctctagcattgttgaactgaaacctcttgatagtgacaccaaactggttttttaccatgttatgaaagtttggtagaaccgaactcacataagatttttgtttgagtaagaaaatccaagagaccctagtacaatcatcgataaaatacacagaccaacgtgccccaattacattaggaacaagggaagggccccaaatatcactatgaattagatgaaatggctatgaacttcttttattattattggtggggaaggttgaatgcttgtgtttggaaagttcacatacatcacaatggaaactctcaacatccaatttcctaaataaagaaggaaacacaattttaagagttctaaataatggatgtccaagtctacgatgatgaagctagattttttctttattgacaagatcgtgctcagaaagaaaagataaagatgactcatttgatatttcaaggtaatatagtcggattcgttcctcagcaagtccaatcatcttctccaagtcttggtcttgaaatacacagtgagtagggtaaaaagttacattgcaacctaaatcttgtgtaagcttttgtatagagacaagattagtggacaacttggcaatatgaagcacatttctaagtgtgagtgtaggactaatgtggacatctcttgcacccgcgatagtggttaatgaaccattgactgtggcttttttcctactacttggacaagggttatagttgttaaattggtgtgatgaatgagtcatgtgatttgtggcacttgaatctaaaacccaagaattggcaaaggtttcatccaagactttcaatccaatggaaataagaaacttatctgaaagtgccaatgagtaggtatttgaagatttatttcttgaaggtttcttaaggattcctaacaaagctcttaatttttcattctcttcctgattgaatccaccttgttctaggggtttttcttcaattggttaaacaaaggacaagttggtttgcctatatccctttgttgccctccattgtaaccccactctttactagatgtggttggcttgccatgaagtttccaaaaaaatttctcctgtgtatgtctaggcttctggcagtaagtgcactataagttatccttgttttcatggtttgaagctcttgatcgatcagtctttttgttatcaacaatgatagccttttgatcactccctttgttagcaatcatagccaagcctaccatattcggggttcaagcatgtactttcttctgctcgaataatagcgatagtttcattcaaagttggaagctctttgcttagaatttgaactctaatttgatcaaactcaacattgaaaccaactaagaactcatgacttgatttttttcgatataattctttaggattgcagcatcctcatgacattttgtctcaatgcatcaatattgatcaagttattgttgtaggtttttttaacatattagcagactccatgactgtcttgtttccctgtttcgttgctctagtcttgactttaattttgtacacttgtgttgaatctaatgccttaagagtatgtctggtgaactatatcccaaatgtctctaatagttgttaagaacatacaagtgtcactaatttcaagcgtcattgagttccacaaccatgccataatcattgagtcttgctcaccccaagcatcaagtcaagggtctcctcttcttggtttagttctcaggagatgacttaattttccttttcctttcaaaaaggcctgaacaagttgtgaccattttaaataattttttccattaagcttgtatgctgctagaatattctacaattttcctgtgttgtgactagtaatcactccttcagattgagtggtgataggggtagtctttgatatctcaaactttttttttttcttcttttcttttcttttgggaatataaaatcttagaggagggtaacttaaaaaaaaacttgttactggaaatataaaaggctcttaggtggggggtaacctacaaaaacctcttgtagagcttatggatgtgagatggaaacagccacaacaacgtgttggaggtttgactctcttggcgaccacagaagcaacatcgggccatgatttccgatgatattgacagcataggaatgactgaagtcctgatgagggctctgttgcgcttacaacgtgttcgtgatctttgtttgcagcaatggtgagggtctgtttcgcgatcaatgacgacaacaatggtttttcgctgacgcaaggagattgacgacttttggatgatgcaaagatgaaggcactatgagatgctaaggctgaggctgttcaacctgtgcttgctgtgatggcgtgaaggcaacggtgcgaccttagtggcacaatggtgaggcgaggtaaagacgagggtagcgacactgaaaaagacccgtgtttcgcttcgacacacttgttgcagaaggggccgtgatttaagtaaaacaaacctttgaaagtcaacaatgaaggtcgacattgaactcaacaatgaaggctgaagaaaattcttcttccaatttcatgagcctagggctttgataccatgtagaagagagacggaaggaaagggtgaaatagaaactaaaggaataaaaaagttcacaaaatgaaacttaactaaggcttagcttaaataaaggaatggaatatcatttagaaatgaaaagaaataaaaaatttcctaatataatatgaagactaaaagaaatagaaacttcacaaaataaaacttaacaaaggcttagcttaacataaaattatgtaagttccaagagtaacttaaatcatcattggtgtccaaatcaagtcttgggcatttgaaccagcctttccctacttgtaaatcttccaaggatatttctagcaccttatatcttactagtgaaattcataggcttgtactagttataatggattattggcaaaagtattgcatgtacattttagttggaaattgccaggtcggattgaagccagcagatgacttgctagatattaaagttgaagtagatgataggatcttatcttttgcaaggagtttcagtttaagaagagttaatcttgattcttgttcctaagtggagttgagttcttctcatgtcactttgatgctgtgggtatatcttggctttacaaattcaagtggatgccccaatgtttgagcaaagcagaagttgaaaattttgaggtccacagtttactcatctttcttccaaaattctttccatcaactagatttggtgatgtaggatagtaccaagtgatagaagccatttctggttgcccacaagtacatcttgatatatattttagtatctaggcttgcctcctctattcttgcagattctgcagattctctatctttgttcctccaaccaacctttcatttctttcatctatgtcttccagggagatagtgctggtggccttagtgacttgtattttattttcctctgaaggctcgattacactaagcttgtttgctttttttttttgaatactctttgcaatggcctcatagccttgcaaatgcatatcatacaaggtttttcctagcatcaactaatcaaaagacgtgaatgacctaacacttttgagttaacaatcttactctgtttgcaccccaaatttgaggcatttaaacaatttcacagttttcccgttttgcttttttgcccatctattatccattgaatctgttgaaaaatatgttttacatgttgatgcatctttgatattgtaatacaggttgtttcagataaagaacttatcaggcctaagcaaacccttttgtttagtaaatggttttatcatgttcaaatgaatgagtataaaaataagcatcaactgttatacaatattctcttcatattatgcattttccagtgtattctaatattgccattcctttattagatgctagaaggatgcatgcaagacacttggaatgtaacacatgggatttgactctagaaaggaagacacttgtgtctagttacaaaaataaatgttgggagtcgtattcttttttcccttttccttttcttctgaaaattcttacaaatagaggttgagggagaaaccattcaaatcaacatgggatctgatttaatattatcatatggcttgatatttatttgttgatttgttgatttttggaggttcaaattctatttttgtttgtaaaaaatgttttgcttcatggattgtttattatctacaactacaagattctaactgtattttttgtacttgcatacattagaaactctaactcatctctttgctatctttgtaatgcaggaagtcatttattgctg

SEQ ID NO: 12511 - DNA, 7440 bp, Vitis vinifera
  Intron number 6 from transcript GSVIVT01010208001 (locus G SVIVG01010208001) derived from phytozome v7.0 (chr-ID chr1 ; pos 17456341 to 17463780 reverse strand)
ttggatttgcagacctgacaattggcacgggagaggtaaattatcttattctcaaaaatgtttgtttttctggacaattcgttatgatgattttgggtcatatattcacttctctttttcatttcattccaaaccgagtctctctaccccatgatttgaaagaaccaagttcattgttaggctatattgactatgaccatgaacactccttcaatacatgtagtgtagctcctatcctattgtaaactgtttattcctttccttttttggttggcaagtttaatctttttaaccatgcaaacataatgtgaaatatacaatgcagtgcatgacaaggccctaagggcacatccaaaaaatcgggtgaaaccttccttagaagagtcacaagaaaaaaaaaaaaggataaataaataaataaaagatagaaaaacagatcacaagtaagacataactcacataatatctcttccaaaacacattgaaacctatagaattcagtgagctgtctggagaaccacacaaatcccagaccatggtagtagttccaaagaaacaaggtttgagaatgcccttacaggtcccttaagactgattctggtctccacacaccaccaaccctcccaccccacctctttttttttttttttttttactttttaaccgtaccagaatgatcacaacctaatgactcaaattcctcagttacaaaacaaccattaggattagcatgagtcttggtcacaacttcagctaagcatggtccccatccaaactatggaagtagcaccttaaatttgttgaattatatatataattcaacaaattaggaaaaataagggaggatgagatgagagatattaggcttctctccactagactttctcatatgacaattagtaagcaaaaaattgtgtaagatctcttgagatgagataaattatggacatctacttgaagagctccctcaagttggggcatgcatatagcactcatgcccagcttggcttatgcactctgcaaatcattattcaaaactcccttactatatctggttattgatttccattcttcacaagagatgtccttttgtgttctgacttctccattttctactttgtctaattatgctaaatctaaatctgagctatgcttattgcagttttgttgtcacaatacaatctcattgtattgttgaggcaaccatgaaaagtaccttcaaacaaaacagttcacttgtccatttgccatttctctaaatttggcttctccacttgacttagctacaaaagatagcttttttactttaccaatttactagattaaacaaacctcaatgggtgtcccctcctctaacaagtccctcgtgagggcatatgtagatgtgaagtggctttgtaaaacagtgtatgcccgatctgcattagtaagagccttcattcttatatgtccatgttttctaaataatagatcttacttggctgttgattctcaaagtacttaaaaagattctgtagttaaacccaggtaaaaaccttgctaggagtagacatagagtgactagtcacaccaattgcatattctagatcttgacacgtgtgtgaaagataagtgaagtcctgcaagtcactgagatctttgtatatccactacagggctttaattttcttcacttagataatttagatcaacaaggttatcaacgagctggctcctgttcagtacatatgctgattgtttgtttttagtgtatttcatgtggatagtatttttcttgccctccctgtctaaagttttgggttcaaacccttgaagcttcttcctgtgaattttctgtttagccttaatgggaatttatgtgggtacttttatttcagctccatttaaatttctagtaggttttaagattgttcattacatttatagcggattgccttttctttggattgggatacttctatgtccatttgctgttttgctaattactctgctgatgcaataatcctgtttaatacgagtatagctgttctttgacttgcgaagccctaagatcattcctacttgtttggtttcctcgaattgattatagcgaactataatagtgacttgtcaacaaatttcaatttcataggtggtgtattgcattgattagaacctctagttggatggtattcattcttttttcctacatatgtaaatattgaacacaaagatgaattgaggatgaatttctgattctcattactgcagtgtacatgggatttacaattctatttatagatacaatgatctaaatctatttaaaggaataacctacttataggaaataattcaaattcaaattcaaaaaaatacaatattctaaatatagataatacttctgaattttcagtggtgaatctcgtaattttcagtagtgaatttgaaccaatcttttcacactccccctcaagctggctcgaaaatgtctttcacaccttgcttgcaagttatgctatcaaattgccccttgtgtaaccccttagtaaaaatatttgccaattgctcgattgaaggaatataaggcatgcagatgagtttattgtctaacttctctttgataaagtgttggtcaacttgtacgtgtttagttgtatcatgttgaaccatattatgtgctatattgatcgtggctttattgtcacaatagagcttcataggaatagaacttgttgctttgaggtctttaagtagcttttttagtcacaaaagtttgtaaatcccataaactgctgctccaaattgagctttcacattgtttctggctaccatagtttgcttcttgcttctccaggatgctaggttgcctctaataaatgtacaatagcttgatgtggaccattgatctattatgcttcctgcccaatcaacattgatgtaagtttcaatccaccaacgaccatgattctcaaataataaactcccttagtgagtgcatagattgactcactagactcactgtaaacgctatgttcgaccgggtatgagatagataaagtagtctcctaactaacctttgaaactgctcttgattcaccgccttatatgcatttgttggttgtagcctaagattgggctccattggggtttctactggtttgcaaccaagtaaaccaatctcctcaagtaggtcaagtatatactttcacacaaatatttccttcttagacctcataaactccatgcccaaaaagcatcttagggctccaaggtctttaatttcaaattctcttgcgacgaacttcttcaagacctcgagttcccttgcaacaatgagtatgactatcttatctgtacttgagtacttgtagaacaatgtgtgatcggcttgactctgtcaatatccacactttttgacaaccttagtgaatcgatcaaatcaagctctaggtgattgttttagtctgtagagaaacttctttaatttgaatacttttccagttccaagcacgctttcaaacctggtagtaggtccatgaagacctcctcctctagctctttatttagagaaacattcttcacgtcaagttgatgcattggccaactgaaatttacaacaaaggatagtagtacttgaatcgaattaacttttgcaatagaggcaaagatctcttgatagccaattctataagtctaggggaatcctttggttacaagcctttccttgtacctatcaatgcttccgtttgctcgcatttaattgtaaacacccacttacaacccacaatccttttatctcttggcagttcaacaatttcttgggtaccattcttcttaagagcattcatctctttcatgattgtcatcctccttttagtgtgatccacggcttcttgtatagttttgggcaatgaaatactaaaaagattagaagttaaggtgctataaagtttatggaatgagacatactttgtaataggatgcatagtgcaagaacatgttccctttctaagtgcaatgggaacactaaggtcatgtaaaacactgtttagattactggatttagtaattgaacatgggcttgacaaagagatacttgtttcatccaaaggtccattattcagaggatttgcttgacttattttcggttgtgattctctattctaattatttttccttcaagagtaggtacacaactcactttgagtttgtttttatagcagctctccccctgaattagatataaaggtaaaggttggacagtgggtaaaggcttggtgggtaacatctttaagtgagaattctgtggatcactcggacataggtaagggtcccatcacttccaaaaaggatcttccctcctagtactctacccttgaagatgatttttagtgaagtaaggttggttttcgaaaagtgtcacatccatacaacaaatttctttgaaataggattataacaattgtaccttttatgttgaggagaatacctaacaagtacacacttttctactcgaggattgagtttagaacagtttagttcatggatgtggacaaacagaatgcaacctaaggtttttagaggtaaagaagtaaagatgcgaatatatgggaagatggatagtaatctttttagaggtgtgtcaaatttcaagactctggtgggaatcctattgattaagttaggtgttgtgagagcaacctcattgcacaagtattttggaacctccatagtgaacattatagaactagccacctcgagtaaatgacgattgtctcttagctatacctttttgctatggagtatcagagcatgtggattagtggataatgcccttttctttaaagtacctacaaagaatagagttgaaatattccttcccattgtcaattcctaaagacttgtattttagtgtggagttgggtttcaatcatggaatagaactctatgaacactccttcgacatcagatttttcttttaagatatacacttggttcttgctatgtttgtgacttgagaaggtccccatacattaatgtgaattaagtaaaatggttaggattcttgatgaggatgaagcaaaaaatgaacataatgatgtttagataaccgacaaactttgcattgaaatatcaaaggattcaaatttttgaacagagttggaaataattgtttcaaataagaaaaactaggatgacctaacttattgtgccataactttatttcatctttaacaagaataaaaataacactactactcacagcttgagcttgtctacctttgagaaagttgttatcaaaataatagagtccatttgtcattctagcatggccaatcatcctccccgaatgctggtgttggaattcacaatgagagtcacaaaattttgcaaaatagttagaatctttggttattttgctaactgaaaaaagattgcaagaaagattaggaacatggagaacaaatttgagaatcagattttcaaagataattatagaacctttccttgcaatcggagacaagctgcctgctgccttatgcaattctaatttttaagtgactagaacatagagaataagtggtaagtaagtgtgactgactagtcatgtgatcagatgcaccagggtcaatgatccatggtgctgaatttagggaactagtgaatgcactagctctttgagccaaagacctggagggtacacctgaaagttggacttgattgatcattttgtagagatgctcgggctgtttattcctgaaaggaatctcggttttctgttgtagcttgcattccactgccattcttttctccaggttttctttccttccaatttgctggttttccattcaatttccagcactttcttttatgtgccaaggcctgtcgcaataatcacaccaggctttaggattttcatcaggattcttcaatatctgagttctaggtctctgattgtatgctgctgcaatggtttttttggctggtgcaacagattaagtgctgaattctctctgttggacaaatattttcccatcatcactcctttgcgactttcttctcatctaacctcagttaatgctttagtgactaagggtagtggctcttttcctagaaaacgacctctcacttcattcaaatcattcaagcaggctaaaaattccataacactgtcctccatgatcctctgaaattgagcactgtcttcagcacttgaccattcaaggacatataataggtcaagttcttgccacaaacttctcaatatattgtaataaattgttacaaacataatcccttgtgttgtatttctgatcttcgtttttaactgataaacttgaggaattgctcaaatctgagtgtcgcactcattgcatcccatggttgtttggtagtgctgagatacatctatgtttggctgatctcagatttcatagagttaacaagccatgataaaatcatagaattctttgcatcccagacatggtacacaggatcatcggattttggggcctatctgatctttgtttttgactgataaacttgaggaattgctcaaatctgagtgtctcactcattgcatcccatagttgtttggtagtgctgagatacatatatgtttggcggatctcatcatagagttaacaagccatgataaaatcatagaattctttgcatcccaaacatggtacacaagatcatcggattttggggcctattttgtattggtcaaagagtcgatcttaccccttcctctaatgatcaacttcatggattgtgaccaccgtaagaagttccgtccattcagtcgatgagtagtgatatgcaggattggactttcaatagccctagttgatgaaatatgaccattctgagaagtctgaatattagaggaatcccttgaggtttcattagaagatgctccatacattataaagaaatggttcaaggaagataagaattaaagatgaatatattgcttctacaaatttgctacataaaccagattgagagaaaaaaaaaagaacaagaagcctggaaaataaacagattaaaaaaacagaaaaaaatctggtataggaccagataaccgctgaatgttttttattttgtgagtggtcaaccaaaacactcaaaagtctgttctagggttttaggtggctctgattccatgaacacaaagatgaattgagaatgaatttctgattctcattactgctgtgtacacagggtttacaatcctatttattgatacaatgatctaaatatacttaagggaataacctttttacaagaaatatttcaaattcaaattcaaagaatacaatattctaaatatgaataatactttctaattttcaatggtgaatcggaatcaacctttccatgtatatattttgtaaaaaaaaattcaatacttttgcaggttgatctgggatctcttaaagatactgtaccaac

SEQ ID NO: 12512 - DNA, 11930 bp, Vitis vinifera
  Intron number 3 from transcript GSVIVT01034092001 (locus G SVIVG01034092001) derived from phytozome v7.0 (chr-ID chr8 ; pos 15204825 to 15216754)
agcaaaccccttgccccatttttcgtaagtaaattttattcgttgcttctgcattgcttctttttctggcatgcgattttggtgttaaagaataattagagatttacaggctgggagttggaggttaactttgttttcatatttaggaattttttcttaattatgttttgtgaaccctggataaagcaaaataagggtcgaaatgatggtaccttcttcattttgatatattctatttattctttgtttgattgtggctgcaaatttagttcctgttgcttataatttctactgttaaagtgtaatggtttatgtttgtgttgggttcatgttatatcaagtaagatttcaatctgaatagaattcatagaggacctgtttttgatactcgagtcaaaatcttctgacataaacatgatccagttacttgagtgatacaaacatgatctatttacatggacgtcatgaacataacttgcttatgcggatgacatgaacatgatttatttatgccaatgacatgaacataaataattttttcgggtgacacaaactctaagcatttacatgggtaacatgatagaactcctatatcctgtttaataaatacgttaggttgagttaggtcaagatgtggcaaattcagaccacataagctgttaatatatgtgatcaattgagaaggttataatcaatttaacataatcctatttaattattaataaggctgtgtttggttcctgaaaaatattaagaaaaaaaatgattttcccatgtttagtttcaacatgaaaaatacgatagaaattaaaatatacttttgtgttgataggcaactagtaaaatataattaaaattagttgcaaacttatgattttttaaattatgtaatctttatataaaaaatttaaaataagtaaaatgattttgaagtaacatataaaaataatttattgactttaaatctacttttttttttgttatctttttctttccttttaatttgcctctctatcttctttccctctaattttttgagaatcaaatgtagcctaaatctatataaattgcaatcaaaattgtttttcaattgtacttattcttacttaccttaatattatattgtcatttctcattaaaaaaaaattgtttttcaattaatttttgtaaaaatgtcacaaaataaatttatattattgttattttttgataggcaaacaaggatatatattaatgaagaaagcgcctagagagagtgcaacaaagtacgcatgatgtatacaattagggccaaaaataggcaagcaaaaaggaagagagaacacaaaaaatagccttcctcactttacataaaataaatgtattttattaataacaatgtttttttttcaataattttaataagtatacaaaattatatgaattctaaagggattgtaaaaaggccataattgtgtcaacatgatatgataattaaatgagtcatatagggtgaagttgtaattctgtcaattatatatgattaattgaatcaaacaaaatgagttgaagaggttgaattcttaatccaaatatgactttatttaataaatgggttaggtaggttaaaatgattactaaacaaacatggttaagttcaatctaacctgctaatttatctcattttcagtatgtttgtgggtcaatgttaaaaattgttggctctacctaagacccttgatgggcatgagcatttttgcattgaatttggttatcctctaattgcttgtatggaattggaattagaagctccaaatacactttgctgtttggttgatttatatgcctaatttggaattagatttaaattcattaggtcaaaaaccatggtattagcttgattttcaaattttatgtaattggaaaatgccaaatcaagtccctaagaattcaatgcggttacggaaattattgacataattcttcattgataggtaattgaatatattaaagagttgttaatataagaaggcataactcaactatgtgaacaaattgtttacataaattttgatctctttagtgcaaaatatgggtggaagagagatttcgtaaaagactctcaatgtggaaaagtcgatacatgtctaaaggggggagacttatgttgatcaagagtactttgtctagcattcacatatatttttttgtctttatttaatattccaaggaaagtcaaactaaggttggagaaaatttaaagagatttcctctagggggtggtgtgttggagaaaaagatgtatcttgtgaagtggtcaacaatgcatatggagaagagcaaggggttttaggtgttagacatcttgctttgttgaagcactttatgctaatggaattgatagtatccaattgaaagaggagccttttggaatgaggccattagtggaaatatgaggaggaagaccaaggatggtgctcttgtgaagtaagagtggaataacttgtactgtagttcttcatttgtggtgggtaatgacaggaggatgaagttttggaaggataaatggtgtggggatgaatcgtcatatgttttattcccttatttatatttcttaactgtttcaaaagaggcatgagttgcggatttatgggttaagacaaggggagataggtcattggaactcctatttctttaaacctttaaatgattgggaagtggacaatgtagaagatttatcttcaagattgcaaggaggggttgttgatactataggggaagataaggtggtccagatgaacttgagaaacaacatgttcttagttaagtatgtatatgctactttggaactagcaggatcggtttcctttccaaatagcataatttggaactcttgggtgctttctaaagttaggttttttgcatgcgagcctagtttgagaaaggttttgataatagatcagtttcaaaaaaagaatgtggtctttggttaatagatgtttttttgtaaagatgaggaagaatccacatatcacatcctccttcattaagccaaggttagggtcctttggtaattgttgtttgctctttttggtatccaatgggtgcaagttgcaaccgttaaggaggttctcctagggtggcatagcccctttgtgggtaaaagacttcaagaaggtttgaagagcaactcctttgtgcatctcttggatggtaaggaaggaaagtaatcaaaggttgtttgataatgaggagcatttggatcaatatttgaagaactattttcttagaaatttgttttcatgggtgaagatgtacatagagttaggttgtatgtctttattcaattttgtagagtggttgggttcttgttaaaatagggggtcgttgtttgtgttctctcttgttcgatgtgcttttaggtgctatttgtatatgtctcgtgtactttggtgcttcatatattgacgcattttaatatatttgcattttttgcttatatttttttttaataaaaaaaaaaagagcttggcagcttgattgttgacttgaagtcaaagttacttggttaactttagatctgatttggagaaagctcaagtattgttattgaggttgagttgttgcccttgcttgagatatgaaagtagcttcttctttggcttttaactactttgtagtagaaggctcaactactgcttttttcctaggttttcctcaagaaaaaaaggaaaacaaaaaaataatagaggtcatgggaagtggaaacattggttgcataaaattgtagatctttctttgtagatagcttattcttttagatggatgccagacctggccaatcaaactgctgatatgctggctaagtgaggtgctttcttgttagtggtgtttgttagggagttcttagctccctcaactttgtgctttggttttagggtcaaactctagctattttttgtccttgtatctagcatttcagttgtttttgttggttttctttcttgaactgcttgtctttcatgtttctttttgatctttaatctatgaattttgttgtttcttgtcaaaacaaaatcatagaaaacttgaaaaagctatttaaagctttgggcataatggaacaaaacttgaaattaagacttaggggttgtaggggttgtttgtttttccttttttaaggcttaaagcaagttgctttaagatttaagataaacgtgaagaattttattttttccattaaaacaaaattgtcttggaaaaagtgataagttaaaaaacaaactatttttttttttttgatagataaacaaccaaatatattagaaaaggctaaaaagccacacgtatacagggagtatacttaacagccctacacaaggctagaaaaaacaaaaaaggggaaaaaaaccccacccatcctcacccaccctcaagtggttccaagccactccaaaaaacctaaaagagagtatgtttcctcaccattgtacaccctagcccaactccacaaattacatacaaaagaattcttgaatttctgaatatctaaagaccctttcctgaaagctaacctattcctttccttccaaaccgtccaaaatatgcacaccggaatggaattccatatcttctttctttttttccccacaaaagaacccttccaactaagtaacacctctataactgactctgggaacacccattgaactccaaaaatggcaagggtaatctcccaaatagttttagtcactgtacaatgtaagaggatgtgattcgcactttcctcttcatagctgcataggaagcaccggtttgggagctgccacccccttctctgaagcttatccaaagtaaggattttcccccacgaggcttcccaagcaaaaaaagacacttttgttggaaccttatccatccaaatgcgcctatacgggaaaaccccggctgaagagccgctcaaaattttgtaggcccccttagccccataaactccattgccttcccacttccatctcactgagtcctcttcaagagaagtcctgaagtccttcaacagattcagcatatctcctatctgctccatctcccagtcattgaggtctctagccaacctgagattccaacctccttgatccatgctagagtcccacacttcacagattttggcattcttgtgacccgccaaggtaaacaattgcggataagattgagcaagcgcctcattgtcacaccacttatccatccagaacaaaactctattccccttcccaaccttaaaatcaatgttctcccagcaccaatccacctccttcatgatgtccttccacaaccccaccccaaaaggcccacacacttcctttgtcttccacccacatccctcttgaccgtatttcacccctatcacagttttccaaaggttatccttctcataggcatatctctaaacccattttcccaacaaggctttgttcaacaagtctatctttcggatgcctaaaccaccctcctccttagggctgcaaaccaccttccaattaatcaagtgagctttcccttccaagcttcctcccccccataagaagtctctttgaattctttcaatcctttttgccacagccttaggaatgcgaataaaggaaagaagatagatgggtatgctggccaaagtgctcttgatgagagtaattcttccccccttcgaaatatactgccttttccactgggctaatcttcttctcattctctcttccaccccatcccaagaagaagaggttttatggtgggctccaaggggcagccccaagtaaacagtgggtaaagcccccaatctgcatcctagctcagccggcaactcctccagctcatccacttcccccaccggaattaggacactcttagccaggttaattttgaggccggaggtcgcctcaaaccacgccaatatccagctaagattggcaagttgctctcttctagcttcgcaaaagatgagagtgtcgtcagcgaaaagcagatgagagacagccagctcttcccctcctctccccctcagtctacagcctgaaatgaagccaccctcaccagcccgtcttataagagtgctaagcacctccatacccaagacaaagaggtaaggagagagggggtctccttgcctcaacccctttgaattcgaaaagaacccagctggaaccccattgattaatatggagaatttggcagtagaaatacaccaccacatccaatccctccagcgagacccaaagcccatcttccgaagaaccttcataagaaacttccagttgatgctatcataggctttttcaatgtccaacttgcaaattaaccctttctcttttcttttcttccaataatctatcacctcattagctactaaagaagcatccaaaatctgtctctcactcacaaaggcattttggtcaacagaaaccaccctatccagcactttctttagcctattggctaggactttggctaagagtttatacaaacccccaagcaagctgattggcctgaagtccctcaagtcttcagctcctcctttcttaggaataaggaccaaaaaagtagtattgagagacttagcaaaggacccatgctcaaagaactccttaaacatttccaccacctcctccttcacaaaatcccaacactcttgccaaaaggccactgaaaagccatccgggccaggagctttgtcaccccccatctccatcaaagcagaatggatttcctccacagagaaaggcacctccagaccatcagcctccctagaactaatttgtttgaactgcagcccctcaatatccgctctccacccttgctcttctgagagtaatttctggaattcgttcactatcccgtccctcacctcttgatcctcggtcaacagctccccattaatcataatcctgtccatggagttattcctactgtgggcatttgccatacggtggaaataacccgtattcctatccccttccttaagccacagctccctagatttctgcctccaatgaacctcttccaaaagcacccaatgatggaaggcatccttggcttgttttttctgctcagcttcagctaaagtcaaggtcctttcactctccactccatcccaatactccaactgctggagggcagaatttttgttgacttccagccttccaaacacctccctattccaaactttaatgttgtgcttcaaaaccttcatcttataggccaatctgaaactggcccttcctctcacctcaatcccttgccaccatccccggagaagatcaatgaacccgtccactttcagccacatattctcgaatctaaacggggtgggtcctctccttatccccccacccatcagcaagataggaaaatgatcggaagtgggtctatgcattctgcattgggcaaccccacaaaacatatctagccactgttgagtcaccaaaaacctatctagtctagcccatgattgattattcctgcccccattccaagtggcaatacccctttgcaattggagatcaatgagttctaaatcgtcaactatttgggcaaaacttctcatggcaccagacaaccttccctgtctgctcctttcccgctgggataatatgacattgaagtccccccctaagcaccagggatcttcccacaagcctctgatcgcccctagctcttcccacagacaatctctatcctctttggagaaaggcccatacacccctgtaaagatctaggacatcccatcttccacattcctaaacctacaggagactgagaaccttcctacctccgtctccatcacctccaaagaccttttgtcccaacacaccagaatccctcccgcagagcccaaggcgtctaaagccacccaattagaccaccttccagaacccaaacttcttaccaaaccctccgacaaagtttgaaatttggtctcctgaatacaaaacaggtccaccctctgacttcttataactgccttaataacccttcttttggagctatcattggctccacgaacattccagctaatgattcttagcttcatttacttccgtaatttggcacccccttactttcacttcaccattttgcttttcccccttttcatagttgatggaacactccaatctcttcaattctctctcaaatttggatttctccagaaaggttttgctgtggacactttcccttcttttacgaattttcaccaagaattccataatgtccttttccagaccttctgttgaaaaccccaaaaatttactaaacttggccagatcactcttctcccagcttagctcccctcctgccttattaccaattgacactatttgatcggagtccaacccttttccaataacatcaattctgtccttgctagcctccaccaaatcccagcattcgacaggctcactcacaggtggctccatgcccatgagcatttgaagcggattctcatcctcgtcacgcttctctccgagtccagaaaggtcgcaatactcccccactggagtccgaccaaaaaaagaaagaggggaagagggaagcacagggatcaagcaatcggactggaccataacatacctcgacgcttcctccaccagggcaaggtcagtcttcgatcgctctaagggggggagctctgcctcacccagccatcgcatcccatccttctcccaaaccagggacatatcagagagtgggcttcccgtgtggtttgggccgcatctctgggccacagcaaggtggtcactgggctccttctcagctaccagtcccgcctccaccgtgggcctccaagcctcgatccgtctattttcctttggcccaagagaggccacagaggaggaggactgattaaagccctcagtcccacaaggcctcatcagagagcccagcccaaactgtccactctgcacgctctctgttccctggggctttaactgcagcccataaggcccacgagagcactccatggggcgccccgacccggaggtcagtcttcgcgtcccatccgccgactgcatctgcacctcgggcctcgaaccccctttggcctccttcacgcgcttgccctcgcgtgaatgggcctcaccctctacctcaccctctgatacgacagatttccctttccctcccgtcggcgacacgctcagcgtcggcctggtctcccaccacagggttagggagtaacacatatttcccacccatatttccaccatattaggagtcttctcctcgatcctccttacccggattcttgcccattgaagctcctccatcctctctgttttaacatccatgcccaaaaaacccccgcatgcctctcctaccttgctcaagatgtcccgattccatagagagatgggaagacccactatccttacccatgcctctcttactttctcttcctccattaagcatcccgaccttggggtccatttctccagtcgaatgacgaagcctccaaccgaaatttccgccatatctagggctttctcagcttctgataacagcccaaattccaacaatgccttgccatcttccaatttggccaagcctaagttgccctttagcccccataattttgacatttgggtcccccaacttcttaaatcttccccccctcctctcgttgagttccagcacccgacaagacagtgggctagcttctccaaattcacacataatgcattgttgtccacacgcaccctagccacttcttctccgatgctgtggttctgctttaccacctccgcaaaggactttcccctcaacggtgaccaaaaaatttccttatccttctgtctcacttgccggcctgagatagactccatctcacgcagcgcctccaccaagagagaccatcccccttttgctcctctgctcttgggaacaaagatattgaacctctttttttcccgatctaaaacccccagcttaaggaaacatccccctttgttttcgccgcgctctaaagagaaaaatctcccattctcttgccagcgtttctcccaatggccagtcctcgtgtcctttgagcagaaaaccaggccttcaatgagcggccccaaacttgccgaccctagcttaatccaagaagagacgcctcctttgctttccgttatgaaaaaaaatgtcctacccttcttcttctctacctcgatctcaaagatttttgacttaaccccaaacctccttttccgaccccctaccttgaggtacccctctgagtccccattcgcgccttcgaaccagctctcttcaccgtctccttcactcactctctctctaggtctttctctctcctccatctattcttgatccgtcaaatgaaaaaaaaacaaactattttaaaaatggtttaagtcttaaagcaacttgcttaacacttaagtcaacaagaagacaaaacaacttaatgcataacactattaagacttaagtttacttgaggtctatttagatttaagacaaaaaaacaaacaccatcttagacaaataaagtgttttggttgctaactagaaatctctcaaaaaggcacatttgcacctaatcacacttgggatgctgtctccaattgaatacttccaaggattctggcaaaggaagtagcttaccccaccctctgttttgcagcctttaagtgttattcaaaacatccctgtgaaaagctgcaccggttagaaattgcatggaaagtacaaaattcctattcctaagccctttaggtatatcccattgatttactgattaccaccacctgcatgctcatgtggaattgccattcacttttatcattgaatgaccattagtgcctctggaaccaccaacaaaactgattcatccatgactatggaacacatggtctagttctgcgtgttgtatcaaagtattgatgtcaattatactgttgaaagcttctctatatgggatatttacactggatgttaatatggggaaaactttgtagtaatgatagaaattactgtgaaaccatgttaacttgaaataaaattatatgagttgtcaatacaaacaataatgcattatgcaacactggaatgaatcaatcaagtcaaaatattaataaaagaattactgcatggaagatatatgatgcatgagataaaatgagtgtatataggatgtatgctaataaggaaccatatggtgactaaaatgatttaaaaatactatgggaaaggcctaaagggaaatatgaatgcaagtcaatattcactagtaccaggtggagagattatggaaatgtatcagggatatttcatgagtttctcccggagaaggctgtgaggaatggaggttggattatcaatgctattgtgaattggagatcctattacaaaggctatgtcccttcatgtttacactatgggctataagaactggaaatattggagatatttagagattttatatatatatatatatatattttgtctttataagctaacagaactttttttttacatattttttttgtctctctcatgcaaaatccgaaacagagttttcagatggttagaactgtaatctttgagtttttactcaggatattagagatcaatagtcatttcacgggaaaaatttattaccctggagtatgactcatctatcatgctcctttccacattttgggacgcattgacggctttccgttttctttttcccttcttattttatacctttatttacgttatttgtatgagagtggatttgcgaatacctaccaagaaactacaacattacatgtcttttctactttttggtaattggtagatgcttatgtaccatgctaagattgttggcaaagatttattcatgtatttattattgttctacctttttaagacaactttttgtgagcctgaattttttactgtggttataggaa

SEQ ID NO: 12513 - DNA, 2771 bp, Vitis vinifera
  Intron number 3 from transcript GSVIVT01026227001 (locus G SVIVG01026227001) derived from phytozome v7.0 (chr-ID chr1 0; pos 14433962 to 14436732 reverse strand)
aagcagtaagattttggtgatttatgctttttctcatttgcagtttgcatgagtctagttaatgcaaaagcgtattaagaccttagctttcagataaaagttaaaatttttctttttttatgacaaaatatctgaaaataaaacttaaattaaaaacagagagtactaaaacatccaaaggctattaagactttagatgaaaaacaaacatggcttctatttgtcttaaatgaaagtgttacttttattttctgagatcattattggataataaggtttatatatgtgtatctgcccttgaggcttggctcaagtggtgaagggttgggctgggtttatgggggttccgggttcaagtcccaatggggacaaaaaaaggaaaaagaaagaaagaaaaaaggtttatacatgtgcatcatgtgccattacagacttacctttatgagagaacatattaacatgctggacagtcagactttatagccaatttatggcataagagatttcttggacacaatttgttataactccttatgtggttaagaaaacacttggtcattaggcccaattttaaaatctcatatatacatacatacacatatacacatatacatatgcatatacatacatatacatatgtatatgtataggtatgtatgtatatatctatgtatgtatatatatgcatctatatgtatatgtatatgtatatgtataggtatgtatgtatatatctatgtatgtatatgcatatatatatatctatgtataatgtagatacatgcatacacatacatacacgatgtccttgcatgtttgaaaacggctgtaaagatctaatgtagcttaactgtagtataattacatggcaattctgattcttgctcatatttaaagagaagcaagctaactttatttgaggcaaatttagtaacatggagctttcttctatttcttttttaagctccaacatcttttgtttctattctatttggtttcatctatatcctacttatttaatacttatttttacaatgagaaaaatcatttagtctcaatctgatgaatcaaggaaaacactaaatacttgatccccttccaaggactatgtgtcaattaagcccagtgcttgaacctgggatatcccgtcattgagcagggatgcctgccagttgagttgaccttacggggcctcatttatttgatacttctatgttcaaagaaaaagacgtttgagaagacttccaagtgttggccttatctcatttattaatgtaccataaaaaatatgattgaaaatagatttataatatttcagaatgcaaggaatgcatataggtgattgctggaccacttctctttctctctcatagttctgcacacggtcctaaataggttttttaatacatgcaaataagcaaacctttcaacaggtgtcttcctctcaatcattttcattgtttgtaaatatgctcctgagaatgtcctcaaaatggttttatgatttttatttttattttatagttgattggttttaagtttagaaattttaatatttccacattttacttgaatatagaaataaaaataaaaataaaaagggtttagttgcccggattttcttcttattagagctaaaagccttgcctaactgttttacctttaaaacattgattgttactggcattgagcacatcccacctgctaggtcattaataagtacatagaatcaccagaagttgtgacaggatgtatcatttggctatgctcttatacaaaattatcgcatgcatatatggcttcacaaatttatgatttcaacaaaagtttgtgacaatccaatagaaaagcatcaatcaatcttgatcccatgttacatataattaggcaaatagtttactaattgaccttatgatctggatggaatgacaatgcatgacaaataacaatcaaccaactatgatgaaccaattaaagaggatgctttcagtttgtatttgaaaaatacaataactggaacctgccttactattgtaatccttccttgcaagagaggaaaagaagccgacctcatctgaaattccaaattataccttagtttccaatgagataatgatgaaagaccttagaaattcctgatttcaaatccctaaggcctgcttgatgtagttttaacttcaactgaagtgctgttctcaactcaaaatagttgtatgaagaagctactttttctgaaacctcttttccaaaagcatttcagtgccaacttcattgagaagagcctttaagcccttatctcttctgctttaaggttctttgatatataacaaaacatgttataaagcacttgcttgtgagggagctttcagacaatcaaaatgctgtgccaaactggtccaaaaatatccttcaaatttatttcttccagtcaaattctttccaaaaatttgttacctcttctaatccttgaaaatttataaaatatgtagaaattgttgggtgtcattcagattaaacgagctttcgtagtttcttactgcaccaatccatttgtggctcacactgatcccatcacaatcttagcagatttagtgaggcaaagtagtggcataaacagttctaattacgttaatgccttgatgacaatatgacattgatgcatttcctatgattcatctcactgttaacaatcatcttatgcaattttcaaatgattatctttattatatgtggtaggttttccaaacaactgcagttggtctggggcaatc

SEQ ID NO: 12514 - DNA, 811 bp, Vitis vinifera
  Intron number 7 from transcript GSVIVT01032023001 (locus G SVIVG01032023001) derived from phytozome v7.0 (chr-ID chr1 3; pos 23458742 to 23459552 reverse strand)
tagtatatcggatactttcagccataaatatccaggtctttctttgggttaatttttaacataaaaattttcggttactataattgagtttaaaatttagagtttaggattcaaaatgcaaggcttattgccatttcacaagtgcttttcttacttttgcaaacctttttaatttttcttggaatgtttggcttatgatttatccattctttttcttttttctccagaaaagtgaatttccatattcatttccatgaaatcacccatggttttgatatctcatatctccctttttttatggaattttttttcctaaaaattaatagattttctaaaataattactttaattgctttattttaaaatcatttgtatcaaagggataagataatccttagaaaaaacctggtacttattaaaaaatttgagtataacttcaattacctctatacttttaaaaggaaaagaaattgaatataaggtgggattgatggagagtatttttatctaaaaatatttatatttcatgtttttaaaaaatggaggatattctttggatgattattttatcctatttaattaaatgatcctttattttatatgtcatctgctacaaaataaaaaacaaaaatcatggtgtcttccaatattatatcatcacatgcacatttaatattgggaaagaaaaaaaaattagacaattatgtttaaattctagtcgacataaataataattttatattgatatctaacaattttaattattttatgagattttttgtgttgactaataatgtaggtaggataattg

SEQ ID NO: 12515 - DNA, 3852 bp, Vitis vinifera
  Intron number 1 from transcript GSVIVT01015464001 (locus G SVIVG01015464001) derived from phytozome v7.0 (chr-ID chr1 1; pos 3938449 to 3942300)
agagtgtctcagaactcccctctccttcactctccgtatggaatctgccacctttattcttttgttttgttttgttttcttttctttatttttgtttttccaaaacacaaccccatttgttttctcatttgcacgctttcatccttaaagctattctcaaagctctctcctttttttcccttgtttaaagctccttttcttaaaggcagtgagtgtttctgctgaatatttagaaagtatgattattttataacacactgatagcatttccagtcatgaatctcgactcccaacaatccttataccctgcatatttttgcttcgttccaatacattcttacttcgcatcaacatcattcaggactcgggaagcaggactcagccatttctccacctgttgtttgcagatattcttcaactgcttttgtgagttcttatttttgggctctgctgttgcattgtttcttgttttctaaaaacgttctactcatttcctgaaagcaaatctttgaatcttgtagttgccatgtctgttctttcttttttggcgttttgatcggccatagatcttctctttaaaagctcaattctcgtacatttcgcaatttagtgtttggggtcgtttcaatgatcttcatccgatctcttaccttaatatctagctataaaaagcagtctaactagtacattggtagcataacccagtcatgaatcatcatacatgtggcaccctttcagcttcaaagcttgtgatctctgagttgtagccgcattacagtcaagatctagcccacccacagtctacagtagctgtagttgttgcactgaccccatcctttattacaacctgttatgttaatataatgcgatattgtttatggggttggttgcagaatctgggagtttcagttaatgggtaggccaaaagaagagcgcattaaaggcttagcagagagagtgttaatgttgccgtgataaatgatcagcagctagctagcggctctctgaagaaagcgtaaagcaaaaggtttgtttcagaccccctcgtcttcttaactgtggtgctcagccatggggtcggcgtttttcagaagtgctttaaagcaactctcactttctctctcctccctctctaaatatctctgtcttatgattgctatggttgttgtttggtgtttggcgtttcgctctcaaccatatcttgtgcagagaagaattatggattattcttttcttcttcttcttttgcatttatcactcacttacagcccctgtagccacacgtgattgaggttttggatgggtgggtatgacttttgggtttcgtgactctgtctttctttgatggttactgggagctctcatttttgaccttttgttttcggcatttttcacttttgtgatccatgatgctgctctcatgcttcctgtttttggggtctgtcttatcccatatcctcttttcccatttggtaattccttgtatctgtatcactacaagcttatttttccctctccagatgtccaacttactgcccaatggcttaaatcaaatatatatgtttgtcatttacctaagccttaaagttccctaaagatcaagttgtattaatttgctcatacttccattatggcagttgaacctttttaacttggaacttaaaagtagtagtcaaaatgggattaattcattttcaaataattttcagttactattttctcccccctcgtgtagctgacaagaaattaaaattcttcagttgcatgccattgttagagaacgaaactgctcgatctttgtatgattatgatgctacccagtttcttctttttatcggtgaatgaatctagagagatgtactgggtaatcctgattcgtaaaatatagttatctcaagcctctagagagagtggctgcactgaaactatcaaacacagtataatgtgacccttctcctcaagatttgtgcaataagatgcttaactctgcttcttatcaatcgtcatatcatctctctgcttgttttttttttttttttttaactgaaagtgttgagtagtttaatataaatacatcatgtgttgcacatacaactccactgcatagacccatgctgcatgtcagaatcttaggaaaaatatcattcattttgtaaagactaaagagtttgtcataattttgttatttagagatgtttttaattcttatttttaaattagttttgaaattttaaagtagcattttgttatatttttaaaattaatccatttttaaaataaaagaataaggagtatacataaatctcccactgtgtggtactgtctcgagtccagtcgcctttcatgatgaggtggtaaaatccagtgcagtgaggatgagagggggataaggtggagcttgcgtgttgaaaccagactaggggtcaagggtacgtggttccaggttttaagagccagtgtctcccgcgaaaccaacttggacctataaaatggtataaagaagtcgccttgaggatcaaagcataggatattcctggggatgcaaagtggaatccttggaccagtgaacagtccctttctggtttgaccaaaacccatccgggttcactggaatgatgggcctgattgtgggttgatgtgttgagatcaacaatcaacatcccatggttcatgtgcctagtgctttcccgttatgcatttctcttcttagctcagtcctcaggataggagaaaaggtatcaggatttactatagaggtacaaaggtactgacatctggagaaacaaaagcaagttgggcgcattgtgtctggttactagagaacaagaaaaactatagactgatcatgattcagagctgcaattgtggcattaaaggttggaagtattgaatgagtgatcaacatccaaacgcacaggccgacgtgatatgctttgggggctgatataccctacttcttgtattgtctacatctgttttttgtcaccctggtagctatgctttgggatgagttaaagctccttttgtgtctgctcaagaaggattaaatcttccttacaacctgtccctacaaagaagttaggaagatccagtgtccagtgatccaactccttcactggaccacgccttcaatgggttcgtccactgggaataaccatgcagcaataaatttagggtccctccatcacagtggttttctcccctaggaaccaaatcccaaattccatgccttttagccattgaaaatcaatttaatatctgagttttgtctatccacaggagacaaagttatggttaagttagaatctgagatggatattaattttaaatccaggctttgcagtagagacaaaccaaattggcagttttttcttcttaatttaaattgagatggataatttatattgtaggtttgtgttggtatggctctagtgttgaatacagtgggtggagtccaagatggccgaaggggtcctacttctgcatgtttgcatgcacgtctctaagtagcttactttctgctcaaaaactttttcagagaataacagcgctttgaagaaaaacactctgcggatttgatgcacttctgttccttttccttctttttagcctgcaacggttacaatgcttcatgtctttccaaaatttgtatcttctctgaggatacagatacgcccttcagtttctcagagaaaacgtgcaaaatgttaagccattacctttcgaccccgcccttttgagctcttagtttgtcatctctctctagatatagataccagatgtacacacaaccattgtttgcactggttatgaaacgcttcaaatgtgtaaacgaattttactatgacagaa

SEQ ID NO: 12516 - DNA, 1166 bp, Vitis vinifera
  Intron number 7 from transcript GSVIVT01026447001 (locus G SVIVG01026447001) derived from phytozome v7.0 (chr-ID chr4 ; pos 23550762 to 23551927 reverse strand)
ttactgatatagtaaaccttcttctgggaagtagtaattgcttcaagaacttatcttaattgtctgaattccgaactctcaaattttaattgttgtagatttagtgagatctaggtaatttattgaacaaatgaggctgtgtagtcttgacctgaactctcaaatcctcattaattgaaagattttcaagaaagatttacgaagttcttaatggattactgatgatttaagaattactttgtgcacccctattttggctctttttaatatattgctttccttgcttatcaaaaaagaaacatgttatagggcaagcaaaaaaatatagaaagatactaaaggcataggagaacatattgccttttatcaatatcataaatatgtaaatagcagagaagaaccaagttaacaacttggcaaaagatgagtcttaatgcagataaaatctgaaaagtaaaattcattgatttgagaagtattattttggtgtttgtagttccaactagtttgctaataaatgctattattctaaaactttccattagtccgtagccaaaatgctaaaagggaaactatgagtattacttaagtgtaactatgtattttttgtggacagctatattgcatcagttccagtgtgggagtcgggtttgggtgtctgtcaaactttgatccttcatatgaacaaattttaagatacagaagctcagctaaaagggtctcaataatgggtgtggacatttgggtacatcataatttgtgaaaaatgtatcatgtcatatgatgtatcttgtgtcataattatttttagcaatcatggcactaactactatgcaattgtatacgcacatacatatctatgcttgttatggcatttttgcagtctaatattttgacaatctcacaaagtttacctcttaaataaaccatctaaacaatagttgggtaactaatattacttgtatgcatatgcatatctatgcttgttaagacattttgcagtctaatactttgacaatctcatgaagtttacctcttaataaaccatctaaacagtagttagattactaatatttatttgtctatgtgggtcatttatatctgtaataaaactattctgtccatttactgcatttcagccttggttcttttcttcctggtataga

SEQ ID NO: 12517 - DNA, 17540 bp, Vitis vinifera
  Intron number 6 from transcript GSVIVT01029899001 (locus G SVIVG01029899001) derived from phytozome v7.0 (chr-ID chr8 ; pos 1186865 to 1204404)
aatcaaagctgggacttgttcgcgctcagttgcaggtaagatttactatcttctttttgaagtccctataagttacttctgtttagggataatccttggctaagttttctgaattcctagaagttactgctgtttaggaactaggtttgttccatgtgcaatgcacgtggatagttaggtaacaaagttaatattatatcattttttaatgatttaataaaacaatttaaaaagtaatttagtaaaaaatgaaataaattttttaaacctttaagtatctatgtttaaaaaaatattgtagcgttgtgaaagctctacgttgataaaaaatctatatattaaattaaaagcaattaattatttttttattatttaataaacatgcatacatttattttacgagttcgtcgtgagtatgaccttattaaataggatttgtttgacaagatttttccttaaaattttaagaaataaaaaaaaatattaatcctgtttaaataggatttcttagacacaatatttcttgaacttttataaaactaaaataataattctatttggatgagatttctaactcttatcaaattaaaataagaagaaattatacttcaatcacaatcttctacaaaaaagcattaaagctaggtatggaagtaggggcatttataaacaccaaaaaaaagggtaaacctcaattttatgacacatgctataattagaaaataaccgagtcttaaattttaaaaaaataaacttaaattttaaattcaagtaatgatttgaatttcgaaatcaatctagctttatctataatcctatataaataaagaaattaattgtggaaaaaaagaaagaaaaaaggaaagaaaaggggaaaggagttggatagaattttcgtagttttgctatattcacgtaggagatggaataaatattctttgttctaaagaatatcttagaagagtgtacccatattttatctcttttaaagtgttctttgttgacatttccttattctttaatatttgtatttgataaatattaatttccatttttattttaactacaataaaaatggaaaaggggatatgaaaggaccaaccccatgtgccctgacactctcccacatggtgtatggttacagtccaatgtaaaaaaggggtgcaagtgatgtgggcagagggggagaggtgtctattattggagtagggaaagggggttggaatggggttataggaatgccattcttaatcagtcaatcagtgaacaataccttacggtttgtgttgcattaaatgaaggaatgacaggttgataaatatttgaagaaaataaggataaaaaagtcacaacaaaagtgcatcttgacttttattatatagtatagatacttggctgagtttttattcttcaaatatacttccatttgctatcaagtcataaagaagattgcatgaaaagggactatgaaatggcatgctttggtgcaataggttgttacagacagacaaccattagttcttgttacatctagcactgccacccagttggattggaggtcaattcaaacccaacccaacctggtcaggcctaactaaggctgtccaattgtgtggtatggggttgtatgagaaaaagcatcacttttactgcattcttttaacacctgcttcatgacaagttgtaattggatgccaagaggcttttgtatttaaggtgcatgaactctgataggtatctaatggagatttattattgaatttcaataatttcaagaaacaagagacctaactgatactcagatagctattcgagaggctatcactctcctaccagacccacacaatatccaaccctggaattccctccttttcctattttaaaccctcccagccctatccagattgctcccagcccgtatccagattgtgacctagcctatgctaaggctgttacaactaactgccaggtggcagtacattcctcttcccttttctagtatacacataacgtatgggaggcctatcattacccccctcaatgagagacaccttgttctcaaggtggaagtcaggaaagtgctctttaattgtgttggctgattcccaagaagcttcaaactgaggaattcctttccactgaataagtacttcaatattaggctgattgttattgggagactggcgaatatctaagacctgatcaggctccacctgccattccaaatcatcaacaagaacaggggaaagtggctgacataaatcagctgaaccaagagcccgcttgagctgtgaaacatgaaacactggatgaatagttgccgaagaaggaagctctaacttgtacaccattggaccaatttgctgcaccactttgtaagggccaaaatatcgtggggagagcttctcattgggtcgcttggcaagggaacgaagacgatatggatgaagttttatataaacaaaatccccaacttcaaattgaactgcatgacgatgggcatctgcagatgacttcattttggattgtgcacagcagagatggtccttcagttcatttcaaattagatcacgctcttgcaataactgatccattgccagaacagaggtggaatctgatccataacgtagtaatggtggtgggtctcgcccgtaaattgtgcccatgggagccatgtagactaacgtctgggcttgttatatgaaaaacatcgaaggtatgtctccacacaatggttgaccacttccgtttgtccatccgtttgaggatgatatgtagtactatggcaaagagaagtaccctgcaatcgaaatagctccgtccaaaatcgggaagatttgtggtggggggaccaacctttgggaacccaatatccaagactatttagagtagtcttggataaaaacatacctatttcttcagttctcggtcctactcgtcctttctcttggaatttaaatttccgtcgtaacctgtcagattctgagatagaggacttagaaggcctcatgcggtctctcgatggattgcatttatctccttcggttccagatgtcaaattttggcccttatcttcttcagggcttttttcaattaaatccttctttctagctttatcccaattttcttgatctcctcaggttttcccttctaagttcgtttgaaattctcaaattcctttcaaagtgaagtccttcgtctggttagtggcacacaagaaggtgaatactaatgacatgctacaagtgagaagaccctacaaagcccttagtcctgatatttgtattctgtgcatgaagcatggggaatgagcagatcatatttttcttcattgctccttgacgattgggttgtggcacaggttatttcagttagctaagatggattgggtccccctgaggagcatctttgacatgatgtccatcaaatttaatggatttggttcttctaagagggggatagccttgtggcaagctgcaagcatcgctcttattcggattgtgtggtgggaaagaagtgcgaggatttttgaggataaagcaaggaattcagagtatctttgggactctattgttttccttgcttctcgttgggctttttgttccaaggtttttaaggggacttcccttaatgtgatacaacttgattggatagcggtgtgtactccataaggagtggtccttttagagtgttcgcttgtttttcaatgtaatttattgtagtttagctttctttggcgggaggattcctcatccttctttttgtacttctttttatctatcaataaatctatgtgatgtttccaataaaaaaaaaaattgactaagaaatactttgtcacgatcactaacaatggaacggggaattccatgtaatttgacaacatcccgaacaaagacaacaaccatcgtttgagccgtgaaaggatgcttgagcagtgaaaagtgagtatatttgctcaatcgatccacaacaactaaaatggagttataaccctcagacttaggaagcccctcaataaagtctagcgtcacatcatcccatattttttttctggaataggcagtggttgtagtaatccagcaggtgacaaagttagggccttattttgttgacatactagacatttttccacaaactctttgatgtcattcttcatgccaacccaaaaaaaatcttgtgtgagtcatttgtaagtccgcaagaacccggaatgccctccaaccacactagcatggccctcttgaagaagtgttggaacaaagggtgaggccttgggaagaactaggcgccccttatagaggagaacgccatggtccaaagaataccgaggataagcatccggatcaaccaacagcctctgctgaatcttagcaaggtgtgggtcaacttcaacttgtgaactgatcaacgaagtgtctaagcgactggggtccatgagggcagctagctccatagaaatggggatgcgagataaggcgtcagctgctttattctccaatccaggccgaaattgaatttcaaaattatacccaaacagctttgcgacccacttttggtacgactcattcaccactctttgctctagtagaaacttcaaactactttgatccgttcgcacaataaagtggcgaccaagtaggtagtgacgccacttctgaattgctaagacaatagccattaactctctttcatatatggacttttgtcgctcccgtgctaagaggacttggctgaaataagctattggtctattactttgcatcaaaacgacacccaaaccatacctcgaggcatccgcctctataatgaaaggttgactgaagttgggcaaagccaaaacatgagttgttgtcatagctgttttcaattttcagaaagccgcttcagcttctaggctccaattaaaagcgtcttttttgagttgctgagtgaggggccaagaaatagctccatatcccttgacaaatcaacggtagtatctagtcaatctgagaaatcctcgtaattctttaagggatttgggtgtaggccactctaccatggctgaaatcttgttcggatcagcagcaatccccttggcggaaaccaaatggcccaagtattctagctgtggtttagcaaagagacatttctttccattgacgtgcagttggtggttcgctagaatggacaacatactttgcaaatgatcacaatgccccttcaagtccttactgtaaaccaatatgtcataaaaaaatacgagcacaaatttccgaaggtgtggccgaaatatactgttcattaatgattgaaaagttgctggtgcattggttagcccaaaaggcatcaccaagaactcgtggtgaccttcatgggtgcgaaatgccgttttgtggatatcttgttgtcggactcgaatttggtggtagcccgattagaggtctagtttggaaaaaatggtcgcgccatgaagttcatcgagtaactcatcgatcatcggaatggggaaccgatccgggactgtaactttgttgagagcacggtaatctatacaaaatctccatcctccatctttttttttaaccaacaacactggactagaaaatgggcttaagctaggccgaacaattcctgcctcaagcatctcttgcaccaatctctctatttcattctttagaatatgtggataccggtagggacggacgttaacctgagatgctcccggaattaattgaatggcatggtcaatatcacgacttggtggtaaccctgttattggcccaaaaactcgttgatgttgagctaacacttctttgactgttttcggaacctcttgttctccttcactcaaatccgaagtggtggaagtctgacagagttccacccataccccttggctatggtgctgcagtgctctagccattgccttaagagacacctcagcccgactaaggctcgggtctccctttaacactatcactgccttccccattctgatcttcattgttagcatcttccagtttactttcacgtctcctaaagtccccaaccaaggcattcccagaattacatcagtgttgcctaattcaagtggaagaaagccttccactacagtgagcccctgcatcgaaatacaaactcccccacaaatgccctttcctttcacggatatcccggttcccatcattgccctgtaattggttgttgcaattaatggaagtgctaattgttgaaccgaatcaagggataaaaaattgtgggtagccccactatctacaaggatgattacctcttttgacccgatcattcctttgatcttcatagtccccgacgtagttatacctaccatggaatttagagataattccacagcgtctttcaactcgatgagtgaaggttcttcggttgctccgccgtcaaactgattatcctcctcctcctcatcttcgtgcaccaataaaacccttaattctttcttacaacgatgaccgggcgaaaacttttcatcacacttaaaacaaagccccttctctctacgggcttgaagctccgattctgtcagtctcttcattggaatctcacatcgttggctcatcgtcttctcgctaacagccactgccctagtctgaaaattctccccgatcttccaatcacctcgaattgcagatgacaacattttggtgctctttgggtcctttggttcacgggccgccctcatggttaaattcctatctttgacccattgggccatttccatcaagtggcccagcccatatggttgtagaagacgtagctcagcccggatcttaggaagcaacccattcataaacgtgctttccattacctcctccaaaatccctttcaacggagttgctagaatctcgaattcccgtcggtatggtgccattgactcccattgtcgcactgccaggaactgctcacaaaggctcccttcttgagtcggacgaaagcgaagcaacaattgcctcttcaagttttcccaactcccaaacgcctcccttgaatcagtccactggtaccaagagagtgcgtccccatctaaactcatcgcggtggcgactaatttctcctcttccgtgagtccgtacgtcgcgaagcatcgatcgacccggcagatccagccgtctaggttttctcccgtaaatacaggcatctcaacccgtcggccgccacacccttccccatttcctccttgcctcgtctcatccgacaccatccaccccccattgggttccccaactccaaggatccatcttgcatggtcttcttgttgagtagtagtcgtgatgacccgcctcaatgacaatgccgccaccgccttttgtgtctcttccaatgactgcaaaactcgcattacgttctgggcaaggtccattaccaccttttccattccttgtaagcgctacatctactctctgatttctctaacttccttctctagaagatccacctgaccttcattctttttttgagccatctagatcgatgccctgatatcaaattgataggtatctaatggagatttattattgaatttcaagaatttcaagaaacaagagacctaattgatactaagatagctatttgagaggctatcactctcctaccagacccacacaatatccaaccctgcaattcccttcttttcctattttaaaccctcccagcccgtatccagattgtgacctagcctatgctagggctgttacaactaactgctaggtggcagtacattcctcttcccttttctagtatacacataacgtatgggaggcctatcattccaatcacccttatcccttacatctcgccaatttccttttggggccacctactacattcatggggggacttcccaccatcgctacattgcaaagcaaactgaccccactgccacttgcatagagccaagaagctttctcccatcagataggcagtatcttcatccactaccacaaaaccactgcacttgtctcctaacaactggaaaaactccatgctccacaagtgcaatagaagacctaatactcacccaaacttctttggcttgaaacctatttcgaaagcaccccacttgagggtcccacctatttaaagacaaacacttgttttcaaacaatttcaaccccctgttaagcactgaatttgcctttgaagaagcttcaaagtcaaataaaataagagagcccccaagcaaaataaagacacccctctcaattgctagttctgaacagcccacgtctttaaagcacccaggtcaggcactgggtctccaagatcccccccacctgcccaccaaattggactttaaagattggacccttgagagaacctcccttttttcaagttgaatcaaaatcgcctcccccacttcagccaaaattgcgtcccccctagacccttgagagggaggaaccaccctaaggctatgaagcttcatagccaacgttcaccagccccgtggaactcccttgccttctagaaagactagaacaaatttctttgtctttgtagaggtcattgaacaccgaaggaacctgctagcaccattgctgcgacattgcaacctaaaacttctccccccttcctcccactccgaataagccaaaaaaccttttccctcctggcagcacaaatccaatcaatccagtggaagagacaagctaaactccccaaatctgaaatctagatgctcttctatccattgtttgtccccttgaccttggaatttaaatttttgttgaatccttttggatcatgaaattgagtaattaaattttcttattttgtctataagacaagtgtatttattagcttcttattctgatgtaaggttctggtcaaaggcctctttaagttcgttccgtgtacattcatccttcaaagatctttcctattctaccaattttattctttttgcttaagctaattttaatttgagattcaaaccaactcctaaagtaaaggcttttgcctagcttgttgttggaaagaagattaataacaatattatgctttagaattggaggccttgcacaaccctcaactcaaagtgggtgtcatgtgagaagatggtggagaattggttgctcatcttttattttatggactagttgctttgagtctgtggcagagattgttcatccttgttggttgcgactgtgtcccattgtgtagtgtggcagagatgttgattatttcttttaagggttttgggggacttcttatgaatgggtttttttgagtattactagcctctatttgatttagattatataacaggaagaaaggcgaggatttttttagaatgtttggagaatagtagatgcggcttggaactcattttgctcctcccttcatgggggctttcttgagcccttttattattagacgaaccttgttgcaggtcttttcttgtatggtcatcacctctagatggttaaactttaatggctattttttagcaatctcgaagtagcttttgatgggagaagtgttaagtgattattggaatataacgatagacatattctaaaccggtaggtgaagcttcatttttgaggttaaaagcctgattagtaatgtttttgaaacaattcttagaaaacaatttttgagaatagttcttaaaagttgttctcaattgttttcaagaataaaattttgtttaggaactcaaatatgaaatatagttttcttagcttattctctatgaaggtactgtatgcttataaacaatacaaaactttccaaagtattcatcttttcaattattgctcagaacactttacaaaaacaattgtaaacatctctaatttcttttacaaaacaacttgttttttagaaaaaattgttctctaatttgtttttttgggagattatatgaccactccattaggttaggttttgaggatactatggtgtggttggggtcaaagaatcgtaatttctcagttaagtccttctactcctctttggctagtaggagattgtagcatttccctcatgatatagtttggaattcttgggtcctggtgagagttagcttctttgcttgggaagctacatgggctaggattttgactttggatcagctcagaaggaggttggaggatccctaatagatgttacatgtgcaaagaggatgaagaaataggtgatcatattctctttcattgcacgaaagcacgcaatttgtggtgattagtttttgctttgtttggtgtatagtgggtgatgcactcttcactttaggggatttctcttaagctggaacgattcttttgttgggaaaaaagaaaaaaggcttgaaaggttgctccgttatgtgtgttttgaaccatatggagggagtgaaataggagtctttgataattgtgaaagcttaaaccaaacaattaaaaattctttcttgaaccttttttgggattaggttagattatatcttggggatggttctttgtcggttttagaatttgtggattggttaggttctttgtaggatgtgtttgctggtttttgtgtcttcacgcttcttttttggttcttttggtttttttgtatacatcgtgtataccctcttttatcattaatacattttctttatctatataaaaaaaaaaattctgaaaaattgttttttgtcaaaagtttgttaaacatattttctaagttataaaactgtttcaaaaagacaattaccaaactgaccctaagattttagctcttttgaagagtcttctgtaggctaaggctttctgcctttcctatcttgttgtagaggtagatatttctttggtcattttgttagtgaataagaaggaaagaagcttatgtaggtctgatgatgggtgactttgctagatttttgataatgctatagagtttaagtgttcattttgttcagctccttgcttagccaattaaacgagggatcttttaggcaaaagaggagcaaaacttttcatgtctttcttaggatatttttcacttccctgagttgcagttagtgattgttttggttcattttctgggctctttatatatatctatatgcagattgtgttgcttctccttttggagctttttgcattgtttcgattggattttgtatattttggagggatatctcatccttttttatttttatattttttttgataagtccttttttatttttataattaatagaaatgagttttagtgtttctgattagatacaaaaaatcatgtctaggcctaggcaatctatgataaatgggcaagtgatattttttggtcatgacaaggcttcaaaataacatggaatcaccaataagtgcatattttattttttatatagataaggagatttgggatactatttaagagatgtaatttatggagaaaaatgtttcacatgtacaagttgtaggaaatatctctcttctatagcaggaagattgaagcttaggtgagtgttatagtgcttttaaatggatgctagctgaattgaatcaaatgtcatcctttaactcctgatttgaagagctaaaagagactatcatagaagtttcaagatttctttctaaacttaattttaacttaatatggtaatggataattctactttgatattaacactgttaggattcttttagaggttattggaatgctattaatggttgtaattgttttatgacctatgctggtgctagtctttggcttggtaagttggttgtgatggtggtggtaactttattaagggttgtgaccatggtgaaaggagttactatggtagaggctacaattatatcacttgcattatggatgggtaatacatttgataattaatgatctaatgagagggtgcactcattttagggggtacttctcattagccacttttgagtggttctatttctcaagtgagcccttcagctagttgttcgtcattcttttgtgctttgttggaaacaacacaagatctgtctacttttgctgtcatttttgcataccgaaatagctttaacattttctttttccttgcttccaaatcatcgacaaggtttttatttttattttgtatttatttatcttttggaatagaaaccaccatctttatttattttaagaagataaatacaagacggatgagcaatctttcatggatgtacaagaaggtaataaagtaatcaagcatcaaactatacaagggggaagaaatacaaagaagagaaatacaatacactgaaggggaaagaaagtccactgcaagggaggcccaaatgcttagctccttgtttagcaaactggtttgtgacttggttggctgaactgggaacccaagagagggagcaactcagctcactgacaacatctatgattttgcacatccaattgtcaaacttccataaaccttttccttattaatgacccatgatataacaccagtagaatcttcctctacagttagggtggagaggcctaaagcttttgcctattgctaaccctctagcaaaaactctctgcctcaatagtcaaccctgcaccctcttgcttaaagaaagctcacaacattgtaccagagtgatctctaatgacgcctccaatacccatctgactagggaacccaaggaacatccattaaagtgtttaactttgaacctacgaggggtgggggggcgcacatccaatcccaactttcttccttgacctgtttgagaaatagactcttttccaatccaacattaaaagaaacaaaagaatatctgtaaaaggcttggtgaccgaggcccaaagggaagaaaaaaagtaaatcaagtcccaaatggcatccacagatctccatttgtccttgaaaatccttgcttcctctcgaaccatataaaccatatcaaggataatatgaccacctacaatagaattttctcttttggaaggctcccaaagcccttaaagaagatacccatcatttttgccatgcctctaggaggaacctaatcaagatttggcaagtgaaacaatccttgccatagtgctagactgctagtgtggtgggacaataaaaaaaacgatgatctactgatcactattcttcaaacacataacaatatgattctacaagagagctttgtaaggcccctcaattgaagcatgtccttggtatagaccttattagccataagccaaacaaaagcctgaacctttggtggagcttttgagttccaaattaagttagtaagagcaaaataggtgaagataagagagggaggggtaactgaaagggcttcataaaattagctaacagtgaatagccctgaggatgtcaatgatctaaccctttcatctctaaaggaaggtgataaatacacatgacattgggaagagaggagcctagttaattccttaatctctgtatcaaaggggtttcaatgacaattgaaattctaagatggactaatagagaactgatctaaacagggaaaataagcatattcctcgtctttatgactcaaaacagatttgaaaattgaaacttgagaggactcttgcccagccaagtatactccaaccggtgaatttttttgccttctcccaccaagtactaggtgaaacttgagaaatcattgaaaaacttgaaaaatgacttttcaaggacaacaatgcgaccacctaagaatcgtcttggtgtcccaaccattggagtgcaacctataaatatttaggatgaccttatgccaaaaagtgttactctctaggaaaccttcacaaccactctccaagaagggctttgttcctcaaggagattcctttaagctcaatagatccctcttcggtgcacacacgagatcccacccaactaggtggtctgttttccttttcctaaaccttaaccaaaggaagtctctataatttctcaatcctataagccactttaattgagaccttaaacatggaaaggacattagtggggatagaggcaaagactttcttccaacatccaaacgacaaaagatcctaacactagatactagaaagaagcagctttaggatttccccttaaagggagacctaataggtaaggtgccaaataaagactctacaatctaacatcaaggttaagtcttgaatagattcctcactcacattaataccaaccaaggaacttgtttctagattgatctttaagcctgatatgcgtccaaaaatcattaaggtaagcatggtatgtgtccaaaaccattaagataagcctgatatgtgtccaaaaatccattaagataagcctgatatgcatctaaaaaccattaagatataattaaggttttgtaactcatcccggttagcttttgagaaaaaaattgtatcatatgcaaactaaagaactgacacccttgtcttgtccttccccaccaaaaaggcttccaaaaaccctttatcttcaactcttacaaccatcctactcaaaacatgtgcaacaatagtgaagagaaaagagagagagggtcgccttgtcaagcctatggatgctttaacccaacctttggcacccccgttcactagaatgacaaaacttgtagaagataaacatccttgaatcagcaacctctactttgaattgaagcctttctttaaaacatgatccaaaaagtccggattcacatggtcataagttttttcaaaatctatcgtaaagacaagtcctaattttccagagtgtcttctttcatctaccacttcattttccactagaacaatgtctaggatttgtctaccttcaagaaaaatcttgagaccaatggataatctcatgcaaaaccttatgaatgtggggagaaagcactttggcaatgaccttgtagagactaaaatcaaccactgtggatcttatttctcttggtgaccaagggaataaaagtagcattgacactcttattaatgaccccattgttttggaattccaagaaacccttttcaaatcctccttgatgatgccccaataatcttgatagaaagcttaggtaaaactgtcatgacttggagttttttccttgtccatttgaagaactgctccttgaatttcctttttggaaaaaaagtgttccaacaatctgacagtctcctcagatattggagaccaatccaacccttctatcctccaagaatccttgtcaggtttgttgtaaagactaccaaagaaactcaaaaactcctcataaatactctattgatcctccaatttgagcctttcctcaggggggatttggaaaatttcttcttcctcctaccattagccaccttatggaaatacttaagagttgtaaccccttccttgacccactttaccttagttctctgtctcaaatgcacctcttctctttgtagcaattcctttggttcaatctttttaacaagccttaatgctactaatttgctcatcaaagctctttccctttcatgagaatctaccaaggtaatatcttttaagatagcatctttcttttcttttatatccccagagatttccttgctccaaaattttaattttgccttgatgaattacattctttgcatgaatttatgaccctccttagccttcaacacacacatccactcaccaatctttaaccttgtccttgaaaccagcgtaggacaaccacatactcttgaagctaaaaggacttgggccccatttgaaaggattggagtcaagaacaattgggcgataattagaaaccaatcgaggtatagtctcttgaaggtagtgggaaaagttgacatcctactcatttgagaaaaggaatctatctagcttgttacaaacaggggagtcttgtagatttgaccaagtgaaggaagaattacaaagagggggaatcggttaatacaaactccctaataaagctatcaaaattacacatatcaggtgagagtttggatcccccagaattttcatatacccttctaatgatattgaaatcaccccacacaccacctcaagtacatcaaaccaaagagggttgaaagttctttccaaaactcctttcaaagggctgacacagttggactataaacagtggaaagccaaaaatcttctcccaaatttgaggaaagttcggctgacatggaaaaaactccatttaccacctcagaacacttgagagcttagaatcccaaataatcagaacaccttcagaggccccataaactgatggctctgcccatttcctgtttctgatcctccacaaactacttacatggtgcatatcacgcatctccttcttaatctcttgcaacataaccacatctggaccctccttgcataggaagttctttataacccttattttatttcttgaacccagcctgcagatattccagcttataatcttcatgaaaaccaggttgccccacagacaaaagaccaaattattgaactcctgatccctgtatgtctatgaatgaatttaacaaaactgaacttccttctatggtagaccttagctataggcttagaccatatatttttcctgattggaagctgaggaatctccttgcaatgaatgaggcttattatacccatagaggctaagagtgagctaacctagtccattttgctaggagtaagacctctgctgtgaaaaccatctagagaaaggcaattggagttcatggtctgatctcctagaggaaataaggactgattagaagaagttgggaagggagtagaaacaacaacattttctggcacagggacagggttgtctctaacagatgcaccactgacaggtgggagaaccaactggagagcaggggtgaacaccagtgcccttggatagcaaaatctggggacataactcatatgatgtacaaggcgtgttctccaaattcaatattggtcataaattttttaatgtacttgttgagatggcctgcttatgataatgatatcataatttacagattgagctcacattgacctcgttaaaggcctctagaagtaagactcactttacatgttcctcctcgttgttgttgtgatggtggtgttcagctagttgcatagagctataggtggctatgtgcaggattttggtcaagggtgggggtggtgaagagcttcttgcatttcactttctccagttaaggtgtgaaatatttagatcttcctttacaggcttcattcaaactaaggcaatttggacccaacaacaggccgagtggggacaagactggctaggtggaacttatcagaatgatttgagaaatctcacattattttagattgtatgtattaactatttattttcattaatcgataagaaaagacattgcatattttgaaaattttgtagttttctagctgtggagtgcagagttgcagcattaggcatccttgtccatgttagagatgctttatttgcttgcccaatgtttcatcctgtgcagcatctatttattagaatgttgtcattaagcatattttctgggattaacagtgagagtttgttgttgcaggttgccagaggtcggattgagcaagcaatcaatat

SEQ ID NO: 12518 - DNA, 3529 bp, Vitis vinifera
  Intron number 8 from transcript GSVIVT01014003001 (locus G SVIVG01014003001) derived from phytozome v7.0 (chr-ID chr1 6; pos 8760856 to 8764384)
ccattgtgatttggtattttcttgatttatcttgtgctttgctgtcttggccatggttatagtttattcacacagtaatttccatagttctaagaggtgtgcatctacctcattttctttgtgacttatgcttttcaatgtagagcaactcctagatcgtatttcgattaagtcaatgaacctaatccctaacaactaatgtaaagagtacttacactatggcaacaacaaccctacgatcgtaacctttgattacttgtaatgccttatattggtagctacccacactaaaagtaccaatgactctcatatgactactgaaaaatattagagcactaatagcaatctataaaaactaaaacaaatcatgtgaaaacatggcagacaagagcataaatttgaagatgaaattcttgtgacttatacccacactaaaagtaccaatgactctcatatgactactgaaaaatattagagcactaatagcaatctataaaaactaaaacaaatcatgtgaaaacatggcagacaagagcataaatttgaagatgaaattcttgtgacttatgtgaattagtgtgtgcacttctctttggtaagcctcttggatgctcctatatccaataacataatcaatctgtaaaaggttaacatatatttattagtaaatattttattaggaaaaacaaaaataaacctgctcgagaatactagagacactaaacctagaactactctcacagtaaattcaacttggtactattttaacatcttgaaactttaattttctttcacggctttgtaaatttcctagttcagaactgcttcagaattgaaatcaaataccaagaagttcagtaggtgatagaaattgtatctacccaacaacaatggtcatccacttattacctatgggaacattctacctgacgcttcctgaaacagtatgtcatccaaagtaatgtccctacccaagtgattagaacttgaaaaaccgagtgtggaacttttagctctgaattatggattaattgagtcaagtgctgatcctccaaacatgccacactcagttctgacctaaaacagaaatgaagcagcactgacccccaaggacacctgtgaaatatgtatctggctccaaggtgccatgcaacaaggcatgaagcccatgcaaacagacacaaaggacatatgtgtcgcagaaattagcacccaggagtttgaacaagaagctcagatcattagattcttttgaagtagtccttttagggatggttccccccccccgaggttttctcaaccacatattcttctgatttaacaaatgctcccttccttctaggtttggcattgaccaaatgacctccctccactgaaaaaccattgtgctgatggatggaaaatgatgacatcagcaacaaaattccaaaaaaacctaaatcactttttctttttatctttcctaggaagccataattcaccttttttcttccttaaaccctcaacaaactctgaccccttaatctgcctctatcctcacaaaggaatcataatccaattcttcttcctcaactcttcaaaattaatcctcaacttatggctattgtttgtttgtttgtccttgtagtggttgtttttattttattttatttttgtcttttcttgcagcctaattcctttttttcttttttcttttcttttctttttctttcttttaggcctttgctgttgcagatagaagtcatgtgttcaacacagccatattatggttcttttttttttacatatatttaattatccgttttggaaaggggctatatgagcataggtttctgtccgcacggcactatccatggctgcaagagtattttatttcttagaaaggagaaaggagaagggcaagaagaaagggattattaagttgttggttttttttttttcacaatttggagatttatggttcaatgaattcaggatttagggttttcaaaatctggagaagacagaaaagaattgggttttcagtgaggaagaaaaagggcttaaaatgctgcaatttggttttcaaagctgagagatatttggtcttttctcattcactgttaatacagttagggaacaaactcttgacaaagaaagccaataatatttttaaaatcacaggagggatagtttaattgtcagaaacctcagggctcaaaacactacattgttggcctattctattccaatgggaaaaccagaacttatttgatagccatgcccctaagatttttggcatttgaggcctgtctgttatttattttttatttttattttttgatcagaaacaagagatgtttatatttatattaatgaaaacatgagaaggatgaggagtcctcctcatgattgcaaagaaacttgatcgtaatatgattgacctcctctactatgcaaggagtctatacaaaaggtttagactagaaatgttattcctctcaaggatctctaaacccttttgatttacacactaaaagctagttgagttggataacactaagaggaatgcctttaaaagccttggtgcacaaggcccaaaaagaggaatagaagtgaagtaaatcctacaacccccctgtcgttgtcctccccttatccttaaaaattctgacatttctctctcgccacacaatccagggcaatgtgccactaaaaaattctaaaatttgaggtcttttgttcttggtacttgatacttgataagagtccctttctacaagtataataggcttttcttaggatgattcaaggccaagagatgtataacgtagggcccatgttgattaaatagcatagagctctccccccgttttaatggaccatacatgatgtactacagatattctctggttgaccatgggtatggattgttttgtttgactcatgttttggcatcaaaacaaggaattcagtatatcaacttttcttgctgagggccatgactaacaaatgtctcttgatctccttttatatgaaaattttttcagtactattgccctcttatttttaggtgcccagagcataagaaactaaatgtatccccttttagggctggaaaatccttaagtatttctcagggaatcagctctgtcaaacactgactctttctgtaaactcaattggtcaatttctcttggttttctatatatttatattgcatttgcatgtgtgttttttcttttcatttttatttatttattttatttcagtctattggagcatttgtttcatgttcccactgttttagactatttaaagttattattttatattccataaacagtaaatagatatgtttcatgaaatgtcaatgttgatttttgataaattttaactattcatcatatctgatgctgaagttgcagacaatttttcatatcatcctctatataataatatttttgcttcttatggttttatattaatgggattgcactggctctgttttgcagttccactggaactcgagatcctgtaacatctgcat

SEQ ID NO: 12519 - DNA, 16611 bp, Vitis vinifera
  Intron number 5 from transcript GSVIVT01012850001 (locus G SVIVG01012850001) derived from phytozome v7.0 (chr-ID chr1 1; pos 6113218 to 6129828)
ggtaagcctataatatttctgtgcctttagcactcttttagatgttcaagctagaatgtgcaaatttttagtgcctcaggacagggtttgacatgaaatgcatgtgtatcatgatcttttatagatcaggaagcattctcatataagagaagtgcatttaatgagtctggttggattacatttagtcatcttgcccttgatttttatgcagaagaagagttgaaattgaagacctaaggcacaaaatgcttgcataaagtctgactttaggtctactaaggcaattctaatagaaatcacccaataggttgggggacaaggggcttaggggggtttgggtttgaattgggtggttagagaaactacgaaaaactttttggaaaatatcaaagataaaaagaaaataaagcaattgtaaggtaaattgtgtaaaggtcaaaagatagagatgagaaatgcaagcataagatttatcgtagttgtcaaactcacccatgtccatgtcctaggcttcttccaaaccttgagagttctacactattcaccaagggtcttcaatcaagattcaagtctttttcatgcttggtttccacaaataaacatggacctttacaattgagatgtcttcacataatttcacaagcactaacaaatgaatgaaaatgatttaccttttttttttataggcaaataggtattatattaaaggatcagtgcctaacaaaaagaggtgccactaatgtatataggtggtaaaaaagtgttgaaactgtaggttttattttttggagtttgaatttaaaaataaaaccaaaagataaggcttaactgagtcctattattttggactttttagtttagataagtcctagatttttaggagtttgaatttaaaataaaaccaaaagataaggcttgattgaatcctattattctggactatttagtttagataagtcctagtgtgtttaaatttgtttttatctctagtttgaattagagagaatatccgatgatattccacatgatgggattgcttcgtctatttaagttcttgatgtaaaccaaaatttttcaatagagtatcattcagtttcttttccaaattcaatatggtattagagctcaagatctaaacataaacatggtgaaaactgccatgattggcaaacatccaacaagatcttcgaatgtcatttccgattcttctcttgtcaattccgatggtaatggtggttctgaaaattccattcaccacaatactgtccacaaattaaatggcaagaattatctcaaatggtctcaatcggtaatgatgtatatacgtggaagaggcaaagatgactacatcataggcgcgaaaacaacccctacaaagaatgatgcatcttacaaaacctggttttctgagaacaatatgattatgtcttggcttactaattccatgaagacaaacataggccagacattcctattctacaagacagcaaaagaaatttgggatgcagccaaggagacgttttcagacagcgaaaatgcaacagaggtgtttgaaatcaaaagtcaatttctagaattatggcaaggggacctcagcgtgacccaacacttaagcattctctcctgatattagcaaaaactggatgtgtacgaagaattggaatgggattacactagtgacaacatcaaatatcagaaaattgtgaaaaaaaaaaaaggatctttacattcttggcaggactcaacaaaaatctcgatgaagttcaaagaaggattcttagcactaagccactcccatcacttcgagaggcgtgttccgaagtctggagagaggaaatcgaaagaaggtcatgatgaaggatcacaaatcatcacagtccttttcgagcaacaatggatcaaccttggccaccaaggaaccaaattctcaacactttgattcacaaaggagatccaataggccacggtgtgataattgtaattgagttggtcacacttgagaaacctgttggaaaattcatgggaagccgtccaattggaaaagtaacagaactcaggaaaatgaaccccaaggttatcgtgtcaccaatgatgaaccaccacagtctaataactcagccaacaaaacacctttcagcggagaacagatggagctacttcagaaactcctcacacgtgatccttcgagtacctccactatacgatcaagttctattgcccagaaaggtatatgttccaaagccttgaatgcttcttcaaagtcaaattcatggattatcaactccagtgcatctgatcacatagccagtgatataactctttttcactcttttcagccttgttctgagaattataaaattaaaatagcttatggtttttactcactagtggccaataaagggagtgtcattcttccaaataggtttagattgctctctgttcttcatgttcccaagcttacgtgtaacctgctctctataagcaaagtcactaaagatcttaactgcttcaaaaggacacactcaaaaggcaagttgctatgttatttcatcttttacaaattccagtgaccatgaaataatggtttggcactttaggctaggccacccaagctttccatatttgaaaaagttgtttccatcgttattaagaaataaaagcttagagtcatttcattgtgagttctgtcaattgtctaaacattgtcgaaattcttatgtttcataaccttataaaaaatctcatcatttttcactcatacatagtgatttatgggaaccttccaatattagcaatgtaacaggctctaagtggttcatttcatttattaacgatcatacatgaatatgttagtgtatttgttaaaagaaaaatctaaagcaaaagattcaaaaattttaatgtcatgattaacactcaattccaaaccaaaatccaaattttttgcactgacaatggtactgaatactttaattcaattcttggaccctatcttcatgaacatggcattattcatcaaagctcatgcattgctacaccacaacaaaatggaattttagaaagaaaaaactgtcatctgttggaagttgctcaatcccttatgttcacgacaaatgttcctaaatattttagggggaaagccattctcactgcatcatacttgataaacaggatgcccactagagtattatagtaccaaactcccatcgaagtcctaaaaaattgctaccctagtattcggctagtatcatcctttccaccaaaaatttttggttgcagcatttttgtcaacactcatgctcaaaaaaagaacgaaactagatccaagagccctcaaatgtcttttcttgggatattcttcaacccaaaaaggttataaatgttactctccaatcacaaaaaggttctatgtttccatggatgtaacattccttgagaatcaagcctatttccccaaaactcaacttcagggggagatttcaaggaattctagctcaaatcaaatttgggatattgctattccagctgatattgctcttccaggcaaattttcgaatctgccacctcaacaacccctgtaacaacaagtaagtccagccctgaaaccactgttgttcccttcgaacgagattctgcacccaatcttccagcaaatttgaccttagagcttcgggtttattccagaagaaaagttgtcagggatatacagactcccatgccctcaactcatggctagttaattgaacctaatccgaatccttatgaccaaaattcacgtaatacagtaattgatactaatccaattgtattaaatgatttggatgttcatatttcatttcggaaaggggttagatcgtgtactacacatcccattgctgattttgtttccaatgaaagattatctccacaatttcaagcatttactactaatctctctaaagttgatatacccaaggacattcatgagacattacaacatccaaattggaagacaactgtgcatgaggagattaaagctcttgaaaaaaatggaacctaggaattaaccaaattgcctttgggaaatctactgtgggatgcaagtggattttcaatgtgaaatatatagctgatgggaatattgacaaatataaggcaagattggtggctaagggatttacgcaaacgtatggagtaaattatcaagaaacttttgctctagttgcaaaactaaacattgttcaagttctactctccattgcagtcaacaatgattggcctcttcatcagctagatgtaaaaaatgcattccaaaatagtgatctcaatgaagaagtttacatggatattccaccaagattcaaagatgctaaaaaaaaaattgagtgtgcaggttaaagaagtctttgtatggcttaaagcaatcacctagggcctggtttgaccgtttcactttagctattaagaaagttaagtacaataaaagacaatcaaatcatacgatgtttttcaaacattcatcggatgggaaaatagttattcttatcgtctatgtggacaacataattcttaaaggtgatgatgaagtagaaatgataaatttaaagagcaccctctcttaggaatttgaaatcaaggacttgggagctcttaggtacttccttggcatggaggtggctcgaacttcaagtggaatatcgatctctcaatggaaatatgtccttgatcttctggagaaaaccggtatgcttggatgtagactagaggacacacctatggagcagaatggcaagcttagtgatgaagaagaaggtcctccgatttacaaaggtcaataccaaagagttgttgggaagttgatctatttatcccatactaggccagacatagtctttcctgttagtgtggttagtcaattaatgcaagccccccactgaagaacttctcagtgcagttcacataattctctggtacttgaaaatgacacctagaaaggggttattttttggtaaaagtaccaaatgaggaattgaagtatattctgacgcagattgggtaggtttcgtgaaggatagaaggtccacttcaggctactgtacctacatatggggtaatttggttacttggagaagtaagaagcagtctgtagtggctcggagtagtgcggaagctgagtttcgagctattgcacttggtatatgtgaaagactatggctaaaacgtgcgatggaggagttgaagatttcaatcgagtttccaataaaaatgttttgtgataatcaagcagccatcaacatctcccataatctggttcatcatgacagaaccaaacatgtggaaatagaccaacatttcatcaaggagaaagttgagaatggggagtttttattgcagtacacgcctaccaaacttcaaactgcagacattcttacaaaagctctaccaagacaacatttcaattctcttataagcaaactgggaatgatcaatatctattcctcagttcaaggggaagtgttgaaaccttaggtttgatttttaggagtttgaatttaaaaataaaaccaaaagataaggcttgactgagtcctattattttatattgtaagtcctagatttttaggagtttgaatttaaaataaaaccagaatataaggcttgattgactcctattattctggactgtttagtttagataagtcctagtgtgtttaaatttgtttttatctctagtttgaattagagagaatatcaaatgatattctgcaggatgggattgcttcgtctatttaagttctcaatgtaaaccaaaatttttcaatagagtatcattcagtttctcttccaaattcaataaaaagaagggcaaaaagaaactaaacaagatagccaacaaaaagacctatatattcatagataaggctccatgaaaatccaacattgtgaagatctctatccccgtcgcatctcaagactactccaacaaggatttcaaaaaggattcctttaatctctagctttggaagctcttcctcactaaagatccttcaattatgttctttccacatgcactaagatcagcaagggggagccatgtgtcttccttcgccatttctccatcccctttaccttctacccataagaagatttttcattgagtttgggaacatccacttcaacccaaaaatttctaaaataagattccacaagtttttccattcacaatggattaggttgtgatttgttgtttcttcactatctttgcagaggctacatctattttccatgtccaccctcttatcatgaggttatttatgtatagaatcttacctcgtacaatttcccatgccaaaaaaatggttctcagaggagcacttaatttgtttcactcaggacaattctctactccaaccgtataatgaattatagtaggacttaacacaaaactctcctttcctatattctttcaagcataagctgtctaccctgctccttgcactctcactgaatgcatgagccagaaatattgaaccactgcatccatttcccaatcctgaaagtgccttcttaactgtatagatcaattgcctccattccttcccttttcccacaagtctgctactgtagcatccttgggagagcctaattgaaaagcaatggaaaaaccactttcaaggaatgaaaatgatttacaagaataatactcttaaaaaagtagatttacaactcaaactctagctcaatgtgcaattcatgaaggaaataagcgagtgctggttcaaattaaactatatgcaccttaaagacttgaggacaagaattgaatagggcttgtgggtattagattggtcataagtgcatcccaagtgttttgtttattgtctacaagtaaaacagagcctttatatacaaaaatacatagactcatttgacttcctgagcaactccaagcactaacaagctgttggactttaaatgcaattttgtaggtgactgtataactgtcaaactggttaactggttccggaagaacctaattcatttggttcacctaccagctgcctaggcaaagagaccattgttacccttgaccatcagcagaaatgctttcaatttcctctgttcctcaacctttctatgtttgttttaaggctcaactaggcattgaaaaaatcttatccaaaataagtccaaacgttggttttcaatgtttgttttctctcaagactgtcatggttaaacaggtcaggtctcattgaaaattttgactcaatgaggcctaaaaggtcatgattgctttaagcctaaggtcaatctaggtcaagtgtatgaaagatctccacttcaaaaatgcacaaaaatactagttacaaatggacctaatcatgataccttaattaaatgtagaggcctaaacaatagttcaaggcttcacttgtccttaatgatctttcaagctcctattttattatttatatatttatgtattcaaatatgtctccatgtgttttgagttgacttacatatgttcaccctcaagtgaatgattgaatatcaatcatcttaatcattcatttgttttgttagtatgaaaaaagtccaatagaaaccttgaactaacatgaagttcaattcacatgaaaatcattggccattctttttcttgtgctaacaaaaatgttaataccattagttaatgcaaaatatgaagataaagcaagattaaccacatataaaagatacatggtgttttaacttggttagtccaacaaagcctacctccacaaatgagagagaagtattccgctattatggtgcagcaatgccactcttaagctcgggaatgggtcacccaaatgatgatggtcgaatgctacaaaaagcttaacctaccctcattggactttcagatgagatgttcaaaggccaatctaagaattggtattagagccaagggtcatggattcaagccatgggagtccatgctaggggaaggatagtgcaagaatgcctctctcaagtctagggatgagtcacccaaatgatggtggccaaatgtcataaaacgtagcttactctcactagacaccaatggtttttagataagatgattaaagtcccatctaagattcactataccatagagagtattaaagagagtagaaaaacaaatacaattattgagctttgaaataacaaatacaactatggagatttgaaacatcccatatttgtggctctttgaagtgacacattagatcatgagcccttcattgagtgtttcccacttttccacacacatctaccaactcggtataagcttaacatgccaattcctatctcatagttttttcctctttatgatataaaatatttaaggaaatatccctagtaacttaccttatcgggcaaggaaatctatttttcataaggcatcgccaatatataaaatattttttacaaatttttttattaaaaggaatatgagacactttctaacaatctccaacttgaatcaaatttcatcaatattttttcatcttatcctgacataaatcttcatcacatgcatgacttttttagacatgcttttgttaatacacataactcctttgatattccataattaaggtaaaaaactactatactctgccaagaaacttgtttgaaccacattctgagttcatgccacaaatttttcttgcaccatgattccctcatgtaccatggtctcgtcatgtgccaaggattcaaattatttagacactttatagtttccacattcaggatctaataagtatataggagaaactatacttataccaaataataaagtgcatgctctgtgtattacatttcattgtgagaatgattgactccacctttatcaaagttctttttgtgatcctcttgtgtgttccattttccttggctctttaagaaatctttaccttctagaaatcttgacttggactctaataccatttgttgtactaatgagagctttaataccatgagttagtacaaaatgtgaagataaagcaaaatcaatcacacataaagagatacatgaggttttaatgtgattcaaccaaccatgcctatatgtacggttaagagagaaatatttcactatatcatagagaatattatagatgaaaaaaacaaatgaatacaactattgagccctgaaacctcctatgttgttttctccctacttgtatctacactctaaatcatgagcccttactctcctagatgtcttccactcttcatcacatctctacctattcagtataggttttacataccaatctcgatctcataactttttttcattgtgacctaaaatatttatagagatattcttagcaacttctcttattctacaaggaaatctattttcataaggaattgccaatatgtaaaatatactatacaatagtctttgactaaagggaatatatatcaattaagaatttgagacactttctaatactttttcaaatttgtgaagaataaagttactctttgatctcctacaacggcaattttagaaacatgatttaaaaattatgagatattgaatttattatgaaatgagaattggaaggatcgattcattttatttcttcctattgttttcatctgattatggttatgatttctttttgatagctaagatgtggaatggaagttgattgatttatagaaatggttatgtagaaccaaaaacagaaaagagtgacgtcaacttgaataaaactggtcacaaggtgcttatgtaaaccattttaacaaaatgcaatgctaaaaaagtaggacttgaattttcattgcacgccaggtttggatggaggcattgctagtgctggtggaatggtaattgtaggggaaaaaagtatggagtgtagcaccaacaaggtttggaagatgtaaaagggaggatggggagggaaataattctattaatttctgcttctttaaattttaaatatttattctatgcaactgataggaaggttttgagagaataaaaatcttgtgatatcttagctgaaacatgtagcaggtttctattttaatgtggtggttttagaaaataaaggagtatcaaataaatatatcaatatgatcaaaatttatttcattattggaatttgctaaacttcctatttttctgaggattctgagtgtagatattcctttttaggaacagttattttgttttttattttttattttttcaatggaaatagaagcttctaacttgctactctggcctaacctactctgaccttcaccccaaaaaaaggaagaaaaaaaggaaaagaaaaggaccctggctgttctgtttcttatcaggatttggtgtgctgtgtatttagtgatgttattgtttggactaaagttcttgcttctcttgtgtggattttttttttccctaattaatttattgctggatatctgtttgggtgcacttgtggggcattacgtaggatggggctgtaattagtatgagaaaaataggatataagtatggcctagtcagaactgaggatgaatgagttagattaatcctcttttatgataaatagttgataccctgatttgatgcttaagagttaagagtacatctcctatgtcttataactgttgtaacatctagggatggacttgaaaatgacaccaaattagtgggtttaggttgggcctgcttgtggcaactggattgcccatgtaattgatcgtgtcaaatgatatgattatgacctaacccatttacaatccattttgctcatataaatttattaaagtaatctattaaaaaattttaaaaactaaaaacacgtttttttataattaaaaattaaataattatgtgaagagagagaaaaagggagaatctctaattattgttattgaaaaactgtaaagaatacacattggacttgggtatatatatacatgctagtgggacccacaatacaataaggaaagaaaaggaaaaggaaaagtaaataacctaaataactatacattatctaacactctccctcaagctggagcatatatgttatatgcaccaagcttgttacaaatgtatttaattctaggacctctgagagatttagtaaaaatatctgctagttgatcatttgaattgacaaaactagtcgccacacatcctgatgcgatcttctctctaatgaagtgacagtcaacttcaatgtgtttggtcctttcatagaagactggattggatgcaatatgcaaagcggcttggttgtcacagatgagcttcatctgttcatcctttccaaatctcaactcccgaagaagatgtttcagccatatgagttcacatgttgccagacacatagctcgatactcggcttcagcactagatctggtcactacatcttgtttcttactcttccaagatattaggttacctccaataaaaacacaatacccggaagtgaaacgtctatctgtgggtgagccagcctaatctgcatctgtgtaaccaacaacttgggtatgacctctgttctcgtacaacacaccttggcctggtgtgcttttgatatatcgaagaatgcggattacagcatcccaatggttatcacatggtgactgtaggaattgactaacaacacttacaggaaaagaaatgtttggacgagtaatggtgaggtagttcagtttacctacaagtcgccgatatctcccaggatctcctaaaggctccccctgtcctggtataagtttgacatttggatccataggagtgtctaccggtttacagtctaacataccggtttcttccaagatgtctaaagcatacttcctttgggaaagaaccacaccggaactggattgagctatctcaatccctaagaaatacttgagtttccccaagtctttagtctgaaagtgggtgaaaaggtgttgctttaggttctgaatatcattctgatcactgcctgtaatgacgatgtcgtccacataaactaccagataaatacactaccctgaagagttatgatgatagaaaacggaatggtctgttgtactgcggaacatgccaaactcttgaacaacagaactaaaacggctaaaccatgctcgaggagattgtttcaagccatatagagaacggcgtaacctgcacactaaaccagactccccctgggcaacaaaaccaggtggttgctccatataaacttcctcagcaagatccccatgaaggaaaacatttttaatatctaactgataaagaggccaagaacgcatagcagccatggagagcaatagacgaacataagctatcttggcaacaggagagaaagtgtcaccataatcaaaaccataaatttgagtatagcctttagcaactaagcgggccttaaggcgatcaacctgaccatcagggccaaccttaactgtgtagacccaacgacaaccaactgtagatttaccagagggaaaacaacaagatcccaagtgccattggagtgtaaagcagtcgtttcatctaccattgcctatcgccagcctggatgggaaagagcctcaggggtgctcttggaaagagaaacagaagatatagcagaaacaaatgcagaatagggtgaagataatcgatggtaactcaaaaaattgtaaatgggatgaggattatgagtagatcgattacctttccgaagagcaatgggtaagtcagtagaaggaggcagagccggggcaggagaagccgaagggataggaggtgagtcagcatgtacggtggccaaagaaggaggaacagtgacacgatgacggcgatgataaacctaaagtgggcgagaaggcactgcatcaggtggggagataatgggaagaggtaagacttcagaaacaggaagggaatcagaggtggagaaaaacggtgagtcctcaaagaaagtgacatcagcggagagaaagtagcgatgagtctcagaggaataacaacgataacccttttgaagtctggaatatcccaagaagatgcattttgtggctttggcagaaagtttgtcctgtccaggagtgagaatatgaacaaagcaagtacaaccaaaaacacgaggaggaaggaaataaagtggttggtcagggaaaataagggaatgaggaatccgatcgtataatacagatgagggcatacgattaatcaaataacatgctgtaagaacagtttccccccaaaaacgaaaaggaacatgactatgtagaaggagagtacgagctgtctcaacaagatgtcgattcttacgttcagctaccccattttgttgaggagtatgagcacaagaagactgatgaatgatcccatgttgggacataaacaaagtaaatggtgcagaaaaatattcactggcattgtcactgcgcaacacacgaatagaaatattgaactgggtttggatttcagcataaaatttctggaaaatagagaataactcagcttgatttttcattaaaaataaccaagtacatcgagaatagtcatcaatgaaagtgacaaaatactgaaatcctaaagtagacacggtccgacaaggaccccaaacatcagtgtggacaagttcaaaaggagactttgcccgattattcaaacgctttgggaacgagacacgggtatgtttcccaagctgacaggactcacacgcaagcaatgacaaagatgaaaaactagggaccattttctgaaacttggatagattagggtggcccaggcaactgtggatgaggaggggagcatcagtggaaatgcaaactgcaggtgaaggcgaggtgaggtgatagaggccttgagactcacgtcttatgccaatcgtcttccccgtactccggtcttgcaaggtcacaaatttatcagagaaagtgatagaacagttaagagtgcgagttattttgctgatggaaataagattaaaaggacactcaggggcataaaggacagaatggaaaggtagggaagggagagaatgagcgaaaccaaaacctttagccatagtttgggaaccattagctaaagtaacagtaggtaaggcagaggtagtagtaatagaagagaaaagatccttattaccagatatgtgatcagaagcgccagaatctagaatccaaggtccaagagaagatgtgtgggtaagacaagcagaagcattaccaatctgggcaacagaatcaacagaagctgacttggtggcctaatagcggagatagtcgtcatactcactgtcaatgaggaaaataccctgagatgtggaggaactgggaggttgaggcgactgaggatcagatgactgggccacgtgggcagtgtggggaggccgcccatgtaactgataacaccgatcacgagtgtggccaagcttattgcaataggtgtaatgaggacgttggcctctacctcggttaccactgcgtcctcctcgagagttagtttgagaaactaacacagaagaatctgaagtgttatcaaatggcaaagtctgagtggaggagatacggaggaggcgagcaaacacgtcatccaatgatggaacggaggaactgccaagaatctgatcgcgaacggtctcgagatctggacggaggccaataagcgtaagaaccatgaagaacttgtcaatctgcatgcgttgatccccaacatcagtagtaagaggcatcacggtcaagaattcctccttaagagaggcaatctggtcaatataagaagataaattcatgtcttgttgtttgacattgacaatagaagaagtcaccttataaagacgttggatatcattcgtgtatagccctttcgcctgattccaaaatttaaagcatgttttgtaggcccgaagatgatgcagaatcttaggatcaactgattgccataacacactacataactgtgcatctatcttcctccattgtactttgtcaacctcagggatatccgcctcctgtgtaacaaggtgatcctcataaccttgacccataaaccaaagctccacaaaggcaaaccaggacaaataattttcactgccaaccaatttctccgaagtaatcataggagatccagatatgacagaggaaaaagtggaacttttagtagtcatatctacttatctggtgaatgaaatacgtttggatcgaagagagccctaatatggcttatcgcggacttcctaagacacgtgcagggctcggggtggagaggaagtcaccggaggtcgccggaaaggcggtttagagggccagcagagacaaaaaacccaaaaaaatgcacttttagggcttagatgacacaagcgcagatggagggtggctagacggcatcaggcgaggctggaggtggaagcgggtggccagaaagtgccccacgcgctggcgcgtgagattcaggccgccggaaaagagacacacatggccggcgcgtggctgggattcttcctctggtgctttgagaaaagttgaagatctcctccttgtgcacctgatggtatggtcggtgtcggaaaaggacctcgccggaagtcgccggaaaagtcgccggcggtgagggttttccaacgacggtgagggttgatcggaagcattaggagatgggaagggtgatcagaatgaaacacgatcactgaaagatttcccagaatagattcacggataaaccggaaataattaaggttttttttctccctaggctctgataccatgtgaagagagagaaaaagggagaatccctaattattgttattgaaaaactgtaaagaatacacattggacttgggtatatatatacatgctagtgggacccacaatatagtaaggaaagaaaaggaaaaggaaaagtaaataacctaaataactataaattatctaacaaattaaagtaacatatttcaaaaattgtaatgtaaaaaatattttgtaactaaaaagttgaaaaaaattctaaaacaagtgtaaaataaaagttcattttgatttaaacaaaaaataaaaaataaaaacttaagaacaaccaaaataatatattttgaaaataatactttatacatgtaagattttgaataagttaaacaagttaaaatcgtgttaacgggctattcacatcaatccgcatacaatccaacccaacccaacctatttattaaatgagttatacaggttgtgtcatatcatgttacccatataataaacatatcattcttgtgttgcataaattttcagtgtttttttattaactctatttggctcgacccattgccacccctaatagcaactgggagtgataaacatgcataacccaaggaatgctgagttatttccatgccacccttgagagattgcatgtggtaccattcacgtggtagtgagcacaatatgtactagtcctgttgttagggtgggcttattttatgcatagcaaaatcagtgtatgggaattttccacttagtatcagtaacatagtccatgcacaccaatgagtcaattgtttaattgcaaggtaagcatttttgtttttttgaaggattcattttcatctcaaatttgtattttttgtttcaggtttctgtccttcctccattagcttctatatttgt

SEQ ID NO: 12520 - DNA, 2115 bp, Vitis vinifera
  Intron number 6 from transcript GSVIVT01022524001 (locus G SVIVG01022524001) derived from phytozome v7.0 (chr-ID chr8 ; pos 4338566 to 4340680)
caagcggtaagtactagtttaaagatccacttttgaatgctttatgaaacatttggtcacataaattgttaaaaatgagagtttatatcaagcatatgaatttttccttggatgttggaatgtatgaaattttaataccatgttttgtttttactactgatatgagctgatataaaatgccatgctctagagatacctgaggacccacgtgacacttagataattcctatccttcttgagtttctatattagcccggcctacagctgctagatgatgtctacactagtaaaaatagaaagccagcaatgatgcaagtgtattacaagctcttgtcaactttaaggtgaggtgagttgaggtgctttgaccaaattggattaccatctatttataggcacctaggaccattatggaacatgatgttttctcagactcttcataagcttcttatacaacgtcgtctttatatactgtggtgttgtaggtactccctcccctattcaaggccatagcatttcaaactactttgggaaaaccctacctaattctagaagcatctaagtatttgtccatttctaagaagcttcagtaagggacatgagttgatttctctgtggttttcttagctgttgggatcttgagtgccccattagcatttgcacatagcacaacaaagagtaagctatgggagcaaatagaggtgtttgtaccaaattatgaaaatttctgataaaagaaatctaaaatctgcaagttttaaatggagaggaacagagtaatgaaaaacagttaatgtaagctccttttgttatttctttcactatttttacccactcctagtagactatagactattgtatataccttatgttgtagaactctcacttgatttgttttaatgtttcagttttgttacaaaggaaccacaagcgttaaaaatcatcagaattttgaaaataggactgtagaaaaaggaaagtcattcatataagtaatatcaaactttactagaggattttaggaaaataaaaataattctgtgaaggtatttggccaataactacacttagcacaaggaggaaaaggtggtgtagattagttctaatatatatatatatatatatatatatatatatgtaatcaagaatgatgtaaggaaaattttgcttaattgatatctctaatattcacaaataatatatgaacaaactactctcggtttattgcaatagttacattatttatcaaaaaaatatatatatataggaaaattaatttcaccaaattcattgggaggtcaaacctagaatgtatttcctaagctatgttttggagtaatactattttgtcaccaaattaaccattacatcataagccataaaaaattcaatgctaagaaggtttcctgttataggatttagggaaaaggaaagagctgaacaggtgatcaaatttgtggataccaagttgattgcctctaaaattatgtcattaactataaaagaaagaaagaaattgcagaaggaaccttagacatacaaagtaactttaaaggaagtccattctctccttcatttatgagaaagaagttataggatttgactgaaaatatcagttgtatgtcaattgaccacttacttttatcctccgcataaacgaagattcactaccctgctcttttcttagaaggttttgcttcatttttggttcatttatgatgatataaatgatcctatatatatttttctaataaagataaaacttaatgtttgtcttaatgccctagtcactattagtttgaacaaaagtgggttgggttatgatatcctctatgttactactgcccaggtacttgagttgtcttcttgccatgaatttgataaatgtagttaataacttaattgtgacatgatttcctaaaatttaatggagggcattattgtaagtgtaaatcatgaaaatctatttatatattcaactttaaagagttggatattaaggctttgatgagttttgctgcagtaacctatgctatttcttccactgtgtcttattacacttttatttctgttaaatatttcaggctgatattgacaatagtggcacaatagact

SEQ ID NO: 12521 - DNA, 5101 bp, Vitis vinifera
  Intron number 3 from transcript GSVIVT01027558001 (locus G SVIVG01027558001) derived from phytozome v7.0 (chr-ID chr1 5; pos 15604791 to 15609891)
catataccctttcaatcttcacgtgtccctcaccacattctctctctctacaccacactacatgtccctcaccaccttctctctctacaccacactacatgttcctcacctcattctctctctacactacactacatgtccctcaccaccttctctctctctacaccacatcatatacccgtcttcgttcatgaccaccacccatccccgcactatgcaaggatcaccccgaaccctcttccaagccctccattaaagtcccattctcgtcatgcctaagtccccatgaaggatcgctccatgcttgagacgccatgccaccctcatcctcatgttcttcacgcccataactcatgccaccctcatcctcatgctccccatacccattgtacccgacgtgcccatccccaagcccaagctgtgatgaggaatgggtcttaggcttgcccataggtggaggtttgagcccaagcccaatgttgtgggggggatgtttgttttgggtttgcccatggcacagatttgggcttgagtttagaagcccagcccaggcatataaatggagggcttgagaataagtgggctgtgatggagtatgtgttggtgatgggtttgggcttgcccatggtgacgggtttgggcttgaattggagcccagccccagcatattgatggggagcctcattgctcctcaaactaatcactctcatgggccatacccattttaggatagcccatttggctatttcatttctaaataagtttttttttaacctctaatttagtaatttattaagtcattcttttttatttatttatttatttttcttctttatttcttatttcatttttaccaatttagttaactcaaacttaaagacaacttaaagacaaattattattgttaattatatttttatctcgaaatttatactattcaatttcactagcttaaacattatgattgttaattattcttattatttcgtatgtatctatttatcatctttaaaaatctcattcgttaaaacctaattctaattcttcaaaaatccaacatcccaaatttaattttcaatctcgaaatttacactattcaatttcgttcatttaaatatcatgtttgtcaattattattattattatttcgcatgtatctatttataatcttttaaaaatctcatttattaaagttaaattctaatccttcaaaaatcccatatcctaatctaatctttcaataattggttcaaatcttattttcatcaattgaaattattatcatgtatttacctagctatttaaagtctaaccctttcaaaaatcccatgtcttaatttaatttttcaataaatccatttaaatcttattttcatcaattagaattattatcatatatttacctagttatttaaagtttaagtccttcaaaaatccaatgtcttaatttaatttttcaatagttcgtttaaatcttattttcataaaatagaatcattatcccatatatacctagttatttaaagtctaagtccttaaaaaatcccatgtctcaatttaatttttcaatagttcgtttaaatcttattttcatcaaatagaatcattaccccatatatatctagttattcaaagtctaaatccttcaaaaatcccatgtcttaatttaattattcaactattcatctatatcttattttcgtcaattagaattattatcccccacttatctatttatttaaagtccaattcttaaaaaatccaacgtcctaatttgattttcaatcttaaaaattccactattcattttctattcgtttaaaattttgcttccgttaattagtaacattattccatacttatctatttattcctcttaaagatctcaaccattaaagtctaattcttcaaaattccgatttccaaatttagctatctgaaattccaattgtcctatctccgaacttaattttcacttctcaatattccaattatcgtatttatccggttactcacttattgttatcactattattgttatcattttattcattcgtttctaaaaggtccgccttcaaatgattttcaagatttccaatttttataaatcaactttcataatttctacttctcaaataacttacaactctaatccctttcaaaattcaactcccaaagtcccaattttcgtaacttaatttttcttaaaaatcccgaactttcaaataattcttcaaaatcccaattttctttcaaatttaatttctaaaagttctcattcttacatttaattcctaagaatcttattttcaaataatctctaagattccgattctcaaaggaatttcaaaaatccagttttccttcgaacaattttaatccttgtttagtgatacatttgatatattttgtgctctatatggtgtactaaccctctctattgatagcgcatggtggctcgttgcccaggtatgtacccattttccctctaatcgttgtctatgtatgtctcgattcttatgggtgcatgatcattcaagatattcattgacttactcatcaattgccacgtcagtttcattttattagtagagacccaactttagggacttagaggggtgctatggtattcaccgtaccttcccgataagtaacctgaccctcgaacccgattcggtttttcgtaaatcacattttccaaaaccaggagtcgcacttagagttttcttttttattttgtttacccttttaaaaataaaacaaaaataagtggtgactccaagtcattttcttaatcaataaagatcattttttcaaataaaaattgagctcgccatcgagtgagaaacgcatgagctgaaatacaggtccacagtttgacttttgaaccatgttgtttttgcctatctttgaacccattttgaactttcgccattgtttatatatatatatatatatagaagatatgattatgagtgtgacgactagtctgatttgcctattttggtttatgttttattctcatatattgtaaaatatggagaaaattaatattatattagtatgattagattaagttgataatttattgtattaatctaatttaggactttttatattcttctagaaactcaccctttattaaagatttaatatcggtctagaataaacatatataagtataaatagttataaaaaagctaatagcttttaacaagtagtataaagtagactttaggaaatgatagtttgaacgactttaaacttaattgaatttttttaaaatcaaaagttcaagtgctcatatatgggattcaagtgttactgttggctagagtgttcaaaggctgagttgccaaattctccaatctacaaagtaatctacaaagttttattttttatttttccatattttgacaagcccattttagaaaattgagattttgaaaataaccaaagttcattaagattttagttttggatatgttagtagcctgaaagtcattaatcggttctagctcatgtatcctcataaatacttctctttgcattttttcgatactcataaagttagtttataattcatttttaaatttgtgaaataaatttgcatcccttgaaaaggttgaaaagttcattaagaatcatggtaatattcgagattaaattgtttaggtaataagttgagcaacaatgataaggtaaatatatgtgtctattcttcaaactgatttatttattattgttaaggtaaatttaatttttatcattaaattttaaaaataataagggaaccaagttttcaatcgtgattttcaatttttgtttctaaaattttatttagaaacaaaaattgaaaattgaaatgcaattgaggcattctaaactatttattgagatgttgatactaatagcctaaataccatagatccatttagaatttattgtaaaatcttttttaacctctaatgtttctattaataacattcttactagaaatatttttttgaaaactaatttaatattgacaaaaaaaaaaaaagttttgataatgtttttgatgatatattgcaaaaataaaaaaaaatgatttatataaaaagtattccaaatataaaatataatttgtgagatttataaaaatttatcaatgtctgagctttattagaaatcatatttcaaacattaacaaacacttttaatcacccaaaaatcactcctaaacatatttttaaatacaaatatgataaatatactatgttataaataataaactttctttctacaaatacgatatataaatatttttattttttaaaagtttatattttaaaggaattttgagtcaaccttctgttatataattgattaggattccaagattgccagcctagtttggaatcattttagtggggtaaggaagattaacaaataaatttctattaatttacaatatcactgtaaaacctttactaattaattaagatgggttgcacagttgcaagaagattatcatttaaaatatttattaattaagatatcttagaagatgtggtagattactattctattagaatatttggatttacgagaacgcccttattgacgatcctttgcttcgacaatgtttagagttcttcgaacaatgtaatataattttacatgaaaattaaaggcatgtatatccttatattaagtaatattggaaaggtaaatgcaaagttctaaaataatatatatatatatatatatatatatatataaatattttttttttttttaatgggtgatgtatagttgcatttcctttgggaaataatatacatatatacggatattcctagtgcggtcacgtcttaggcaatcgtggatctgtttccacccctcacatgtacattccttgtgcggtcacgtttacccaatcgttgatctgttcccaccacaataattattattatttcttttcctcgagcgatcacgttttacctaattttggatctgttcctactccaagctgctcgatcggcggccttggaaacagttttattctgaaggtaaaaggtataagctgaagtgcaagcagctgagagattgaaaagca

SEQ ID NO: 12522 - DNA, 14814 bp, Vitis vinifera
  Intron number 5 from transcript GSVIVT01027676001 (locus G SVIVG01027676001) derived from phytozome v7.0 (chr-ID chr1 5; pos 14453113 to 14467926 reverse strand)
ctcaagtactattcagctggggagaagagtgcttggtaaaacattctttcaattgtggtttaggatcctttgcattcttgttcattatgattcttatgattgtttttaagtctctctgttctttgcccaatcatcaattattttcttttcgtaaggagggaggatattttgtggttggtggatattgttttcctattgcttctaagtcctaagctgtatcagaagaaaacttgaaccctctttttcttttccttttttggggagttgggaggtggaagttgagggatgtaattttcgtagcttcagcattttagatttaatggccaatagatcatatggtgattggaggacatgtaccatctctgtgcaatttgaataaaattagcacatgatagctcgatttctattctctttgcggttggaacaggtacagtgcatcaacaatatccatgtttaatttcatttgccattgctaatgtcttaaaccttcagaaccattctacttgtgacacttaactgcaaaagcccacaattctgcctttccagttggtttcttaaaatgaatgataaatcttactaaactgtcacacttccattcgtagttctttcctgacttgaagatttatctattttttatccatacaaaatatactgaaaagttgaaaggtattaggaagtatgatagtttggctgtccaatcagagttgtttggcagaatttgttctcattttatttctaaattgaatgattgtttatgaatgaaagttggagttactgattccaaggtcgaattaaccttgctaatgtgaatttgttgaacttagatttgtttatttcatgttatctcgtgctttgataacttacactggttctgactggtgctctatgtgaccaacttcttcaaaaaaagattattttagtttttacccttaccctcgacttttcgtagatgtagactttagtgttctcgaaggttattctttaatggagtatcaacatcatggagttattgaagggccttattttggctcttcctaggatgctgtaattattttgttatgaaaattgagttgcatctatttctgccaaccgtttagtgtcacatgggatattttgtttagtccttattgctcagagtcttatgtcctcttttataacattggagtgcttccaggtgtttagtaacatctttcattcatgaaatactaaagaaatttataaatttcttgtgtttgttacacatcaactacaattgtcgtactttggttgggtatgacaaagatggagccataggtaagagttgctctggactatatggagatatgtgttcctggttctaatctctgcagtgtaaattgtataaacatatagagattctaagtcatggctgatttagagatggttttcgaatgttgaagactcgaaaggtatgcacatctataatactttctcatgtgtattttttctcatttttgacataaatttattgatcatatgtccttccattctgctaatgtccttgatattttgttaaagatgatggaacctgatagattggtatattactgccttcaatcatggtgggttatagttttcgtgtaggctttctagcaatcttgcgttcactttgttgcagattagaacgggcttttaggaatgggagtgcataaacagggtttcactcctcttagtcatgtacttgtagaatcctctgaactctgttcctcctgtttttggaatttactatttcgtcgcattgggcatatgttttaacagctacaaaacaaccaatttgctttttcttgaacatggtctttttctatgggcttgttcctctctgcagatgatttcacctcattatcatgcacggcaagtaagtagggtttgaaggaccatttgatttgtaatgttctaaacaacagtgacgttggtgtttgcatatatatcagattttaccaaccacaaaattgatggagaagattcccagtaagtccttgtgtacgaaatcacctttgctgtcgactgaattgcaataagaaccaaatggaccaattcaaaagttcgtacttggttcacccactcttgtctggaatgtcagaagtggaaagaagaaaattccaggacactaaggggggtttccttgattcttccaaatgaacaaccgtgtccagtaaacaaagcttaaagcacagcctattgaccaaggtcaatgtgaaaaatcgattttaggaactaatgtaaagaacttcacgtcaaagggcatgtcatgaaattgaccaaatagtagtgaagcagagttttgggtcaaaatgtcccatttatataaaaaaaaatattggatgtaaccattttatgaaatttatgtttaaattagtctctttgatatttgatgttacataggaggcatgtcataaaaatatttttttttttttaattttagttaaagtctcaattggcaactgagatttcacttttaaactaaagtcacagttgttaattgagactttaatttttgaactaaagtcgtaattgctaattgagatttcatttttttaattaaagtctcatttgacgactaagaccttatttttgaactaaagtctcaattgtcaactgaggtttgagttatttttttttttaaaatttaattaaaaactattaaattataatttattattaaaatttagaatatatactttaataataaattgtttatatttaagcttaagaatctagtattatgtcaacaaatataaattgataaatagaagatattataaatcaatattttatttattaataaatttatataacatataaataagatataaaattatataatttattaatttaagatatttaatttgttgttttttaagatattaatttatttatactatgataaatttatttttatcgaaataatagtatactcctaaaccgcagttgccaattgaagtttcagttaatattttttttttactttcaaatttaataaaaaaactattaaattacaacttattattgaaattaaaaatatatactttaataataaattatttatatttaaacttaaaaatctagtattacttcaataaacataaatgataaatataatacaataaaataataatcttaaaataataaaattatatgacatacaaataagttatcaaattttataatttattaatttaagatatttaatttgttattttttaagatattaatttatttgtattatgacaaatttatctttatcgaaataatagtatactcttaagttttcatatatagattttttgataaaattagttaatgaaattaattagaaaaagtctactaaaaaataaaaattttagtagtttcatcaaagtcacaaaaaatactcactaaacatttatatgctggaaaaaaaaaaacacatataatctcatatgcctccacaaataaagaacccatggataaatttgatataatacaaataaattaatatattaaaaaaataataaattaaatatcttaaatgaataaattatacaattttatatcttatttatatgttatataaatttattattttaagattattaataaataaaatattcatttataatatcttctatctatcaatttatgtttgttgaaataatattagattcttaagtttaaatataaataatttattattaaagtatatattttttatttcaataataaattattagttaataatttttaattaaatttaaatttaaaaacaaaattaactaaagtctcaattgacaattgcggttttagctcaaaaatgaagtcgtagttaccaatagagatttcagtttaaaaatgaagcatcagttggcaactacagcttcagttcaaaaatgaagcctcagttatcaattgaggtttcagttaaaaaataaagtcacaattgtcaattgaggcttcacttaaaaaatgaagtctcagttgtcaattgagactttaactaaaatgattaaaaaaaatattttttgtgactatggaccccgcatttcgcacgatgcgttcccactcaatggtgcaactcgctttttaattgatttggtgaaaatatgatttttagaaaagacttggagtcgccacttatttttgttttatttttttaagggaaaaacaaaatcctaagtgtaactcttgaagaaaaaacaggtctatgaaaaatcgagtctaggtccaggggtaaggctacctattgggaaggtacggtggtgagccgtagcacccatctaagccccaaaaaacgggtctctactaaataaggtgaggcaagtgtggcaattgataaggaaatcgatgaatactaatgaaatgatcgaataataaaataaatcatacataagaataagctcagtgggagtgaaatcgtaccttagaagcaagtaataatgcgctatcatagaaacatggttagctcaagtataaaattatcacatgaatatcaaagagcaagacaaagatcaagcaatattcattaaacataacaatcgacaatcagaaaagaaaattcatatgtaaggcccccaccaaagcccaaatgattttgcatgaattaatcccacaaattccattgttttggaattatgaaaattgcatattcatgcttatttaaaaaaattaaggaaaacaaaagattatttgaaaatgaaagaaaatttgtgaatctaaaatatttgaaaaatggagtggaattaaaactatttgaatgaaaactggagttttgaaatttatttgaaaattgaagtctcgaaaattaaatttaaaaatttgaattttgaaaaaattatttgaaaatgggagttctgaaaattcaatttgaaaattggaattttgaaaatgagagttttgaaaattggaaaattaaatgtaaggattcaaattttggaaattaaatttgaaagaaattggaattttgaaagttatttaagaattggagttttgaaaattaaatttaagaattggggttttgaaaattaaatttaagaatttgagttttagaaattaaatgaaaattggagttttgaaaattaaacttaagaattcgaattttggaaattaaatttgaaagaaattggcattttgaaaattatttgagaattaaagttttgaaaattaaatttaagaattggaattttgaaaattatttgagaatgaaatttttaaaattaaatttgaaagttggagttttggataattatttgaaaatggaattttgaaagttaaatttaagaattggaattttggaaattaaatttgaaagaaattggaattttaaaaattatttgagaattggagttttgaaaattaaatttaagaattggagttttggaaattaaaattgaaagaaagtggaattttaaaaattatttgagagttggagttttgcaaaataaatttaagaattggaatctttaaaaatttaaatttggaaatttgaactttggaaaattatttgaaaaatgaaattttgaaaattggatttgaaaattggaattttagaaaagtacttgaaaattgaagttttgaaaattaaaatttgaagaattgtttgagaattaaatttaaaaaaaataaatttaaaaatcagaattttgggaaattattttaaaatggaagttttaaaaaattttaagttgaaaattgaaattttggaaaattatttgaagattaaatttaaaagtgggaattttggaaaattgaactttgatataaaaaaaaaatggagaattaaaatggaaatgtgggttgcacccgcatgatagcgaattgaaatcaatttaagtggaggaaatagtgagaaaaaaataggtttggtggccgtatgagaaaatgggaagaatggaaaattggaaatgagctaatagtattaggacccatcatttagttgagttttccatgctatgttatgcccatagcctcaattgtgccatttctaggtggaaaaactcagctgagcaaaccaaattttccaaccgtcatcatgatgataataagtcaagaactcaaaaacaaagatgggattccaaaacaaagcagaaattctctaacctaccatcacaaaatcccaacaaaaacgaaactcagaagatgtataaataaatagaaaaatatcaccttttgagaaggaacccaaatggaaaaaaacctgaggaaaccccactgcatgtaatgacttcttcacaacttcctaataaaaaaccatcagactctcaacacccagatcttttctcccagtctcatcttatcctacactttacctctccctccggaatccacttccactcattttcatcccctctcctccctggtttccatgctcagctcacccatttttttatttttcttccaagctaccacccgcataagtccaactctctcttttcctctcccgaaaagctagatctccacttctcatctctctcaagctattcacgttttccagcactccccccaacagctaactcaactcccctgtttttcttccaagctactactcttatatttccttttcccttctttgctctaaaaaaaaactctcaccaaaaagctctctcagcctatttcctgcagctacggttcaaaaatgaagaccctcactccccccaattgtcccaagaacccactctccagattttttcttccccaaaaaaacttcacccaactctgtttgttttttctttctctcccaaccgtctctgtttcttacagctctccccccccctccggaaaactcaccagttttttctttgaaaaactctcccctcacccgttccactgctccctatctcattctctgtcatccgttcaaaaccaatcccatttcaaccaccaccatggcgagatggtggtgtgttcttggtcatgcgtcccatgcatgtggctccaaaggaaaccgacccccactctaaatcatgctggcagcaaagtacttcaaaaataataaaaaagacttacgccaaaatgagggtctacagtgacaaagctcctacttggtaccaaaatatcaatttgaatataagtttcataaagtggttatttgaatataagtttcataaagtggttatttgaatataagtttcataaagtggttagatcctatatattttttttaataaatgggtcattttgacccaaaactcagtgaagcaccacttgtgttttaccggaaaagcttgtggtttagaaaatctctttgcaacaaagaaggatgagactttgggacccaagcatccatgcgcatggaactgtgaatttttagttgttgcattaaaggctttgccctccattcacttccacacatgattctttgatgtgcacgtttatttgagtttacagccaaagtagtatttctttggaaaaaaaaacccaaactaatccaattttcaaactatttgccaaaatactcttttgaatctacatcagcaatccacatcaacaagccatcttcgtcaaacttgttttttttactttggagacccaattttttcccgaaatcaacaatccagaaagtattctcttttctacggctccattttctctcttcaccggttgcggctcccaccagtggctcccaccagcagctaggtaaatttttttcgggttcatgagttttttcccactcattttccttagctttctcaccaaccaaatagaggaaaacaagttgttttgaaaattttaaaaatctcaagttgttttcaatttcatagctatccaaaaaacttgaaaaaccctttcctccaccttgtattccttttatcctggaacccgaaaaaccctaacctttgcctcattttcctctcatctcggaatcctgataactgttgatctgcccatgattcatcttcatcgtgatccaaaatatggatttcggattggatgaaggtgggggagagagagagacttggagaggttaaggttttttcgaattggggtttcgaaatggagaaaaaaaaaattcttttttctataaaaatggagttaatatgttggaaattaacatagttacaatgcatcaagtggctattaattttagaaaagaatatgtttcaatgagttcctcaaaattgggacaaatggtctattgctatctggctttgattatacctggaataatgatgatgtattacaggacagggccacccctgatgaatttgtgactacactatcatttggtttattattttctgttatccctgcacatgaagtgtaaatttttctttttagccaattccaatcacaaattggatgatgataactgttgatgatgttttttccttttaacttttcttggataagtatgtgaaagatgttattatgccttggttattaaaatgagagtttactgactgaaagttgaagggtttgaaattaaatatggcctttagcagggtgcttaggggaaacctatgaaatcccaatatggaatggaaatacactcctgcttaatgtatagcttaatgtactggtctttgctttacactgatcaaagcatgctcttcacattagtgctaatttttcatattttttgtggcatattttacatgttcaactttctcaaccattactactggtcaattacaggtattatgggaaccatatacaacagatttgattgcacatcttccggctatatgtcaggctgatgaagaaatttggcgaactatgttacctctaatttgctttgatattatcgagtggcatagaccagagcgagttttacgccagtttcgtatgcaacaagggatacctccaccttgtttgatagatatggagctacatttagtggataggcgaggacgacatcagtacgattgggtcacattccatgctcagtatatttctctttgggctactcgttctgagcgtattgcgacagcaccacttgcgattactaccatgtctttttatgatccatatatgcagtggtatcgacgtatcatgcgacgcctgatcgcacctgttttgcatagagatcatatgaggttccatagtgcagcttctgccactgagttattggtgaaagcatttgagatacaaaaccattttttaatgaatgttaaacttaaattatgtgcaaatgcctcatgtttcattttcttatacagatcaccgtcgtatcgcagatggctatttcaaatgatttagaggaaactcattgaattgctattgatgttttacgtgctataggagaggaccatcatgtacactcgacacatgagccatccacatcttcagggtcatccatgagaacaccatcattgattacgcctgttagggtaccacccattagaggtcgggggagagatggtcgtcgagctggtcaccgacatgtacctttggcatctactttggtacaaccctcacatccaccaatcacatctacctttcctttatttcagccatctgcatcattagagtcgccactttctccccctgatgtatccataccagcctattcacctcgacccgagactaccataccatctacccttacccctgttcagccatctatatcattggatgcacccccacctattgcagagtctattgcacccccacctgttacagagtctattgcacctccacctgttatagagtccattgcatctctaccttttcttcaggggacagctcatgctacacgattacatgtactggtacctagaggacatcgagctccacgtgtacgtcgagttctacctccatcagttccatctatctcaacaactcatgtagatgacgtgtcacagtctatagagatggagacttttcatatagcacagatggatacaacaaatatggccatctaccgtagatgttcacaacgaaagagaaagattccatcatgtgggacacattgagataatttttcatgtttgtagaactattatactttggtttatacatttaaggttatataaagtgttaattcaaattagtgatgttatgttattcacatgtttccttgataatttaaacaaataaaactcaaatgtatcctaaagtctaaatgaaagaaattctaactaaataaattattacaaccattacctatttttctttcatataattaaaaaattatacattttaaccaagacataagttcaaatcatacttaataataaataacctaaaatcataatcattggcattaattttcatatgaaaatataaaattttaaaataatataaacaatttctttagttattttaaattttaaaaataatatgaataaataattttctttagttcatatgtgaaaatatttgtaaaacaaataaatattttatttaccataaatatataaacttttatgggaatgcatgtagaccaaattattttctcaaattttcaaggaaaatatgaaaaaataaagataaaatatatatatatatatatatatatatatatatatatatatatatatattttaaaacagtcataataaaaaaatttgtgagaagcaaagttctaaaatcccatacttttttacacatgagttccccttaaaaatatttgtgaaaattacaacataattgtaattttgataaaaaaaatattttaaaaataatattaaaattacaacaccattaaaatagagtattgaaaataattgtaaaaccacagttgctaactgtggttttatggttgttttgataaaaaatatttttaaaataatattaaaattacaataccattaaaacatgtgtggattaaaaataattgtaaaaccacagttactaactgtggttttaagggaaattgtaaaaccatagtttgtaactgtggttttaaggatacttcttttaaaaccatagttatagtaactatgattttatgggtattttgataataaaaaatattttaaaaataatattaaaattacaacaccattaaaatagatgtggattgaaaataattgtaaaaccacagttactaactgtggttttatagttattttgataaaaaatattttaaaaataatattaaaattacaacaccattagtaaaaccacagttagtaacggtggttttatggttgttttgataaaaaaaatattttaaaaataatattaaaattataacaccattaaaatagggacgaattaaaaataattgtaaaaccacagtttgtaactgtgttttaaggatacttcttttaaaaccacagttactaactatggttctaagataaattgtaaaaccacagtttgtaactgtggttttaaggaaatttctgtaagttttaaaaccacagtcaccaacggtggttttttacacttaaaatccatgtggatgcttacgtagataaagaagactactttgacaaatattttgaaatggatactattcttatcatttttttttacaaataaattattttggtcttaaactccgtttatttcacttggtgttttcaaatccaatcaatcaagacaattagggtattagaattttttcttttttataaaaaaatttgaaaaatgtatttcacaatcaaaaattgttttttattttgaacattgaacaagatattttcaaaaactatctcttaattgtttttacttgttttcatttatttttttagagttattttaaaaattaattataaaatatgtatattaattaaaaataaagttttagacaaaaattatttttaaaatatatttaaaaatattaaaaacatgttgaaaatatttcaagttctgaataagtttttgttttaaaaagcagttttcaaaaactattttttaaaactattttaaaaaatatttatcaaatagaacattttttctttaaactttgcacttctttttccactaaaatcacctattttgaattatcaattgatccatcgttatggtagactagatttcattcttgtttttaaaccattgagtagtgaaaattattcaacacatagtagagccatggttatgcctcttaagttccaagtaaagaattaggtgtattaatggaccgacaaaaaagcaacaatccgcgatagttcacatttcaataaactgcttcgctacaacaatatttttaacaattataacattatgttcaaacacactaaattttaccatattaaaaagttttttttttcctcaatttttaaggtgtccaaatccttaagtagattaccattttcaacttttaaagcatgatagaggtgtggacccatgtttttcacgtgtgttctcattcaacgacgaatctcgctttaatttacaaaaatagtttaaatataaacataaaaaatgtataaaatccaaaactaatattcaaatccgaattcaaactttaaattaatataataaattttaccaattaaaatgagtctaaattaacaaatataactcaatagaaatatcccacatgctataggttttagcccaagatttgtaaattaataatcaaaatgcaagcacaattagaagaaggggggtttggggtctctcacgtggggtatggggagacagaagggaaaaaataaaagcaagcaagaaaaaaaagtaaaataaaaaataaatgaataaaatatataatataatataatataaaataacataacataacaaaaaataagatttaaagggtatgagtgagccaaaaaaatcaattgtgatcgcatttaaaatttaaagataaaattagacttaaaattaaagtaaaaataaaattaaaacaaattttaaagtgtacaaaagaccttttacaaacaatgcatcataggtaaaatgaatatcatcaaaattaaacttacttttataattttgattcattttaaaaaagggatcacaatatgaaacagtcacaaatacaacataagtaactaaattattttttactttacttttataggaatcaggaatcatcacactcacaatcatcaaacttggtataatttcaagtcacttgcattgcttttttactattttaggatttaaatgtcatatgtgctattttgctacagttgaagcattcaaatttcttgctttttagacaaacccttctctttttccatctttaatttttggccatttcccttttttcaagtttgattttgtaagagatttttgtaagcttacattattttttagcaaaaaaggaaagttggtcaaaagatcaacatggatcctttggtttgtcaaactcattaccttcatttataaaagcttttcggactacacacttcgggttcttataattaagtagaaatatctcgcaaatttgaagaaaccctacaaatttatcaattctcatgagtcaatattcttactttcctatatggtagttaccttaggtcaaaattcccgagggagatactcaagaatttttcttactaccttatatttaaggattttcacctagatcgaaactagagttgacaatatcacacaactcaacatagaaatcaagaaaattacatcatcttgcattctaatctatcaaacctaatagttaacattttaattttgaacgaacttcatcctaaaagtgcccctataagtaaaagatgttttgaatatgctaaattttaccgtgtagaagtcaaggataacattgataaaataacttaaagatgattttggatttcacttgctttgatgaatcctcttcacaatatatgtgaaataatttagcaaaggaagccaaattgaaatttgtaaaacaagacaggtagaacattttagagttaaccaattccaatgtgtgcactaggatcatgttgacatattaatatgatcaagttttgtacttgctctcattaataaacaatagtgcttggagcattaatatgattaaaaaaattaaaattttaatttgaaaaagaaaagaattataaaatgtgtaataatataatatgtaatatgtagaaaacatttttatatatacgtcaatataatttaatattttttatttataaaattataaaattttaatcatgaatattattaatatagaaataagaaataattattaaatgataaattataaaataatttttaaatgatagtaaagatgaaaaagattttatattttttaataacaaacattaacatatgatatattttttatttaaaaaatatcaaatattaaaatttaatatatttttcattctatttcttctacaaaccatgcataaacacgatgcaacatatctcatttgatagtccaatgtgctaaggagtgagaacaaatggaaagaaaactactccataataagaggtccaagaaaaatcccatctgaaatttcaattttttttatcatttgactaaaaaattactaagacacgcatctatatctattgaatttcaaatgtaagttactaaaagtgtacaaagcaattcggggttttaaacaaaaatgtgaatacatgatattaaaatagataaaatcaagtataaataaatgagtgtagaccccctctcggggaggagttagaggccattttattttttgctgatgactattcggaccatcccgggattttagctgaaggagacggcgagatgggacgtctagtagtaggcagaatggcttgcccaagaaggaagaaaatattatcttagaggggggggaatcaggagcggctgggagctgggtgaaagagaggaaaacgggtagcagttgggaggtttctttgaagagaaaaaaatctggagagcagaacagaggaacgggaagagagagagagaggagctgggaaagaggggttgaaaaaggattttcagcaaaagggattttcgggattctccag

SEQ ID NO: 12523 - DNA, 13301 bp, Vitis vinifera
  Intron number 1 from transcript GSVIVT01010817001 (locus G SVIVG01010817001) derived from phytozome v7.0 (chr-ID chr5 ; pos 22974131 to 22987431)
aagaagaattcctctctattttgttagtttccttacttttatctatggcgcgcatccaaatataataaaatcaattttcttaaaaagaaataaaaatcttatccttaatgctttccaataactaaaaataatttaaactgacaagccatgtcttgtatgtatcattcacttttaaataggtgtgatcatgtaaattaaagtattgataggtgaaggaacattgaatcatgtgaatgatatacttttctatttttcatttgtttaatgaatgaatcatgtgagtgatatatatttttattttccatttgttttgattttgttatggttgttgtttgtttgtatagtctttttttttctgattttttttccctacttgcaagaacaatctgacattatataaagggttcgttaataaataacttattatttatcattgaacatatactaaaatttcttgaaaattaatctctttaatattataattttcttttcatctttgttcaaaacgtatattagtattatgcaactaattaaatagagagtccactaaaacataaaagctggtatttgataagaatatggtaattttaaaaaataatttgtaaactacagtaatggatcaagaatttctaatagtttttgtcaactagaaaaattgaaagccaaatctttttaaaaagacgatttatttacttatttttttaaaaaaaaaaagttataagaaaagaatcgtctcttgaagagacgatttttaataatctttgaatatatttttaatacgttcttcattaccataatttacaattttttttaaattaccacaaacttatcaaaaacccacataaatatcttgtaagtcctataaataaaaaataaaaaaataaatatcaatataaataaataatcttccaccataaatggttcccataactcatagaaatatgggatgcccatgtgcaaaataggcttaatgtaatagagttattgtgtgaattggaataattattgctcacttataactgttattattacaaaatagggaaaaacataataaaaacacactattatttgttaaaaacacacgggcccctcaaaatctcataatttttcttcatcaaatatgttacaccgcgagtttttcaagttaaatcaaatagaattcgagtcaccaacctctaacaattatcaaatgataggtcatatttaaatgaataaactctatataatagacttttttagtggatcttgtctaatgaataatgttagaggctaattcaaatgggtagtattcttagcattcatttgagaacattttctatctttttttatttgtaaaattagaaatgtagaacatcttaatacctcaattttagcaaaaaattatttattagaaactttaaaatttgagataataaaaaattttaatacctcaatttttttaaatagtttttaaaatcattatttttttaatataagtttttttaaaatttgtgtatcttatacacaaattacatgtaaccaaatgataattaatctaataaattggtcatatgtgaattaaaatagttaatagttacaatcattgtcaatgcatcatgtctagtaggttaagcatattaagagtttctttgacattctgattctaagaaatacttttagtttaaaaagttttttttttcttaaaaaaaaaaaatacattaagtgttggattaattttatgaaacatttttaaaattctaaaaaatcacttatagtaaattatatgtgcttttttaaacatttttttacttttctaaaaaaatttattaagcaaataaatttcaaatcaaagtatacttgatatttaaaatttattaattttaattaaaatttattaattttaaaaagtacattgaaactcaaaaaatgatttaattaacactataaagttacagaactcaataacattaaaaatatagaccaaactttattttcaatgacttgattagattcttctttacatatataatatttttataaattatttaattaagaaaataaactccaaattaaacaaaacgtgtttggcttattaacgagtttagtaatttttaaaaataactcaaaattcaaataatgatccaattaatataaaaaatttatgaacaaaaattagtcaaaaacgattttattgttatcattattttttacttaaaaaaaatagttatatcataaccaaagatttcaatatgcaaaaaactatcattagattcaataatggacttttattttgaatttgaatattatttaattattaatatcaatgaatcatatatgaacgaatagtgataaatggaggaagaatactccatcatgtgaatgctataaattgatgcatgtgagtttgaacatccctctatattaatagatgaacatgtaagaaatgtgaatagcaatgcatgtgctccacaacttttaatggcatttaaatgggtcatcttatcttttccgtttttatagttacatatgctatctagaaatagggtagctgatagagttatggaggaaaatttcttcaacaccataaacccatcaccataggtagtgataacaaatagtattgtgcgaacaaaaactttcatacaaacaaaattagtttacggacataaaggaataaaacaaaccatataaaattatgtaaggttttaacatgattcaataaattacgtcaatatgcatggataagagataagagagaatcattccactctattataaaaaatattacaaagagtaaaaactagatgcaactatcaagtttcggaaacatcttatatttcctcatttcttcatcaaatatctctacgtgagctgaattctacattcccactaaccagagatttcatttctaggtgggcatttattttttgtttgtcttccttttatttttccctcagatgtgtggcagttgttctcagttttcacatccatccattcattcggtaaacatagtttaataaatagaaattttgaattgctcctacttggattgaaaagataaatctgcacctgctgataaatgacatgtttgaatgaagacttgtgtgaaacttttttgttcctttccctgaagggaaagatgttgcgtggaaactctaccctggggtgagttgtttaggaagatcaacgacacacaaggggtggttgagttggtcgtatcgagggttatggagaaactcaatgttgtgctgattcaagaaccagtaattttggttggagttgaagaagaggtccaatggatccaaaggaaattgatgggtcttggggttactcatcgctatgacttcacagaggaattaatggacattgcctacaattttgaagatgtgattgatgaccttatacttagaacagttgcaaaacaaagaagaggaaattgggagagatgcattttattagttagaattcacaagaagctggaaatgatcaagtctaagatctctcatcctcctgcccgaatagctgtaccatattctttggaaattcctgaatacttggaagaaatggagtggtcatccatgttctcaatacatggccagaacctgacaaacacagttgtttcctagtggaagagaaggtgtcagctctgatagctctagaggcacttcatctagatgctaagaagaaagtcaggcgggtgtaagatatttacataatcacatagattaatcatacatgattaaaggatactaacaataggaaatcactataaagaacatacctgtttgagtcatcataaaaaaccgtgattgattgttgcaaccaagtcttcttctctatgaccttgataacaactatggtggctcgatgggaaaacagaaaataccctttttatctagattaaagaggggacttagcataactcaatatttggttctcattgggccctcccataatgggcttcaatgagacccatagcctacacttgccactcaactgagcttctactcaaaagatgcaaaacccaatccaaaatgtgatcgctagttaattgggttcattatacaatagactatccattaactcatttttgcaaatacaaattattcaattaatgttagcccatataaaaaaatttccaacattctcccacttgggctacattaattgtttttgaggattcattaaattcattttaaaataagactctcaagttaagtacataaaagtttattttgtgtggccacacttttttttttttaaagaaatgatattctataagcagcatcttgttaaacttatccagtccaacatggtcttaatattggattatgatggtctatatgttaatctcaacaaacataatgccccttatagtcacgaatatttataaccatatcgacatggatcgtaaacccagtagtgtagaaagaaatcaatgccaacatgtgatcatcatctatatgcattgtttcttatccgtcctcattacaatttaccagcaaaatgaaattgtaattgcaatttctcaataaaatgaaattgctgcaatttctaaacaatatgaaattgcttgactttaacaagtcatatgtcaccaacaatgcaccacaagatctcaaaatagtggtatttgtgacatccaatagtatacaactgtaattcttaaggttcaatatctcaagataccatgttgtatgtaattcaattacgacatgctataatataatacttaattatgatgatcataataaaaagattttaattttgcacatcgtggaataataatgatcaatgtttacacaaaacaataattgaaataagggaaatcacaaaagctcccactaaaccaaagaatcaaaagacttaacgacacccatattcacaaaacctgtggttagaggatcagctagcatggactcagttcttatgtgctcaatcacaatatctcatttcttcactaagtctttgactctaaggtacttgatttccatatgcttagaacccgtactaatcttattgttcttagagtagaacacagctacattattgtcacaataaatcacaatgagtcgaaagatggaatcaacgacttgcaactctgaaataggatttcttagccaaacagcttgagatgatgcaccataacaagctacaaactcaacatacatggtcgaggatgtaattaggctctgtttgacacttttccatgaaatggctccaccagctaacataaaaatgtatcctaaagtagatttgtgatcgtcaggacaaccactaaaatcagaatttgagtatccaactacctcgagattatccaccctattatacacaagcataaaatccttcgttctttgtagatatctcatgaccttctttgcagcaacccaatgatcatgtctagggttcgataaatatctaccaagaatagtaacaatgaaggcgatatcaggtctcgtacatacttgtgcatacatcaagctaccaatggcactagcataaggaatagtgttcatggtatccctttccaaatcattctttggacactgttcattactgagtttatctcccttcacaacaggtacatcacctattttgcacgtctgcatatggaatcttttaagcacacgattgatataggctctctgagatagtctaaggaggttttgagatctatcacgataaatctcaatacccagcacaaaagatgtttctccaagatccttcttgttaaaattagcagacaaaatacgcttggtatcattcaagagattcacatcactactagcaagtagaatgtcatcgatatagagaaccatgaaaatgtacttgctcccattgactttcatgtaaacacactaatcaaacttattatctataaaaccaaaagacgtcacaattttgtcaaatttcaagtaccattcacaagaagcttgcttgaggccataaattgaccttttcaatctacataccatgttctctttttcattttccttaaatccttcaggttgtgacatgtagacctccttactcaaatcaccattgagaaaagctgtcttgacatccatctaatgaagctctaagtcaaaatgagctaccaatgccataattagcctaaaggaatcttttgtagagactggtgagaaagtctctgtgaaatcaatgccctctcgctgtgtataccctttagcaaccaaccgagccttatatctttcaacatttcctttgttgtctcttttggtcttgtatacccatttgcgtccaatgggtttatatcctttgggaagatcaacaagttcccaaacatcattgtctgacatagactgcatctcatctctcatggaaatcaaccattcatttgccttatcactactgagagcttcacgataagtagtagggtccacttcttctccaatgtcatactgtccctctccaaggtaaagataataatcgttagataaggcaggtaagtcttctagttctttgtgatctcctcatttccacaacataaatctcatccacaataaggtttatttcgacagtggggaaattgacagtagcaactccttattgaatcccagaatcaaaagctccaacatcaaggttaacattcgagactagcaaaggtaaagaaataacatccatgggttccactctttcatcggattgagagggtatactattagcaacatccaactctaaaaactttgccacttgagactcaacaactctagtgccacgaggcaaacaataaaacttgtatccttttgagtgactaggatacccaataaagtagcacctagtagttctcgaatcctttttctataaagaaggatcatagattttcacctcaactggacatccccatactttaaaatgattcaaattgggttttctgtctatccatagttcaaacggtgttttaggaacagacttactaggaacatggttcagaatgtaggttgctgttttaatggcttcaccccataagtattctggaaaatttgatctacccatcatgctcctcttcatttccataagagtgcggttgcgcctttctaccacgccattttgtttaggactaccaggcatagtatactgagcaacaataccattatcttgtaagtaccttgcaaaaggtcccttttgctgtccagtatcaccatgcttcccataatactcaccacctcgatcagatctcataattttgatgactttccctagttatttctcaacttcagttcagaagactttgaacatttcaggaacatttgctttttctttgataaaaaaatacatagccataacgggagaaatcatcaatgaatgtcatgaagtacttgttgccacacaaggtagtggaataaggtccactaatgtctgtatgaacaatctccaacaaattttgactacgagttgcacccttttttcttatcctttgtcaattttcctttcacacaatcaacacaaatttctaagtcatcagaatcaaggcggggaagaatcccaaaactaattaagcgttctactcattctttagaaatgcgccccaaacgcttattccataacaatggagatctttccttagtcaaaggttttttagcaacattgtaagaacaagtagataacaatgataatctataaagcccgtcagataaaacacaattgccaatcactttagagtcataaatcacatcaactcttttatttgcaaaagtgaaactatatccagctttatcaagtactgaaagggaaattaaattccttctaaatgaagatacacaaaaaacattgtccaaaacaagctaaaaaccagaatctaattctaaaatagcaatcccaatatgctcaacatcaatcccgatgtcactgccaactttaagctttgactctttttcacttggcttcctcagatttcttatcctctgtaaagaagtttcaacatgaacagtagcaccactgtcaagccaccatgaatctaaaggaacattaactaaattagattcaaaacagacataggcagataacataccctgttccttttttttcttctctagccaattcttaaacttaaagcaatcaaccctcttgtgaccctttttgttgcagtgatagcacttaaggtctgtgttcttggcatttccattcttctgcttttcactcccactcttcttgaaattcttgtttttcttatgactatggaagttgggttttctagccttttcaactatcttttgattattcggttttccaagagcaatgggatgagcaaattcattcttttctcttttcaacttttcttcctcaggcacacacttagtgatcaggtcattcacaccccaagactgattcagggtgttgtatgcagtcttgatttggctgaaagaagatggcaaagtattgagggcttgatgaacaatgaacttattgggaatgggaatgtctagtgctttcaatctagtttgaagatgcaccattttcaggatatactcacgaacccctttcatatcatcatatctcatattcatcaattcatccataaaatggccaacttcggcattgtcagatgtttggtatctatttgccacaacaacgagaaattccttagcattgttgctttcaggtattccttcaaggagatgctcaacaatggacctcttgattgaaatgagactcaaacggttcgatctttcccatttcgcataatgagctctcatagcttcagtgctttcattagtaagcttagaaggttcatcttcgcgtagagccatgtccaagtccatcattcctcaaacaaactctatttctgatctccatctcttatagttcgacccacttagaatttcaattgtagcattattgttgttcacagcaaaggaaaccgattgacaaaattttgcaactagatcaattatgagcaataggtaaaaaacttaaataagcataagcaatacaatacaagaatcaattgtactatcataaactcccctttgggcagagtccacaataaacaactattctctaagcatgaagatcaacaaataattcattaaaatttatttcatttgggcaaataaatttatcaaattatttatctcattcaatatcctcatgttgttaaattaatttgcacaataaccccctttgggtaggcgattgtacaaattaatctaaaattttccccatcaacaaaataggaactcataaacttgcaaattttgatggttaaatcactttggtgaaataacctcaacaattcacatgaaacattccaaaattgggtaaattaaaaacaatattgcccaacaacaatagtgcatattagtgatataaatgcatatgatcagttatagttgcaagaatttgaacaacatttttttttattacactttaaactaattatttaactagtttatgtgatttagtccaagtaggagagtatgcttgaaaaagtttcaatctagagagagtgagtactacactcctattccatatatattagcataatttctggtaaattctcaacagaaaattataccaaaaaataattttaagctaattaaatcacataaataagtaataattattcaataaatattttgacccccaaaaaataaaataatatatccagaaaaatagattacaaaaaaacgagcgtacaagaaaaaacggggctcaaaacggacactggatgaggttacacatgcctcacacacttgacccgcgagtggggaacgtgtggcacatgtggcacgtgtggcatgtgctggaggtcatcttcaacctccagcactgggtcaaaaattctgcaatacgagtcaaatgacctggttgcaacccggattacaaataattgaataaaaaaggttttttttttatatcaagatcttgagaggttttaaactttaggttgtttctaacaattctaggacatttaatcataaataaaaaataaaaaaaataaaaataaaaaacaacttaaagatctccataattgattaacaaaattcggtttttcatacctccatagccaagatcgaaaaactctattttaacacctatttcggcctcattttacatgtatttttaccttaacaatataagaaatctctctaccacaattaattaaacaaaaaaacttctcaatcttgctcattttttaaaaaatataaaacaaattttctatggttcatacccatattttcgaattttcaattttcaccaaattgagcaaaaaaaaaaaaaaaaaaaaaacgaaattgatgctacatatcaactacaatatatgtaaacaacaaaatctaagagtttaatttgagtaaaacacaataatttgaacaaataaattttttttcttgaatctttaaacaagaaaattccgaaaattgaaaaacttaattgctcccaatttaagcaacaaaattgcacatatgatatatcaatttgaagcttgtgacaagaggaacaaaaggcctaaagtttcacaatcaaaagaaactaaaaaaaacatacacattcatggatcacagatcagctccgaaaataaaataaaataagaaactaaaaattttattttcgatttccaattgtagatcctaaattatgtaaatctggctctaataccacatgtagaatatttgcataatcacataaactaatcatacatgattaaaggatactaacaataggaaatcactataaagaacatacctatttgagccatcataaaaaatcgtgattgattgttgcaaccaagtcttcctctctatgatcttgataacagctatggtggctcgatgggaaaacagaaaagaccatttttatctaaattaaagaggggacttagcataactcaatattgggttctcattgggccctcccataatgggcttcaatgagacccatagcctacacttgccactcaactgagcttctactcaaaagatgcaaacccaatccaaaatgtgatcactagttaattaggttcattatacaatagactatccattaacccgtttttgcaaatacaaattattcaattaatgttagcccatataaaaaaatttccaacagcgggtactagacaaattcaagtccttggatagttttcggaaaggcttaaaatcagtagaaatagatgatagagaaatggtttggatggaggagttgtcccattaaatataagatagttgaaagtaaagttttttttacttaaaacttattttttatataataaagggttaattttattgagacccgttgaggtctagtgtaaatatactaaaccaccacaagtttcaaattttgtcaattagcatccctataaatgtatttcacatataattttttttaaggaataaaatttggtttttagagaattgttaaacactcttatctaaaatatttttacttaagacatctctaaaacataaataaaataaatttataagggtgttaattaatgaaatttgaaaccaatggtggtttagcatatttacatcaaaccttagggtcttaatgaaattaatcctataataaaggcttaatgttaagactttgatggacctacttgttattcttcttcatgtaaaaattttagtagttaatgaaaacatgacaaatattaagttctataattcaaaatatactatcaagctatattttctccatgattaaaacaaaatataaactcacttaatttgaacaattaaataagattaaatcatgaaaattaaatataaaaaggaaaaagattggataaattaatagggaaaaataagtatgaaaattaaataagattttatttatttttataattttagttaaatattatattcttagtacttaatggtaagtgacatttttttagtaataatatttagttacctctacttttatattttttttagagagggcaaattttccatttttgatttttattttgctaaaaattcttaacatgtaagggatttttctttttttcttttttttttctttttttttttttttttttttgggaatttcgaggggggcacatgaccccagtcttacttggctccgctagtgcttttgcattttgttgtaaaaaaatagtcaatatttaactgcttcctttaaaaattaaataaaattattagttcacatgttaaatcaatgaaaagaaaaagaaaagtttaactttgacatattaattaataaatgataatcgacaggcttaatggctaatttaatagccaatagtgcaacattgaataatgaattttttatttagttgcataaacaatagatcatattgaaaggaatcatcttcacctgtatcatattcaaatgaatgttatatatatatatatattgttatggtgtgtgcatgttagaataatattaatggttaaatgaatggtcctcatctaatatacgtatggtgtgattaccttaccatcattatttaaatggatgatcctaatatgatagctatgttgaattgtgatcaagtctgaatcagttatgtcatactttgcttacgatgtcgatggttgaactccccgccaaactcgtgaggattaagttacctaagtcaactagtaggggttgaagggggcaatgccccatagagaagttttttttatgtgatgaatgatgagtttattcctattatatatttaaccattttatattttagctagttttgcttttacacagtaaagatagaattgaaaggtttttttagagtttcatcattgtgatcttattttctcttgattagtgggttcttgagtattgcaagacttcgtggagagatcacattgataatcaaatcatgttaaaatttcattttttttattttttttttctattggtgtctatggtttgattaacaagctagggttgtggtaattggaataattttatttaatagcattatcaatgaatcatatttaaatgaatgatcttcatatcatgttcatgtgagtggattcccaccaccacattcaaatgaattggaatcccactataatattcatatgattgggaaccacgccatccccaacagtgggaacttcccatgctttcatggtctccactgtttgaatcttggccctgcaagcttgaatacaagctctctgctcattcaaaaagtctgttcaatctccatgtaatcacaaagcaaacatcccataatttcattaaaagggcaagtggaagtggatctcaactattcttcatgtgtgtgaccctccagatagcccaagctaagcagcgagcacagtgatataaagaggagcgaagtactgacgctgctacatcaccaaatccaaaatttg

SEQ ID NO: 12524 - DNA, 7622 bp, Vitis vinifera
  Intron number 5 from transcript GSVIVT01035717001 (locus G SVIVG01035717001) derived from phytozome v7.0 (chr-ID chr4 ; pos 3614786 to 3622407 reverse strand)
caggtcagatgtaggtcattggaaaatattttcatttggtatcaaattaacatcaagttataccctttgattttttttttaattaattgaaacatgaatttaacatacttgtgtgtttttaaaatgaattgatctaatttaattttaccgatattcatgatgaaccaaaattttgaaaagaaaacttaatgtattcattaagatatggttttaataataccttcctttcaatcccgatattcttggatattatattagatgaagtgacatcttaatatatcatatctaataagatatgttatgacatacttatattttgtttgtaaaaaaaaaaaatattgaaatagaaaacatattatattttaatgttcaatatttatttaaaataaaaattatattacattctaatatttccgtttataatttataatctaataagctttttatttctttaaataatgtttatgattaaaatatttaaaatttgtaaataaaaatattgtattatattgttgaatatacaaatatatatatatatatatatataataaacatattagtattattttacaatgtattttatacatattttatagtttttttagctacaaatttaactttttttaatcaaaattattgtagcataaaaaaaaaaattgatcggaagtgaatttacaatttatgagagatgtatatctcatgtctccttgagattatcatatctcaaatacatgaaatatatataaaagatttacttataacatcggtttgctaattatgagataaaatatatcatcatatcttttatcctttaatcaaatataggatatgatatattatcttatttcttatcgtatttcatattataactagtcaataatatgagataagatgagagataagataatatatcatgtctcatatttggttgataatgagatatgatgagtgatgtaatatattatcctatatatatatattttatatattgagatatacatatcttatggatcataaattcacttcttatcaattttcaaataattttggttaaaaaaaataaatctgtagttaaaaaaaatgtataaaaatatacataaaatgatactaatatatatatatatatataccattgaaatacaatatgtttttcattgtatttttttattccttttagaaaccaaatataagtatgtcaactcattccatccatataattgatgggataaacacaaacaatacacaataagattttatcctctcttgtgagaacctaatatgaatcaatcaaatggagcaacaagaattcacccaatcaacaagtatatgaacaccaacaatttttagcgtggaaaaccttctcccatgtgagaagtaaaaaccacgagacccttaggccacttaaaaacttcactaatataatcaatgagttacgcaattctctctagataaaactagaggcatacatcaaccatatctcaagacaaattaatcttgacaatttcaacaactttgcgtaaagacaatggagaaatcttaccaaacacaaccactgttctaggactgaaatataattgtcccgaactccaaatctaatttccatcgttcaggatgaagatcaatgagttctgaacatgctcaccaaaaatcagctcaatcgaaccacagattaaccttgattccagctcatgatcaaaactgtccggatagaaaactcaccaaaatagagactctgttcttggactgaaagacgaccattcggaactccaaatccgatctgcaccgatcagattgaagatcaatgagtcacgaatctttcctcaaattttaggtcgatttgcccacaaatgaagagggatcgggcatttgatgaaatctggacagtgaagaaaaattgagtttttccctctaacttaaaaaatggtggttctcccattctctctcttttctccttctactctctttttcttctacttccagtggctgcaaaaaaattggaagaagaagaagagagattcttcttctaacccttttatataaaggtttaagaggccttaaattttgggctcttaatttgggccttccacatgaggaaaaacccaacaaatctccctctttccgattatgtggaggggctcgtcatcccgacgattgaacaacaaacttcaagcttctcccttggtaaggacatcgtcaacatatctgagtcattgtgatcggtatgtatcttctcaagttcaaacaggttgtcattgagaggatctctcatccaatgatacctcacatcaatgtgcttcgatcttgcatgaaaagtagaattcttactaaggtgaatggtgctctggttatcacagtataccacataacaatgttgcttgaacctgagctcatgtatgaaacgcttcatccacaacaactatttacatgcttttgctgctacaatgtactttgcctttgttgtagaaagtgcaacacatttctgtggtcttgattgccaagacataacacctcatgagaatgtcatcaaatagccagaagtagactttctattatttacatcccttgccatgtttaaatcagtgtagccaacaagtactagtttcctactttcaaaagtccatttgattgcctcccaatgtagtcttcttggattagatagaaagtggctgacaacaccaactgcataagctatgtttggtctagtacataccatgacatacatcaaacttcctactgttgaggcatacgaaactcttctcatgtcttccttctccttatctatagaagggctatgtctgttgcttagcttaaagtgactagctagaggagaactaaccactttagctttgctgatgttaaatctttcaaacacctttttaatatattgctcttgtgacatatacaacttcttggatgctctatctcgctcaattctaataccaagaattttctttgctgaccctaaatccttcatggaaaagtatttgtttaactgctttttcaacttatcaattcttgaaacatttctgccaacaatcaatatatcatcaacatagagcaacaatataacaaaatcatcatcagagaatttttgcacaaatacacaatggtcagaaatagttttttggtagccttgctcctccataactgattcaaacttcttataccattgcctcggtgcttgcttcaagccataaagatttttcttcaatttacacacataatcctctttttcttttgttgtgaaaccctctggctattccatataaatttctttgtctaaatcaccatggggaaatgcagtcttaacatccatttgcttaatctccaaatcaagactaactgtcaagctcaaaactacatgaatagacgacatcttaacaacatgagaaaaaatctcatcaaaatcaatacctttcttttgactaaagaagaagaagaaatattctttttctaactcttttatataaaggtctaagaggccttaaattttggcctcttaatttgagccttccacatgaggaaaaacccaacaataatatcttaccatatcgttccattagatataacatcctagatgtaatatccaaggaaaatgatatccaagatgtacaatcaaatgtaggctttgttaggtttttcctcatgtggaagacccaaattaagagcccaaaatttaaggtcttgtaggcctttatataaaagggttagaaaaagaatccttctttttcttcttccaatttttttgtagccaccggaggtaaaagaaaaaaagagtagaaagagaaaagagagagaatgggaaaaccaccatttttgaaaggtattgattttgatgaaattttttctcttgttgttaagatgtcgtctattcgtgtagttttgggcttaacagctagtcttgatttagagattgagcagatggatgttaagattgcatttctccatggtgatttagacaaagaaatttatatggaacaaccagagggtttcacaataaaaggaaaagaggattatgtgcataagttgaagaaaagtctttatggcttaaagtaggcaccgagacaatggtataagaagtttgaatcaattatgggggagcaaggctaccgaaaaactacttctggccattttgtatttgtgcagaaattctctaatgatgattttgttatattgttgttctatgttgatgatatcttgattgttggcagaaacatttcaagaattgatgagctgaagaaacagttaatcaaatccttttccatgaaggatttggggccagcaaaaaaaattattggtattagaattgagcgagatagagcattcaagaagctgtatatgtcacaggagcaatatattgaaaatgtgcttgaaagatttaacatgagcaaaactaagtggttagttctcctctagctagtcactttaagctaagcagtagacataacccttctacaaataaggataaggaagatatgagaagagttccgtatgcctcaacaatagggagtgtgaaaccaaggtttggttaatcttgattttgatgataacaaaacaaagtttagaataaatgattatatttcaagtgtgattaggcaagatgatttccaaagtggcaatcacaaagacaaatcaagccaaggagaaatcatgaagaagaagaccacttcaaagagaagtgtttttcaagacccaaactttataagatctctttgtaaggttgttggtgcattaggattttcatgcattacattctttatttatgcaccaaaatcatcaaagagttattttgttttaaatattttaagaattagatgatttcatgttttcaactaaaaccttgtgttaaatgtttttcaaacttgttttaaaaggttttaagttgaaaaagttggttgttgacccaaaatatggctcaactggttgaatcggatgaggaactggtcgaccgcaagctcaactggtcgaggtttgggtcgacccccagctcagtcggtcgaggtttgggttgaccaccagctcaactggtcgaggtccgagtagacccccaactcaactggtcgagggttcaaaaaactttctctttcttccagaacggttgttcaaccagtcaaggttgaacctcaatcggttgaggtccggtcgaggtctggttgaggtttggttaaggcctaacggtcacctgctaagtattaaatgctaacggctagtcaaccggttgacccctacctcgaccgatcgaaccctcaacggctagtttgacttttttcttctataaaaaggctctaatcttcattgtttaaaaaacttaaccttcccaaacctttcttgaatatatttaagctttggaagaatgtttttgagtgcaccattgttctaaaacttgcatatctttagtgcaccattcaatcctagttttcttgtatcatttgagcttaaagtttttgtaccaagattttgtgagatcatttatttgtaaatctttgagaggaagtttttcaagtgtggggtatcacttgaggggttgttcaagagtgagatatctcttgagaagtgtaaagggtgcttggagccaaaagtctaagagggtgaattggaaccataatccaattgtattgcttgaaggcttggtttggaagccttgaattagtggaacctcaagcttgagattgaagctagaggagagtagatgtaggttgggttgcgtcgaaccactataaaatcttgtgtttgcattttctcttccctactcttttaatttatatgcaattgtttttatattgtttattatatacttgcatataattgtctcttacattcacataatttaaatttgcaaaaagagactatcaccctattcaccccccctctaaggtgattaccataggttggattagcctaatttttctaacaggaagtttgatgtatgtcatgatatgtactaaaccagacatagcttatgcagttggtgttgttagccgctttctatctaatccaagaagacttcattgggaggcagttaagtggattatgagatatttgcgaggcacttccaagttgaaacttacttttggaagtgggaaaccaatacttgttggctacactgattcaaacatggcaggggatgtagataatagaaggtctacttcaagctatttgatgacattcttatgaggtgttgtgtcttggcaatcaagactacagaaacgtgttgcactttctataacagagacagaatacattgtagtagcagaagcatgtaaaaagttgttgtggatgaagcgtttcatacatgagctcgaatttaagcagcaacacaatatggtatactgtgataaccagagcgccatttaccttagtaagaattctacctttcatgcaagatcgaagcacattgatgtgaggtatcattggatgagagatgctctcaatgacaacttgtttgaacttgagaagatacataccgatcacaataactcagatatgttaacgaagtccttaccaagggagaagcttgaagtttgttgttcaatcgtcgggatgacgaatccctccatataatcagaaagagggagatttattgggtttttcctcatgtggaagacccaaattaagagcccaaaatgtaaggcctcttaggtctttatataaaagggttagaagaagaatccctcttcttcttcttcttcttcgaatttttttgcagccatcggagatagaagagaaagagagtagaaggagaaaataaagagaaggggagaaccaccattttttaagttagagagaaaaactcagtttttcttcactgtccagatttcatcaaaggtccgatcttgcttcgtctgtgggccgatcgacctgaaatttggaagagaggttcgtgactcattgatcttcaatatgaatgatggagatcaaatttggagttccggatgatcgtctttcaatccgagaacaaagcctctgttttggtgagttttctatccggacagttatgatcatgaactccgatcaaagttaatccgtggttagattaaactgattttgagcacattgaaaactcattgatcttcattctaaacggtggagattggatttggagttcggaacaattatatttcagtccgagaacagtggttgtgtttggtgagatttttccattgtctttatgcaaagttgttgaaattgccaagattaatttgtctatagatatggttgatgtatgtctctagttttatttagagagaattgtgtaacccattgattgtattagtggagtttttaagtggtttaagggttttgtggtttttacttctcgtattagagaaggttttccacgctaaaaattgttggtgttcatatacttgttgattgagtgaattcttgttgctttatttgattgattcctattaggttctctcaagaggggataaaatctgattgtgcattgtttgtatttatcccatcaagcttgaggtaatagaactgaagtgtccttcctctttccaaccattgaactagcggtgaaagcagaaatatttgtgcttctcatacctttttagataatatatgtgggcatttttgtagactggttagaaagagttctttcagaaactaaacca

SEQ ID NO: 12525 - DNA, 2045 bp, Vitis vinifera
  Intron number 2 from transcript GSVIVT01009623001 (locus G SVIVG01009623001) derived from phytozome v7.0 (chr-ID chr1 8; pos 10005095 to 10007139 reverse strand)
gtgtcttaaaatattctactggaggagttcttgaggtatttctttgatttcttttgtcatatttagtcaaagaataacaagtttcagctgccttgggtctttaaataaagcttcatttagtgatggtcacctgtcatctattgtaaggtatgagtgctcttgcagtcagcctgtctatcgtcctcagacttaccagaaaatcctagtagcctaatgatatgtgttctggaacagaatccaaaccatggtacattttatgattttttaaaaaaaaaactaaattagtgctcgtttagattcacttcttgttttttaaagaggaaaaatggtaataacttctatataaaatttagtaattcttatataaaaagtatgtatttatcttatgtctttaaaaatcattttaaaattttttacaatttaaggttggaaaatctttttaatacctcaatttttttaaacagattttaaaagtcattatcttttcaaggcaattctcaaagagtttttgtattttatataaaagttgctatcatttttgtttttaaaaatagaaaacaagaggtgtatctaaacaatacctcagcagtccaatttttgttttgttttgttttttttctcttattcttactgtttgtgaggtgaaacatcaagaaaagaagtacatatgaaggagtaagagagagctcccaaaacttaatacattttacaaatacccaaagagagggtagttacttacaaaagtttcttgagagaagcatcatgatttgccaattgatgtgctccagatattcctacctctcagatattcaaaagtaatttgggaactaatgccaatggagtgatgtagaaaaatttatgtttgttgaagatatcagattctctaaatcgtaagctggttaaaaagagaaatgcccttgcagatggaactgacttgtcatgcttctgccatgtgatgtgatttttataattgtatccctaccataccttggttttatgtgtctctactgcattgtacttctcattttgcatattaaacaatatatgatccaggtaacataggtcctgtttgattctttgttagtcttgctatcatgatttatgcccttataagttataaccaggacagaatatctagccttaccttagttttgctatggatttgggcattataaattcaatccaggctgaggcttagttagtttttctatatatatttattaatattagttgttgctcctattaattgattaatttatttagttgattggtgcgggttgcactagtttttttttttttttttttttctatgggcaaaacgagaatatatattaatagcacttgacaaagggcgcatcaaagtgcacatgatgtatataaaatacacaggtaaacaaaaagaaaagagccaacaaaaaacaacctctctctccttagttggaactcaatcaatctacaaagactatcatggtcatataagtataatttatgtactttcaaacccaattaaaaaagatatgcataaaggaggatttgattgctagttcttattgggctccaccagttcctcttagggcggcgttcagcctgttgttcctggctctaagggtgtgtcaaactcagtcagtgtaatttgcactttacagtgctggctttatccagcaagtgcttttagatttgtatctatgtctgggtagtaggattaactaggagctagtgttcatctcccatgtaaaagattccagcaccgtacatatcccatcattaccaattaaatcagaaaatggtttagaccttcagctgaaatgatacatttgaaaacttaaaatttgatttactacaatatagaaaggaacaaaataagaaggaaacattcttaataagccagaaaagaaaagaagtgaaaagcatgctcaaagatatatatgctattaattttccttgaggttatgactgcttgaaaattatgtttttgcctgatagtttcataaaaaacatttgaatgtgcagcctgctaaattgtacaagttaaagcatctctccaa

SEQ ID NO: 12526 - DNA, 4724 bp, Vitis vinifera
  Intron number 15 from transcript GSVIVT01030703001 (locus GSVIVG01030703001) derived from phytozome v7.0 (chr-ID chr 14; pos 14037012 to 14041735)
cagcattggtcatactggtcagttctctctttctgtagaatgtggacaatttatcagcccataggattttgctagtcaatactgtcatctatgcacaatccttctttgtctttctctacttcaagactgtatggggccttacttttccaactagggaagcctctttataaaatgtactttggaattcataaattatgttttactcatctgttgttgaccattgtgtaacaggaggttcagattttatcttgtcacattccatatcatagcagaggactgaatgtcatgtaaaatacttcagttaggtgaattataataaatctggtaaaaattgagaactagaaggaaaattttaaatatgaattggcatctaaggaaccgacttgctgctataatgtgagaaatctggtcactttggcaaatcgtttgcctcactttgttgtgtatggtgtggcaagagagaaatgctaggatttttgaggataaggggagatcaaaagagatgttatgggatttacttcatttctattcctctctttgagcctcttgtactactgcttttagaggagttcctcttagtgttttacaactcaattggactgcggtttgtgattcaaaagtttgagatagttatggtttttctttgtatatagttttttaaagttgggtgttttctcttttgatcggtttctgtttttgtgggaaggcctctcatccttctcttgtatctttttcttttcttgtatctcatccttctcttgtatcttttcttctattaatacatttttcttcatttctgatcaaaaaataataataataataatgtgagaaatctggtaaaaatttgagaactaagagtgaaatttaaatatgaattggcatctaagcaattgactcatttctataatgtgagtggagaatattgattaggatcaagtttgttatgttctgtttttaaatttaaaatataattgttgtaggtgattaggaagctttctctgacgtctcaattcctatctggttgttaggtttttcactttaaatgtactggttgttcattctaataaattaagagcactatttcatttattttctagcctctgtttacatggtatcagagttgtacctttggtcctagggtttaacagctaaaacagccatggttgggactagcatattgcagggaagagagaacatttctctccaaattactgcccacaagttgaatggcaaaaatccatacttgttccaatatgaaggatgccaacttgccaaacacaatggtgtaatatttccttctcaactttataaatcttcaaagcattttatgtaattcatagtgagatttgggggccttctagagtaacaagcatctctagtaaaaaatggattttagcatttacatatgacccatacatgagtatgttgggtttatctcttgaaaaaaaaaaaaaaaattgaaacttgccaaatcttccaaacttccaaacttccattccatggtccaaaatcagttccaagcacaaattcatgttctaagaatggataatggtagagaatacttccattctatctttaggaaagtacctagccaaacaaggaatgattcactagagttcatgtgtagacactctacaatagaatggggtttctaaaaggaaaaataggcttttcctaaaggttgcaaggactttaatgttcacaatgcatgttcctaagtacctatggggagaggtccttaccgcctcttacctgatgaatagaatgtcatctaggttcctgaactaccaaactccaattttgagcctcatgaaatcctatcctcatttcaggtttattcactctctaccctcaaaatctttggttttacagcatttgcttataatcattcacctaaccaatgtaagcttgaacctcaagccattaaatgtgtctttcttggttattctcccactcaaaagggttagaaatgttgttgtatagttacgaaaaaaagtcttggcatccaaagatgtcactttctttgggtctcaatcctatttcccaatcatctttctttaagggtggacacaaccatgtgacgattgtttctaggaattatcattacacaatcctgctttagtcccttctgtttcttgtccttgtgtcatagccaaacctactatgtcatcaacaaatcaagaaaacttagaagatgggggagattttcaaaagctaaaccgactagggctttatgtttattcaaggagatccaacccttaaagtggatggcacctcatgtctcctcatggtcaggactttcaatcggaagtggcaagctagaatgattcaagtaatctcaattccattcccatctcaacttcatctattgaaaatgatcttagaaacttagatttgcccactacttttaggataggagtcaggtcatatatacatcatcccatctctcagtttgtgtcctatgaaaaactatcatcttccttctatatatgaggctctagttgtttcggagtgaaagaaggttgttcaagaggaaatgagtgcattagagaagaatgacacttgggaattgatgagtttgcctagaaggaaaagcacagtgggctgcaagtgggtattcactgttaaatacatttcaaatggcacaattgagcaatacaaagttagattggtggtgaagggatttactcagatttatggagtggattttcaagaaacctttgctcctgttgcaaaactcaatactataagggttctcctatctcttgcaacaaatctagattggccactacactaattagatgtaaggaatgctttttggaatggaaaattcgatgaagagttgtagatgggcctactattagggtttgaggagatagggagttctaattgtatgtagactcagaaagtcgctcaatggttttaaacaatcaccatgagcattgtttgacaaatttgggaaagcaatcaacaaccacaaatttttttccccaagcctaggcaaatcataccttattcttcaaacattctcaagatgataagatcacaatcttgatagtctacattgatgatatcatacttacatgagacaatatgagtgagatggaaaggttgaagtgaatttttgtctaagaatcagatcaaggatctaggaaaaatgaaataatttcttggaatggaggttgctaggagcaaacaaggagtttcggtctcacaaagaaagtacacccttgacctcttgaaggaaattgggaatgtttgggtgtaatctagtagaacacccttggagctaaactacaagtgtagatgaaatggagggacacccatggataagggtaggtaccaaaggctagcttctacaggaacccaaactacgttagaatacaaagattccaactacttcatagctccttgccttaagtgagcacaaacactgctcaccatttcatgataatctgtaaaatataaatctcccactacgatgagacactgacattctagaaattatatgaatggtacgcctttaaccctctgaatccatagtatcctatgtaatgtaggactatcttctaatatatcctcaaatgtatacaagtctttgccatattccttatcatatagtcttcataaaaaatctaacatttgtgtcatataggaccaaacttctttcattgtaagtgtggtaagtcaatatatgcatgcaccatgtgagaaacatttataggcaatagaatattgaggtacttgaaaatgactccaagaaagggattgttttttgggaagagagtagagaagaagattgaagctttccctaatgctaattgggttgggtcaaaagaagataggaggtctacctcgggatattgcacctttgtatggggaaatttggtgacacagcaaagtaaaaaagtctagtataatttctagacacagcactgaggccgagtttaggtctatggctcaagggatttgtgaaatgatctggttgaagctattgctaaaggagtttaagatgccctcacacagtcctatgaaactgtgttgtgacaagaaagctaccataagtatagctcacacccggtccatcacaatagaacaaggcacgtggaaatcgaccatcatttcaacaaagagaagataaaagaatggctaatatgcatcacctacattcctatgaaacaatagactgtagacatcttaataaaaggcttgtcgagacaaaattttgaggatatgacatataagatgggaatgttagacatttttttccaacttgggttggagtgcagagaatattgattaggatcaagtttgctatgctagttttattaatattctattttttaaatttaaaatataactatcataggtgattagtaagctttatctctttgaagtttcatctctattttcaaggaatttagtttagcctagattctgtttggttgttaggtttgtatttataaatatgttggttgttcattcaaataaattaaggagccatttcatttattttttagcctctggggagaaatgtgtttatcacttggtctcagacctttgctacagtcctaggagtacataggtatctgatgctgaatatatgtacatactaatgtctcatattgtcatatatcgtagcaagagatttggtgatgcagaattgataacttatagttgtgcctgcagttgcagtcccttgatactcttgggcttttggagat

SEQ ID NO: 12527 - DNA, 5570 bp, Vitis vinifera
  Intron number 1 from transcript GSVIVT01010786001 (locus G SVIVG01010786001) derived from phytozome v7.0 (chr-ID chr5 ; pos 22568320 to 22573889 reverse strand)
ctcttcccaagtttgattttgatgacagcctccaggggcatctaaggtttgatagtttggttgaaactgaggttttttcttggcattgaaagtgaagaagacaaccagtggattgaggatttctctcggggaagtagtgggatagagtttagttcaagtgctgcagaatcttgctctatatccaggcggaacaatgtttggtctgaggccacatcctcagaatctgttgaaatgctattaaaatctgttggggaggaagaaatcattccaggtcaaactagtgtcaaggactcaggtgcctgtgatgagttgggaagcataactaagcaaatggagcataatctgaaaccagacaatagcaatctttctaatgtgggtaatgttatagattcaggacctacaatacgcccatatgagtttctgggaagtttttctgttctaaacgatgcaggaaaaaaactacctcagattgaggatacgtccaaactcatgaaggtgactcattagcttacagaagttcaactgacttacctgtcactgagggaaatatgttaattgaaagcaaagatgatgatgcaaatcaaagggaaattgataatttggttaatgaatccctaaataacaatactcaggacgatttttctgcttctgggatgcaagttgataatataatcacctctatgcataatgtcatgacaagtgctgagcagttgaacaatcaaaaggctcctccagatcatataaatgatattagtcatggtagtggagatgccttatcaaaagataatgatgtggatggagaggagcacaatgttttgaggaaggaggaccaaatgaatgataaagttctggagggaaatttagttgacagtggtgctggtaacttggagcaccctctctatttggactccaaagaatctaggggagaaggaaatgctgttgaaactcgtgctagtaatgtggagggaccttctagtacgatcgtgaagggtgattctgaactgaatgttgtggaaggatgcagcgagggtgtaaaggaatctgttcaggagagcaaatgtgaagaattggtcttgtcaaaagacacagaaatggttaatcaatttacaggaaatatgcatgggggctcacccattgcttcaaaaggtgagagtagttttttagggcatgctgttgaggtcagcaacagaaatgcagaaaattgtgccatattagagcagaagatggactctcatgtgcagctgacttatggaaagagcagttttgtgaagaaaaaggatgatttgttggaaagtgggaaccaattgaatagtgagatttcaaccagtcacttggacacgtctctgttatctgaggtaaccaataaactttctgaaggtaattgtgatggaagtggaagccatcacaagggagatatttctagtaagcttgtggtatcttcttcagctgaattgcatggggaatcacatacaactgaaatgtaaaatgtgtaattggagttcatggagaagatataaatgctggaaatggtgttccaatttccactccatctgagtctactcaaatactcatttaaaatgcagtctccaggcagagtggtattcataactttgattcagatgttcttgttgttgaggatgggaatgtcaagttgagtactaatctgagttatatggaacatgagattggtggatccttgcctattggcgaatgtagcagagaaaatgacgatgatagtgctagctttggattgattgttgtggcagtggatttttcttctgaacatgatacagtggcttttatattaaatgaaggcaaagtagaagaattaactttgcggttgtttgaagaggtgaagaagcagataattacaggagcctgaaatttttctgttagtgttactcaggataagaagctgtcccatttccaaactatattcatcaatagaaataatgaagcatctaattacctgtagaaatgcaccactgtttatgggcattcttaatacagtatgcagttgggttgataattcgtcatctgatagcactattctcaaaagtcctataaaccgagcagcatcaaaggcaatgttgacccaaatgattaggctcatattcagaaggacagaatttgatccagactgtacttcctctggttctgctgcaaataaggaagccactttagcagaaaggactagtaatgcactttctctcagtattgatacatcagagtctgaatttagtgatgttcccaatcgttttatagcaatgggacctccttactcatggcaaactcagctttatcaaacatctctgtcctggggtgtgacagacgaccagatgtcactttcctatggtctgaaagcaaataaagaagctgattttctggactgcacaaggaccttttggctctgatttttcattaggtgccacttcttgccataatgggagatatccagaatggttttaatgcaacccaagctagtccttgtggagggtcaagcaatgttgatggccatataatacagaatagttcttcccatactgataatgatctagagaaagcagaaaaaccattctcagaaaagggtcttcattctgaatttgggagaaatccatttgtgtttaatgagaatccttgcagccaataatggaaatggctattgataactggcttttgaggcaaattcaattactcagtcaagggggagttgttgctcaaggaattctgtaggtccaagattttctctggccagatagcatttccttcataaaattgggaactaccaaaaacagtaatgatgactctaaatctattggaaccgtgaaccaagtagctgccagtggcagtaaggtctttgaacccgggccttttgagctacaacttggggtgccatgtagggctagagatgtcaagaaaagcatctttaatggaggcttgctgccatcaagtcagttttaatgacgacatcaacaacgctggatagagttgagagctctgtttgaatacagtagtatccaggatcagaaactgacgctcttggcacaattacatctttgattaatggaagtgagcagcaatcagcgagttcccttatgcaggctgcagataactggttaagactgctgaagaggtaaaagatggagctcatgatgagcaggacaacatagaaactaagctacagaagaatccagaagtgaactgtgagaaaatagatgaatgagttgaacttctgagcaaagacttgaaactccagaatgagtggcagtaagggaatcagatctggaactgggttttaattgcttcaccacaatttcctgctagcaatgcaagttgtgattctgggaagctagagttgggttggaatgcctttactgatcaaaattatacactcaaacccagtgaacatggactctgaaatgaatgcggtcagttcttttccagtcatgtctgcaatgcacagaggtctcttcacataaccaccagcaatgcagtcacagccagacccccaagcctcattccgacatggccactctggtgcacactaccctattccttctgcacccctcttgttttccccgtgattttacatgttttgaattatgttttcaaaatcaccttcatccaaataactctgattttaaagaatcatcttcggactttctttaggcaatagaatccagatttcaataatcttttgctgccatttttccttttggcgtgtgcatttccactatttcctttgactttcaaccatcttcttgattttctcgattttccacaagcatgaacaaacttcatgattctaaacatcctcgtgtaaggcgccttctatcaggtactgggttactgtatccttcacgatcctctacatccttatgtaaagcaccttccaggtactgggttactgcatccttcctgattcttttgttccaaacacgacctacacctgataaatttcagcttttcctcgagctacttgttatagttgcagcatcaaatatttcattacaattctgagacgtcatcttctgtgtctttgttaattttacaagatgattctctaggttggttcaatccatcaactaagaatattgtcttcttctcaatttgcaatatgtatataggcaaaaagggttggatgagcaatgagaggagcgtagcttgaacttgaggagatgacatctgtgtgtggtctatattttttttagatgaatctccttatatggtggagtattatgccttctgattagatttttgaatttgtgaggaggattccttgttcttcttatgaaatcttcataattaatatatcttttgtttctgatataaagaaaactaagaatattatactatttttgtgcataaatatacgttaaaaaaaaaaaaaaagggccaaaaacaaaaaaccatctttcataattgaattcacattcaactccttatcatcgagaacccaaaaaccttattggatattaagcgggtcaaaatgggattatcttcaataaccctaatagttgatccctatttgtaatattttttatctcctcaaatggaaatgtggtataaatgaagccaacaatcaccaaaattgtagtaactcattgaaatgacaatcagagttccaacaaagatgccataaatttatagctcaaacactttgtgaatttttttacttttaacttgcatttcagagcaacttgaaggagaaggatataaagatttggagtaggaaaagtgatccttgaacaacttgttttgaaaataattgacagtaaaatgtgtttttgtcattttttgcttcttaaaaatatgaaactattcaagatcttttgatggcgttgtcccctatcccctatgcgcatgttgtcccactctcaattttatccttgatatttcgctttgctgttaatatatcgatgattttgtagatttttcgcccaattgattatcagtggccgatttcattttggccataaccgataaccgatttttcactaatattttggcgataaattccaatttttcaaacattatgtatatgtctaattttatatttattccataaacaagaatatgtgctcgaatagtagtattaaacttgcaattgtttaatactaagggtctattagcaatattttctaaaaacaatattttaataaaatagtttccaattgtttcccaagcaaaattctttgtcaaggaattatccacttatgtataatataaaagttcttaaagtatttgttatatttttcaattacttcttagaatattctatacaaaatacctaaaaatttaaaaaaaaatgttttaaaaaagatccaaagtttcaattaaagtttgatcgtcttgtaatttaatttagaaaattgtttttttttttttttgccttcaaagatatatagaaaattgttttaaaactaattttccattagacactaaaatcttggttttggagaaacggggaaaaacaatttggaaagtaataatttcatccgatgaaaaataaaagctaagagctttatgttggctttagtatctatctcaaaagtaagggccctccaaca

SEQ ID NO: 12528 - DNA, 11425 bp, Vitis vinifera
  Intron number 5 from transcript GSVIVT01000756001 (locus G SVIVG01000756001) derived from phytozome v7.0 (chr-ID chr7 ; pos 423663 to 435087 reverse strand)
ctccagactgctgaactggtcagactctctctctgtctctcacacacacacacacatatcttcattcatttccatatccatcgactagctcaatacatctcccttatatctcattaacatcatcatcatagatgtggtttaagatgcaaatatttagtaagaacagcattttcctaaagtcattattgaatgcagcaaaaactcatctgttgtagtacattctgtatcttacattgttaataaaatttttgaaacaaagaattaaataagatgtccaaaacgattcaattagagtcccttgatgaaactgacagttgaataggtaatagacatcttaagatgggttttgcactaccatatgcaccaactgcctccacttgaaaggatcaaagactcttaaaatccttctcctggggtcactgctctcacctcttcaataaccaaagatggtggcaccaccctttgaagattttgttaaagcaaactaagagtgcatttggtagtgattttagaaaacgtttctagtctttctaacacttgaatgatacaaatttttaagtgttaaaaaggttagaaacacttcctaaaatccatgccaaatggactctaaatttgttaataaactagcatcttcatgtcctattaaaaggtcaccttagcttgaggtgcatgcttaatgccatagttttctcctcatcgactaatgggttcatgtgactggcctgcaatctagccaaaccttctccttttcccaatatctgcaattcaaagtgaacataattttattaacaggatcctagttaatatataagaacacaaaaacttcttgtcaccctcatcttaatgcagtgtctcatttaaagtgcgtatcctacataggatcctgaagcacccatttcctctggactatgaacaaacaacacgactaaccagatcatgagcaatgaaaaaccttggaagagtatatcaaatatcaactaataagtaatcaatctaacactactgaaagcaagatcttcctaaatattcttactcttactgaaccttttaaacctatgcatattcatatcccagtttatatagccccagtccaggagattaaaggattgagaataagacaaattagggatggcataaacatttttgtttttattttttgataagtttgggatgatattattgtttcatagcactgttattcaaactaccatttttcatttgttctatatgaactcattaattctaaatttcaataataacgtaatcaggtatgtcccacagtaaatagcattttctgacaaaaaaaatcctatttagcatatgattatcccttacatagctccctagagttcagttgactcaatcttacagcgcacataatgcactcagattttatgttagcatgcttgttttgacagcattcaaaggtgaaagaagcttaaatattctgaacccaattttacattagaatttgacagtacattatcatagttttcccaagacactaccttcctcacttacaattgaagattaaggccaaaggccactgactcattaatggtttggacgccaggaagacctgcattagagtaccccatcttcaatttggttgatcataacatattcttctttggggctgttgcagaggattaatttaacatcaaactcattctaaaaatctttagacaggtgaagagcttaaactaaatttatacacaaaaaaagaaaaaaaaaaaagtgttattaacactatccagaagcattttgagtgagtagcaactggctattgtcttatgaaggagcatctggctaggctcatttcttgtctgggatgtaggacaagatacagattattgtctctactctgtctccctttacggagaatcctaggttgacctcctttggcatccagttctagaaagaatctttgagagactagatggctggaagatgcctgtcttatccttggggtgtagaattactctagtccagtcccatctcgcgaaatttccacataccaccttcccacctctaaaacaaactttgttcgttctggctaggatttaagaaaatccaccatgattttctctagatggtatcagggaggtatgagacatcccacaatagattggaatcaaagtttgtaagtaaaagagtgaagttagggtaggccttgtagagcccctgttaggaatagagctcttatgtgaaagtttctttagcatttcagccagccaatgttttttgtcccctgaggtggcagacatgaagctgttgcctttatgggttctcagaacaactgtaactgagaaggtgctttgacagggagctttgattatcatcctcaaggttatttgcctagagagaaattttaggatttttttaaaggataaatggagatttatggagcagttgttctaggccttcatgtgggattcagttactaaagatttctcaggcattctgtttagtaccacttctactaaattggagatgtatgcacaggttgtatgagactttagagggttgagcagatcccacctctgatgattgctccatggcaacatgggtcctatgaggattggtgttgtcatcagagattctgatgcaacttggttaaagcatattctccaaactagctggttttggactggccactaaggctcaagttctagctttgttggacagctcgactgaggcatcactttggactcgacaaatatgctggtggaagcggattcagctattgttctctcaggtattcaaggggaagagggagctctgaaactggatgatccagtttgcagaatccttgatctctcaagtagttcagagtgctgtgtcctttgacagcctaggtatgctaacagggcagcagatttactggaaaaaggagtcttggcatcagattcttttagggaataggagagtaaatatcaagggtattccttaaagattttcaaaccattgagttaagcattatggttcaaggtatgtttttgtcttcatatcctaaatgttattttaagtttgatattaaacactaaataaaaattttctaacacggagagaaataagaataatctcaaatggactcccaaatctccattttccttaaatttgtcttggaaaagccttgtgttctttttatattaaattatccatattaaagtaagataagccacacaccaaagtaccccacttctaagactactcaatctcctaaaagaaatagtatcaatcatgtaactatagggaacttaatctatcctcacaagtcaaacaacttatgccaaagcctcagagttactagatagtgtataaaaagatgctccattgattcataatcaatgacaataatgcaacaattcggattgatatctttgtaagacctccctcacatgtagcaagtcattggtcttaacatttgcattggccaccacccatgcaaaggccttaccttaaattgggctttcgatcacaagttagatatattgaagcatgatatgcattatgggctcaaatcctaacaacttcaatttctaagaaaattgattagtcgacagtgtatcagagctctagttaactaaaggtcttaggttcaaattctctccccatctatatatctatctaatcatgtgtgatttggttgttgctattgcagtttgcctcccacagagggtatggtaaacctctcacagcatgtatgggatagggctaaacatgacatgggtgttgaagcatgatatgcattgtagataacctcccacagcacatatagggcaggatcaaacatgaggaggggtgttaatgcatgatattcattatgcacccaaataataacagcttaaggagaaggagagaaaaagggtgagagggggagagagggagttagtttacactatacaagctcaagaaagtcaactatctggcacacctagaaaggaaggcaacaagaatatataaattcaagaggacataagaagcttatgttcctcaaattttatagtaaggttgctacaaaaattaatgtttcaagatgtagaagaccagagaaaactattgtggtgaaataaaggagcttctaactcttgctactttgaagagatttaaaattgaacacggtagttgattgtcccaccacaaaccttcctaaaaatgaatcttagtactatctcttacaaaagaagaaaacaagtaagatgggaaaaattcaagaaaggtcgtagaatagtcttccaagggcaaagatgcaaccacccgactgcattgttagcatcccaaccattggaatatgacttatagatattcatgatgatgatcttatgcttaaaccactccttttgttggaaaacttcacaataacttcccgaaaaaggttctctacatataaaagtcctctcaaacctaacccaacttcatcctcaagctcccactatgaatcccaactaattaggtaatctctctttccttcccatgttccaaaccataaaaaatccctctctaatttcttgattttaaacgccaacttggtcaaaatcctgaacactaatagaaagtaaatgagaatgtgagacaagcaaggctaaacaaggattattctatggcctaaggcaggaatactttcttcctaccatctaatcttcgagaaattttgtctagtatatgatcctaaagcgaagcaactttagggtttcccctcagaggacccaaatatgtcaaaagccaatttacaatttagcaaggttaccaaaactataatttgatcctaactaacattagttaacagtaatgagcgcttatgtcaatttatttcaagacttgatatatatccacataccagtaaaaataaacttgacttaacaaatctactaccctagcctttgaaaaaaatttggcatcacccataaactacaagtgtgaccttcccaccaaaaacttttccaaagccacactcctcaactccttatagaagtccacaatcatcttagtgaagagagagagagaaaagggagaatccctaattattgttattgaaaaactgtaaagaatacacattggacttgggtatatatatacatgctagtgggacccacaatatagtaaggaaagaaaaggaaaaggaaaagtaaataacctaaaataactatacattatctaacactccccctcaagctggagcatatatgttatatgcaccaagcttgttacaaatgtatttaattctaggacctctgagatatttagtaaaaatatttgctagttgatcatttgaattaacaaaactagtcgccacacatcctgatgcaatcttctttctaatgaagcgacagtcaacttcaatgtgtttggtcctttcatggaagactggattggatgcaatatgcaaagcggcttggttgtcacagatgagcttcatctgttcatcctttccaaatctcaactcccgaagaagatgtttcagccatatgagttcacatgttgccagagtcatagctcgatacttggcttcagcactagatctagccaccacatcttgtttcttactcttccaagatattaggttacctccaataaaaacacaatacccggaagtggaacgtctatctgtgggtgagccagcccaatctgtatctgtgtaaccaacaacttgggtatgacctctgttctcgtaccacacaccttggcctagtgtgcttttgatatatcgaagaatgcggattatagcatcctaatggctatcacatggtgactataggaattaactaacaacacttacaggaaaagaaatgtctggacaagtaatggtgaggtagttcagtttacctacaagtcgccgatatctcccaggatctcctaaaggctccccctgtcctggtataagtttgacatttggatccataggagtgtcaactggtttacagtctaacataccggtttcttccaagatgtctaaagcatgcttcctttgggaaagaaccacaccggaactggattgtgctatctcaatccctaagaaatacttgagtttccccaagtcttgagtctgaaagcgggtgaaaaggtgttactttaggttctgaataccattctgatcactgcctataatgacgatgtcgtccacataaactaccagataaatacattgccccgaagagttatgatgatagaaaacggaatggtctgttgtactgcggaacatgtcacaacaaaactaaaacggctaaaccatactcgaggagattgtttcaagccatatagagaacggcgtaacctacacactaaaccagactccccctgagcaacaaaaccaggtggttgctccatataaacttcctcagcaagatccccatgaagaaaagcatttttaatatctaactgataaagaggccaagaacgcatagcagccatggagagcaatagacaaacagaagctatcttggcaacaggagagaaagtgtcaccataatcagaaccataaacctgagtatagcctttagcaactaagcgggctttaaggcgatcaacctaaccatcagggtcaaccttaactgtgtagacccaacgacaaccaactgtagatttaccagagggtaaaacaacaagatcccaagtgccattggagtgtaaagcagtcatttcatctaccattgcctatcgccagcctggatgggaaaaagcctcaggggtgctcttaggaagagaaacagaagatatagcagaaacaaatgcagaatagggtgaagataatcgatggtaactcaaaaaattgtaaataggatgaggattacgagtagatcgattacctttctgaagagtaatgggtaagtcagcagaaggaggcagagccgggacaggagaagccaaagggataggaggtgagtcagcaggtaccgcggccaaagaaggaggaacagcgacacgatgacagcaatgataaacctaaagtgggcgagaaggcactgcatcaggtggggagataatgggaaggggtaagacttcagaaacaggaagagactcagacgtggagaaaaacggtgagtcctcaaagaaagtgacatcagcggagagaaagtagcgatgagtctcagaggaataacaatgataacccttttgaagtctggaatatcccaagaagatgcattttgtggctctggcagaaagcttgtcctgtccaggagtgagaatataaacaaagcaagtacaaccaaaaacacgaggaggaaggaaataaagtggttggtcaggaaaaagaagggaatgaggaatctgatcgtgtaatacaaatgagagcatacgattaatcaaataacatgctgtaagaacagcgtccccccaaaaacgaaaaggaacatgactatgtagaaggagagtacgagctgtctcaacaagatgtcgattcttacgttcaactaccccattttgttgaggagtatgagcacaagaagactaatgaatgatcccatgttgggacataaatgaagtaaatggtgtagaaaaatattccctggcattgtcattgcgcaacacacgaatagaaatattgaactgggtttgaatttcagcataaaatttctggaaaatagagaataactcagctcgatttttcattaaaaataaccaagtacatcgagaatagtcatcaatgaaagtgacaaaatactgaaatcttaaagtagacgcggtccgacaaggaccccaaacatcagtgtggacaagttcaaaaggagactttgcccgattattcaaacgctttgggaacgagacacgagtatgtttcccaagctgacaggactcacacgcaagcaacgacaaagatgaaaaactagggaccattttctggaacttggatagactagggtggcccaggcgactttggatgagaaggggagcatcagtggaaatgcaaactgcaggtgaaggcgaggtgaggtgatagaggccttgagactcacgtcctatgccaatcgtcttccccgtactccggtcctgcaaggtcacaaatttatcagagaaagtgatagaacagttaagagtgcgagttattttgctgatggaaataagattaaaaggacactcaggggcataaaggacagaatggagaggtagggaagggagaggatgagcgaaaccaaaacctttagccatagtttgggaaccattagctaaagtaacagtaggtaaggcagaggtagtagtaatagaagagaaaagatccttattaccagatatgtgatcagaagcgccagaatctagaatccaaggtccaagagaagatgtgtgggtaagacaagcagaaccattaccagtctgggcaacagaagtaacagaagctgacttggtggcctgatagcggagatagtcatcatactcactgtcagtgaggaaaataccctgagatgtggaggaactgggaggctgaggcgactgaggatcagatgactgggccacgtgggcagtgcgaggaggccgcccatgtaactgataacaccgatcacgagtgtggccaagcttattgcaataggtgcaatgaggacattggcctctacctcagttaccactgcgtcctcctcgagagttagtttgagaagctaacacaaaagaatctgaaatgttatcaaatggcaaagtctgaggggaggagatacagaggaggcgagcaaacacatcatccaaggatgaaacggaggaactgccaagaatctgatcgcgaacagtctcgagatctggacggaggccaataagcgtaagaaccatgaagaacttgtcaatctatatgcgttgatccccaacatcagtagtaagaggcatcacgatcaagaattcctccttaagagaggcaatctggccaatataagtagataaatccatgtcttgttgtctgacattgacaatagaagaagccaccttataaagacgttggatatcattcgtgtatagccctttcgcctgattccaaaatttaaagcatgttttgtaggcccaaagatgatgtagaatcttaggatcaactgattgccataacacactacataactgtgcatctatcttcctccattgtactttgtcaacctcagggatatccgcctcctacgtaacaaggtgatcctcataaccttgacccataaaccaaagctccacagaggcagaccaggacaaataattttcactgccaaccaatttctctgaagtaatcataggagatccagatataacagaggaaaaaatggaacttttagtagtcatatctacttatctggtgaatgaaatacgtttggatcgaagagagccctaatacggcttatcgcggacttcctaagacacgtgcagggctaggggtggagaggaagtcactggaggtcgccggaaaggcggtttagagggccggcggagacaaaaaaccccaaaaaatgcacttttatggctcagatgacacaagcgcagatggagggtggctagacggcgtcaggcgaggctggaggtggaagcgcgtggccggaaagtgccccacacgccctcacgcgccggcgcgtagccagcacgtggctgggattcttcctccggtgctttgagaaaagttgaagatctcctccttgcgcacctgatggtatggtcggtgtcggaaaaggacttcgccggaagtcgccagcagtgagggttttccgacgatggtgagggttttccgacgacggtgagggttgatcggaagctttatgagatgggaagggtgaccggaatgaaacacggttactgaaagatttcccagaatggattcacggataaaccggaaataattagggttttttttctccctaggctctgataccatgagaagagagagagagaaaagggagaatccctaattattgttattgaaaaactgtaaagaatacacattggacttgggtatatatatacatgctagtgggacccacaatacagtaaggaaggaaaaagaaaaggaaaagtaaataacctaaaataactatacattatctaacaatcttcaatgataaaaagtaaagttaaaactagagcatctgatcttaaccctctggtttccttaacccaaactccgacatgtccattcaccaaaatcacaaaactaaccaaagataagcatcccttgatccaagacctccatcttaaactgaagtcttttcttttcaaagcatcataaaaaaagcctcaaacctcatgcttgtaagcgttttcaaaatcaatcttaaaagcctctttcccatggacatcctttatcatccaccacttagttcattactaaaacaacatccagaatttgccttccctcaacaaaaactgcctaggaaatatggatggttatttgattttaaataaaaataaaataaaatagatggtttcatgccaggcccttgcattgcaacatgacagaactgtgactataatatagaaggacttctcacccaactcatggatctaaaatctgaaattctattcatccaactccttttatcaaaagagttataaaagtagcgttagtgctcccattattaccccactgttgtaaggctttgaaaactctctatgatagcccttatctaacaagattttcttcaactagaattgtttttttcagtcataagcttgtaacatgtccaaattcaaagtcacattaaaccatttccctgaggtccttgtgtggttgataatttactttggccattggtgacattatccaggtttgtcaacctggaaaagtcactctagttataggcattaatcttattgaggatattttttgccttcatctcatcaccatgcttttaaaaaccctcaatggaaaattttggggcaaagtctgggactaaaacttttaatatctccaatgtgcttgtgaattaacctggtgctgctagaaatcagaatctcttttctaccataatatatatatatagtaatttaaaaacctagaacaaataaacttttgagttgtgtcataaattttagaaaatacttgtgatggagtctgatgctgatgctgatgctgatgcagatgcagatgttaattctgactaggtaatcaactgctactctattttcatgagttaccaatctgaggtagcaaaccacctcttccaatttcgtcagcaacctccaaaaaactgagaatatcctgtggatgagtcctttcatacatggtttgatatgatttgaattttctccttcaattcccccttctaaacttggtccattccccgactgcattcttgagttttgaatatcctttttgtctctgataccctgttgtttcatgaaagaatgtgttctttaatgtgacttccaataaataacattaccagactttacttccataccattggattcttataatggctgaaacaataaacataaattacttacaaacaggtgcaccagtcatctaccg

SEQ ID NO: 12529 - DNA, 12389 bp, Vitis vinifera
  Intron number 13 from transcript GSVIVT01037549001 (locus GSVIVG01037549001) derived from phytozome v7.0 (chr-ID chr 6; pos 11618350 to 11630738)
cggacatcatacaaaacgtgttctttcttctaaaggtattttcctcaaaagcttccttggaaatgcatgcgggttttcaattttcctcaaacacagtatatttctcttgtatcaaatgactttcttctaaatcaattaatcagcgtactacttggagataaaaattggataaataattttctgattttgtttaactgaaacaaatataccattccttgtgtaaattataaaacattatgaaagacattgcataatttagcttggctctccaaatttcaccatattactaaaagtcaagatcttgagcaaactagtaattttcatggtcaaatgaggaaaattttgtctaaatagagaactttgtggcaagatgagtaattttagtcatttatttatttatttactttttgaattttgaattaggggatgttaggtaaactgacttaatgacttaatatcacttaataatttaatataagttataaaacatattaattatgtttggcaaataatttgacatcaaaattaacttaaagtggtatcataaaacaaatcttttttattttaaaatccaacatagttttgtatccttattacccaacttatcagctttgaaactttctgaagaaaaaaaaacatggtaatctctcacctaattaaagtcatatgtaaatcctatctttataatgatacatggaaccttctagagaagtgaaataaggaaatagccaaaccatacaagcggataataaacaaatatagaaacaagatatacaagctagggagaaaaataatcaatatctttgtctgaggatcaaaatgaaatcacaccaagaatcagtagatgaaaaaataatccttgttacaaggtgccatctatacatctaaggatttgaagagctgcactgtagtggatggactgaggtgcagccgtaatttgattggaaacatgaacaacatggttgatgtctaggttagtgataatgagatatatgagattcctgacaagttgttgatattgagtaacatttgcaagatccccatcaatggtgtttagcttagagtttaactcatgaggagtataaacagtcatgttgtctgtcaatgcagcgctagaaataagacctgacgcatatttaatttgcaacagaatataccctcttgatgatttgtctacttcagtgctaataagtaatgcaatagtgctagatctttcatctcaaagcacaacatttttaacatccatctgagataaatgacattattttatgaaagcaataataataagagtatgaattgatgtcatgcttgcacttggagtaaaagtttcatcataagcaattctctattcttgtataaaatatttggcaacttatgttgtcttgtacctttcaatggtttcatcttattaggttttcaccttatacacccatttacaatcaattgcagttttcaagggtgcaggttgataagattttaatacttctgattccttatcaatcgccttttaccaatgttgataagatcacattcaatgaaaagacttcgatttataatgagacaagattgttgacttaaaatgacaaaaatcatgcaagtaaaatgaaagtataggttctcatcaagaaaaattgggacctaattattctctagggacttcatattaggattaggctcattagatacaatggtgaagtctacctaacttaacctagttatacatggtggtttgtgaactgggtgttggctaatttttaacttttttaacaaaaattagaacaaagataaataataatgaagtgtaaatgcaagtcaccgtaaaatagaaggcgatggaatgtaggagagattgcaaatagtgatttataatggtttgacaaccacttacatccactccctttagcttcttcccaaggatggtggcatatccaccatgttaagagattacaaataatgatttatagtggtttggaagccgctgcatccactccccttatcttcttaccaagtgttggagttgggtttgggtgcccaagtgggcccacccgacccaaccctacccaattaatgggagaaataaggggagcagtttttgggagttttaaaactatacagaatctgccactatttaaaaaaaaaaagttttttttttctctcttaagagaaaactctctctctctctgagaactctctctgtggaaaactagagagagaaagaatacattttctctctctcttcctgaaaacaaaggtgaagaaatatgttttcttctttccttggaaaacataagaaagaataatttttcttttgaagaaacaaaaagtcctttctcttaaagttattttgttttctccatgaaaacgaaggtcaagactcttgtgctgtgagaaaggaatgattctcgtattcgtaatttcattcatgacttgaggtgagaaatttggctagtgaaacaaccattctggatcttggggatttcagaaggtaatcaaaaatcttattatcttgggcatttcaaaagaagaacatttttgttttctttgaaaaagaaataagtagagaaagaaatgttttctggttatggttccggaaaaacacatttcttgaatttaaaaataattttttttgtttgactttattctacaaaaaaataaaaaaatattaaataaacaaaaaatttgggattatatgattttggatattgttctagaaaaaaaaaacgaaaaggaaaaagataagagccacttggagaaaaaataggtgcaaagtgcacccactccaggagtctcaatttctggttatggttccagaaaagcccttctccaaaacaaataaagtggaatattttttctgggaatttttttttttgaaaaagtaataataatacaaaaagttaaatatgttttaatctacttattaacatcaaagttgaattagtgtttttggttagaacctttctcatgctcacttgagacccaagttcgagctttgatgccctcattcaagtcaaattatattgatttgttcaaatataattagactataaaaaaagaaaagaaaaggagggtcttaaatatgagtattcgttactagtgaaaaaataaaaagggagaagggattgcccataaaaaggctcgatcccttgaccataggtataagagtcctgtactctaccaactaggctagatgttttttttgttttcataaaagactatggttattgaaaacaacatctagagttacggaagacattgtgtataatcctaatattgttgttccttttagttttaagagagaagattagttctttttctacatgttacttttttatgctttatacatgtaatgtatcttatatgcaagatatgacatgaatatttatcgtttgataaatgagtatgtcttttatgtacatgcatgtctttaattcttttgcatacgttattgatacatgctagttgtataatatattttttttatagagtgggaggtttaaggctaaaaagaaatttaagtaatttcttgcctaaaattagaaatacttgcatagattatttcaaatttgtaataattaaaattgtatataggagttgattgggaacatagtgaactttcgtttctattgcaatttaaggttattacacattagaaaatgattagagcaggtaaaagtatcaatatccataaaagtaccgattaataagaatgtgcaatatctctaagtagttgaatatatcgactacaacaaggaacatcatagaataatcaaacaaaggtgagaaactgaatgacgataattacaagatttggtatcacaaagttcagtatttccttgaagagcgagagactcttgatacactgaatcatgtcatgtaagaacctaaacaaggaaactctgcttaacataaaagagatcagaaggcttatatgggctggaagaaaaagagttctttaactcgcattacattgttaaactgtatgtaagatgatctcatgattgagtatgaggtttaccaaactactcataaaatgtggcaagctctaaaggaaaagtatggtgaactttcaactactaagttgagagaacttgtactgaaatttgaaaattacaagatgtgactgaaccatacaatgaaacaacatcttagggagatgaaaagaatgataagagagcttaagatatccggacatgtcttcactaataagcaacaagttgaggcgatcatcaaatctctaccaaagagctgtgaacatatggtggtgaatatgacacatgataagagtgtcaagacctttgataatatattttgccatcttgaattggaagtcaagtgacttatggttgctaggcccaatgaacaagctcatgtagctgaatccagttctcgcaaaaactttcgactttaagcgtaatagaaaattcttcaagaagaataagagatctgatgatgcttcaaagaaagaaaaaattgagacacgcaagaagtttaagcgtgctaagaaggataagagcaagttcaaatgctataattgtggcaactatggtcactttactcatgagtgcaccgagtcaaactagacttagtccccactaaccatatagctagagaccaaggagcatatgtaaagtttcgacgaattagtttcggtacaaaatgaatctatgtaggaaacaactttaaagttgaggtcaagggtattggaacgtgtaaattggagttgtgtagagaatgtaccctattcctacatgatgttatttatattgcgaatattcgacgaaatttggtctctgtgttagtcttttttggtttaagtttcaatttaaattttcatgattcagtaatggagttgtatttgggaacaacatactttggttctggatttattttgaatggttttatagttcttgacattgataactgtgtgttgtctaatactaatgatagttattattcgttgatgactacttctagaaatgcatgttatcatgtgatcatatgacatgctagacttggacatattggacaaggaagaatgaacagactagctagagaaaatcttcttggtcaattcactaaaagagatatgccaacttgtgaatattttctagctaataaaactataagaaaaccattcagaaaaggaactagaactaaaacatcattgcaattgatccgttttttacatttatgatcctgtgtgtgttaaagcaaggtatgaggccttgtacttcatcacttttattgatgactttactcgttacggtcatgtttatctggtttctcataagtcagaaacattagattgttttagatgctacattaatttagttgagaatcagttagacaaaaggatcagaacataaagaacagactggggtagagaatatctatcagaacaatttgaagatttatgtgatgaaaagggtattggtacacaatagactattccaaggaccccatgacataatgttgttgctaaaaggaggaatagaatattgttacacatggttagatcaatggtggttcaatccaatcctcctatttcatattggggagacgcattgttgactacttctcatgtacttaatcaagtaccctcaaagtttgtttcatctactccatatgagttatggaataaccgaaagcctaatcctggcaatttgcgaccttggaggtcagtggcttatgttcacaatcctttgcataaatatgaaaaattaggtcatagaggaaggaaatgtatcttaataagatacagtgaacactccaaagggtatgtgttaataggtgagcatgaagatggaatagtaactgaattaaaatcacgagatgtcatgttcttagagggcaatttcccacgtattggtgaaattgatagggatttacatctttatgaaattatgaatcccaacataagattcatacccgaatagcagttgatgcttgaatcgagtgggagtgaactagtacttgtagcaagtacagtagaagagtcgatgttgagaaaaagttctcgataaattattcctcgacgacgatttgaaattgaaggggaagttcatattgtcactcaatatgatgatgctaagcctaagtgggttcaagagactcttacttgtctaactaaagatgaatggagaaaagcaatggaagaggaattggagttgatacgaaagaatcaagtctaggacttggttgatctgccttcaaattgaaaatctattgggaacaaatgggttcttaaaataaaatgaaaggtagatggatccattgaaaattataaagctcgattagtagttaaagggtatacccaacaagagggtatagccaatgaggaaaccatctatccagtagttaggtttgcctcaattcgcctcattctagctatagtagctcatatagatttaaagctacactaaatggatgttaaaacaaatttccttaatggagagttgaatgaagaaatctatatgaaacaaccagtggatttcattatccaaggccaataacacaaagtgtgcaagttaaattgattgatttatggccttaaacaatcatctagacaatggaacttaagattttattgtgcaataacttcgtatgttttcacaatgattgatgaggaccattatgtttatattaagaaaaataaagataaatatatgttattatctttatacatggatgatatacttatagttagaaatgatttggagtttgtataaaccatttaaagatggttgtcatctacttttgagatgaaagatatgggagaagcattttacattcttggagtaaagatccatagtgatcgttctcacaaacaagtgactcttttacaagagcactatattaagaatatccttgaatgattcaatatgcaagattgcaatcccattgacactccatttgcaagaggtgaaaacctaagtaaagaaatgagtctaaagactccaaaagaaaagagaaaaataactaatgttccctatttcagtgttgttgggtgtctaatgtatgctacaatgtgtacaagactatatatatctactatgttgttggggtggtgagtcgttaccaagaaaatcctagaatgatgcattggaaaacagtaaagagaattcttcagtatctaataggcattgtggactattccttttattattaaggcaaagaattgtgcttgtgggttactcacacgtcatttgggcaggtgatctagatgagcacaaatcaacatctagatacacattcttgtttaataatggtgccaaattatggaaaagcaagaaacaaacttgtatagctttgtcaaccattgaagctgaatttattgttcgttcagctgtaatataagaagttgtatggttgaaaagatttttgcaaagcttgggaatagtcaaggatgtttttacgctaatgacaatcaatttgagaccatttatgtaaatgatccgaaatatcatggaagaattaaacatctagataccaagaataattttaaaagagatattattgcacgaagagaaaatgatcctgaatatttacctatatgtgaaatggttgttgatccattcacaaaatccattttaagaaacatgtttttctatacatggaaagtcattgggattgcgtcggttatgatctatgtggatcatatgtcatgaatcattattgattggatataagatactttatacatgataaaatgatatgaatatttgttattcatataattgaatatgtaattggtacttacatatttgagtatgtcaacaggcaaaggttgactctctcatacgagcaaccgccctaatcaatatgtttatgagctgggatgagacacaatatactaatattgataaatgagttaaaagtatacaagagatgatgagtgtcgccttgattaagtgtcaagatgaggtctatagtaaatgacatcttgaccgaatgtaatcgcccacaattacatttttctatttgaaccggacttgagttttagcataaaaggtttaaggagaaccatagatgcaaaacttaaacaagctgttagtgtgaagctcttagttgaggtccatagtggtagtttgacatacactctctaagtgaagagaaaccaccatagcatgtatttcatactacatgtgtttgaatgtgactaataaggaaagtgagtgattaatccttgcatcttcacagtgtgagatccttagggcttattacaattataatagcccatattgtactctttgtacttttgactatgttttgaggtgacaaactaatgttgctactttgatatgttttcgacggaaatgaaataatctatccttatgggacatattgggcaagcaattaatttggatctaaaaggcatgagctcataaggaagactttttttaagattgataaagatgtgttcatggtcaattgattatattgctttcgtagcatatataattatgaatgcatttataatgttggatgatatacaactttgagggattaagtgtatgcattaaaatgtaactaaataagtctagggtacaatgagacatgattagtattgttcactcataatttttggggtggagctgctatgtatccctaacaggtgcataagtttatagctcccaaattgtaggtgtgcttgcatagtcacatgacccatttgcctatatgaatgacctttaaaagtggaatagaatggacttggatgaatgattgggctagttcaacccatcttgtgcaagtgggagatgttggagttgggtttgggtgcccaagtgggctgacctgacccgacctgacaaaattaatgggagaaataaggggagttgtttttgggagttttaaaactatccaaaaactgccactatttaaaaaaaaaaagtttttttctctctattaagagaaaactctctctctttgtgagaactctctccatggaaaactagagagagaaagaatacattttccctttctcttcctgaaaacaaaggtgaagaaatacgtttttttctttccccggaaaacataagaaaaaataatttttcttctgaagaaacaaaaagtccttttctccgtgaaaacgaaggtcaaagctcttgttctgtaagaaacgaatggatctcatattcgtagtttcattcatgacttgaggcaagaaatttggttagtgaaacaaccaatctggatcttgggcatttaagaaggtaatcgaaaatcttattattcatcaccaagcatagtggtatatccactatgttaaaagcttcctcaaccaaagctcttagtgtttctattcacttagattccaagattccaatagacctttataagtacaagaaatctctcaactcttcaaataaatgctttcttaagtacaagatgaaatgaatcaagcaactctttgtgaaagtggatttacaaatgaaaatggtcaagtacaatagtgcacttaatgaggagcaaatttggattcaatgaattttggagaattgaagaagccaagaatgataataaatggggtttgtaggttattattatgtcaataaagacacctaaggttgattatatataggttttagtcaacctgaccattaggcacatcttataggagactagtcaactttgactagccattagacatttaatgagatgtagctgacctttagaagctatacctacccattgagtcaaccatatggtccagcttttggtcattaggttgactaaatggttggccttctgcaggtggtaactaaacttgcacatctatcttttcttttgctgctaaagctttcaaatccatcattactttttctgattatggttgaccttttaggcttgtaatccattttgtgcttggatagtccaaaaagtttctgcagaagtccaaaattgattccaaccttttaaccatgtctttgagctgtaatgcatgaatttcaaggagatttttgttagtttaaggcttggtttaggcaaaaaaaaatttaagtatcctttaagggtttttcatggaattaagggtcatgtggcctactttgctaggttaagatttgtcaccctcaataaatatacaagtactaatttacaagaaaagataaaacataacctgtgctaggtcttcaagctttccatagtcttcaactttaagtccttgtcttgaatttcttcaaataataatactaccattaatatgatcttcattacctgatactcttagacaaacttcaactattagtaccataatccttgttttgtgataatcaaaacttaggattacccatccttgggggtttaacattcaaaagaaccatcttcacaaccatttgttactgaagaagttggagggtggttgctacattgacttggtcatcgaaaggattaagaaatgtaagatggattacccaactcacagaaatgatttgagaaatggagagatgttgaaaattgtttcttgttacatattccttttgtaaacaatcaaatattttctatattggtattttcttataaaaataagttcccttatagaactaaggaaagatgtcaaaatatctttataaatataaatggagatgaaggcaaaaaaatattatgaaactgaaatgagttttacaaaactatacaggataaatggagatgtgaggaagagtaggagacatcgatggagcagggtttaggttcaaggtgcagccactaagaataaggaaccatcaaatctttcttcccttgtttctctctcataagctcatcacttcataaggataaatatattgaatttattagtttcaaaaagcttttcgattggttttttcatatttgacaaaaatcagcaaaattcagcactaacaagtttttaagttatcaaattcagtaaagtttggattaaatcatgttaagtcattaagtattaagttctcagttttattgaacaataccttgttaatataggtgtaaattagtaattcatttgtttccttgtggatttagatgagtgcatttgttttgttcttcatctaatattgttgggagtttcctttcccttgtccagctgtaaatagtaaataggtcatcacactacaaacatctgctcacttttcctctatttaactggagttgattacaaggtctctagtgcaatttgaaactgttgaattttagaggttggattctttgctctgctgaagtaaagacttcaaattttggcaaacaaatcgtccttgagtctttacagatgattgatcaaggtgatgcaccacatttataatttgcaccaagatcaggtgttgacataagcaactatctggaatcacctctacactcagaacctctagtgcccatccatagctctgataccaaattggtgtctatgtgtagtctgaagtaatagaaaatagagaagtttggagtttggaggtcgggatcatcatggaggggagctcctatgtgaacatcaaacaggatttagttgatacttttgggattgtagaggtctattgatttgatgagaactgttgagaggctttcttaaaggttgtacatctcctatgggtggatccaacatatgagtcatgaagaggtcaaaaacttttattattttagaataaaaggagagaacttatgcttgaggagttcaattccaaaatgtcttaaatttctaatattggttccaataatcattccttatagaagataatatcatgaaagaaaattcttgtttccatatttctttatgaaaaatagctttctttgtaaaataaggaaatattaaaggaagatctcgaatgagaaagggtataagttgggagagatgggaatggagtaagattgtgagtgaggagttagaagtgagagggtgttggcgagaataatagagatccaatataagaagcttacctgttggaaaatgctcaattctctttgaatcttgagaatctagaagagttggccttttctttttcttgcatttctgatacaaatggagtaatttgcagtattcatcagaagtaactcttgttgttctcaatgaaatgatgtgctagttaagctcaaatgtgggaaaaggcttaattctctttgaatattgagaacatagaagagtaagcttttatttctttctgctagagtagcattaacatgaattgtcagcaactcattacaatagaatgagaaatggctgcagtagtaagtggatagtactgctacagtaactacatgcaaaaacttgttttatttgctaaaggctagtacaattgactatgcaattcattgtgaattaaattgatacagtgctttctgtagattgatgaatcataatcagcaaggtgaatatgttttgtgcagcttctggtgagccaccattacttctagcagtttca

SEQ ID NO: 12530 - DNA, 3637 bp, Vitis vinifera
  Intron number 2 from transcript GSVIVT01024930001 (locus G SVIVG01024930001) derived from phytozome v7.0 (chr-ID chr6 ; pos 5945927 to 5949563 reverse strand)
aacttcttttcacccaataccgttaaaagaaagtacatatcttcttcttctattggttatattgaaatttctcatcaatctctggttggttgctgagagagtggagaagaaatttgaagctttacactttagtaacacctggattcagccctgtaacttcaaagggcttcctttgtgataaccagataacataaactggtttcaaatttccttttattttctcatcctccgttttctccacatctaaatggaatatgatggatttgggcattaccatgattcttgtattcctggttgatttttagttgttaattattatgaagttattatttctgatattggctgcattatttcatacgtgcattctgtttattcgagtctaattgacctgcactattgaaaaggggagaggcaagcagattatctatttatcttggaatgaaggatttttagaactaacaactgcaaagtagggtgccagtttacagttgatgatcttactggagcaattgttattgtgcattctgactataagctgtcaacttcaagttgtacccatgcataattggactaggcaatgaatttggttctctggagattgacggtcaattgtgtataaaatgggtttcagagtagtaatgtctctgcttgacaaaaaaaaggtaatgatctcatcaaaagcatgtatggaagaatgccacgctactctgagctcatttggttcaaacaaccttcaattacctatgcggtggctgtggatattggtagactggtcatttcatttgattatttgtaattctccataaccatcacatggttaatgcatggactaaaaattcactttcattgagtttcaactacgaaggcaatgatactaattgtgacagaaagagaacactttatttgaaggttgctacccaaactacgtcagccaagtcagccaagtcaagctgtggctgagcaggttggctggtgactccatttcaaagtggatccatggccatccttgtctaatgttgatgattagaaattgcttagtttgcatggtaactagaaatgatttggttttcactgattttagtttgtgcaccttgctctgcataaaactaggctttttctttttgtttctaggttatctactgattttccattttttttttttataggaaacaacaaagaaatatattgatagaattaagaagtacaaaagaaggatgaggaatcctcccagaaaagaaaactaaacaacaagaatacaaaaacaataagctaaatggtaattacaaaaagcaaactctctttgctagaccaccccattggagctacacactgctagccaatctagttgcaacacattaaggggaatgcccttaaaatgctgattttcttattttgaaaatgaaggtttcacatttttctgtttttctctctgcttttcttttttgtggcaatcattctctcagaagtcagccactttatgatggcttttcatttttggattactggtgattgacttgtctattgatacattatcattaattaaaggtgcgaaggttacaaatagttaaacattcatgactaaataacaggctttaatctgataaggacatttaatggttgtttggagccaataggttggtgtgtctggttcttttactctcatatgcttcttaatgtactagtttcagaaggattccaattgctttagcccttttatggattcatctgtctaaaagctctactggattgtctgaaccaactatgtgtagatatcaccaaaaggttatagcaggaaattcaggggtgccaaacttaggagtccttcacagcgagcacttatttggagagaccagatgatcatacaatgtggggaatcattcaacatgatatgaagatctatttatctatgctactcatatatactgatacttggggatgtttatttttgccatctctttcttccccttggaagcactccttgacaacattctttacaagatgaaatgttcttccactttttgaaaactttgcttgatataacattctaaaaacttaacacttcctacataggactgttaccagatcatggttgctgcttagttcattgttcaacatgcaatattcctagtgcaagttagggaagccaaatggttatagcaatgtttcaatatcaatatcaatgttgtgatatcaccaaaaggttatagcatgcatttagggtagccagatgtagagtctgtcacaggaaccacttattggggagattagatgatcatacaatgcaggggaatcattcggtctaagatggagatccagccatctgtgcttctcatttatactgctacctgggaatttttattttttaagtttctttttctctatcttggaagcacttctcgacaaaattctttactagataaaaagctgtgcctgttcttgaaaactttgcttaatataacatctaaaaatttgacacttcatggtactacttacaaaatcctggcggttattgatttattgctcaacatacaacattcatagtacaatgttccaatgtttatgtctgtcaggtaccactttggccactgtatgatagaaattatatcctaaccatgagcattcatgcatatttagaaatccaatgcagttaaatcaggtaatctgaccttcgccaccctaatatgaaggttatgggattcttgtgactgtgttcagtttaggactttgtggcccaaatgttccctgctgccattttcattcatatcccaaaattgattttacagttcatgtccttaaccttagatctcttggtgaaatccttctgcttcaaatcataggcttctagtgttacaacccaagactgttatgattcatgctaatacctcaatcaagaaaatttgggcctcaaactagagtaggacaggtttcatttttcacaattataagccttttgggaaaaagtgaaaaaaatgaaaagtaaagaaactgtaccatactatgaccttttgcattacacttatttttgaatagttgaaaataaggacattgctgctaagagattttgtaaattgaaagggttgtgcaggtattgaagggttcgatgaaaatttggtgtgttaatacagatataattcatctgtgtggtagttgtagaaagatgcaaatctttttaatggggtctgttcttgacaagttgtggatatgagaacagatgttagcatccttttctttgtttgacatgaatcaaagaagagcaatcatgctgtggcatgttatacaatgtgcaatagccacctgtaatctatttgaacatccttaacagctgtcttaaatgctttcaacttctagaaatgcacttcctgatctcccatgtcctgcaaaaagtaggtgtaaactgtcatataaacaaccttatttgagtgaggtatcttgcaaatacactgcaagattaatactccccataaatatgctagtagaattgtgtattatggaatagcttctactacctttttggagctacttatttactgccatttcccccagatggtttcaaatgtttaactagtttcatttggataactattgctttcacatatgtgcagtgtggttatagtggaaggagatccccatccaggag

SEQ ID NO: 12531 - DNA, 10749 bp, Vitis vinifera
  Intron number 1 from transcript GSVIVT01032341001 (locus G SVIVG01032341001) derived from phytozome v7.0 (chr-ID chr1 1; pos 15293629 to 15304377 reverse strand)
acaaaaaagaaaaacccctgaaagttgaagaaattgtattactttgaatggaccctatcttaaatgtaccaattctggcattgtagactccgatccattatgcacgctgagctgacaggaatcgcgaatcgcagctttataaaatagataaaaaacttcgctgcctaaatagtgggcccacttgcttctcctatccagctagatatttacaggtgtcaccatccaacggttagaaaacgacttcaacgtgcttgaaagatgagggagactgaagtaaacgacaatgaagggcaatttagtaaaattaaaaaaaacctcctgagtcccgatcttgttcttgtagtctctcgtaaagactaacgaggaggaagacgaagaagatgggaagtgagagagggagggagatgcgggagagaggtgaggaatcccccaagattcttgttttctctcccctctcaaaaccctcttcgcttcgttcaaaattctactcagaaatcctaaagtttttgtttccatatttgccctcgccactctcccgctttccctcctcctcttctccctatctctttcctcccacccaatcaaatcccaaatctaccatctggaggcagtggctgccctctccccaacacgcttcgaggctcgccatgtctggaaggagtcacgtgcctacaccatctccctcgttcgcctcaacgccctcttcttcttcccatgctacgccctctccctcctcgccgccataaccgccgtccactccaccggcctctcctgcaacggaaagcgccccactcttgacacggcgctcacggccgtcaggaccacatggaagaaacccttggtcaccaccatctgtgtctacgccgtcatgctggtgtacgtgctcctccagcgcacattagtcgcggccgccgccgaggccggtggtctgggtccggtggcggtggcggtggcgcttgtggggttgggtgtggaggtgtacctgatggcggtgctgagcctgggagtggtggtttctgtgatggaggagcgatgggggtgggatgcgattgggagcgggtggggtttgatggaggggaggaggtttaccggtgggtattgtcgggaatcctagtgttggggtcgggttgtattgggtgggagatggaggagacgatggagggcggagattggtggagtgtgagtggatggagggtgatggggtttgggaataaactgtggttggtgtgtctgtttggggtggttgtgctgtggagttatgttgtgaatacagttttttactgcgagtgtagaagacggcagcaggtgatgcgaggagaacatgaatctgatattgcagtttgatggatttgcgtattatgtacactactaccctctacacatgctgctttgggcctttggccattggccttttggggggttgtatgattgattctcttcccgttcaagactcatacagatatgtttatttacatttttgttgtatcatcattaatcaactgtctttatttatttggtttttccctttaacaatcttactgctttagaaggaagcttaattgtttttttatccatgtgggtgatgcaaagtgaaaagaaaggacctttatcctttctgttggcttctcaaaagctttcccattctacctcccatcattcttttctccaattcctattacattcaaaattctaaattatttggttgtgtaaggaaatcactcgaaaacccttttttttcttctatatcttttttgtatgatttttttatggattattttctcaagaatttgagactaatcaatcagccctaataagcttttttatttttctttaaacaaatattaatttgaattaaagttcaggttggtttttgaaaggattacattgactcacatttcttaaaaattgtgcatccatattgatttgaaattttgttggaaggaggtgaatgaaatttaataacaagaactgtaagtgggattttggatgaaatttcaaagcaaaggggggtgtaagtatatttagccaataaagagagtatttaaaagtcaaaaactttttataaacttaataaaaataagtaattttaatattgataatataaaaaaatactagtgggataattatactttagggatatataaagttgataatggatttaaggtttaaaaaatatgtaaaattcaatttaaaggttaataataagttaaaatatatgattttcttataatgtcataatatctatagaacatgaaaatgatataaaatgaatttatatggtattgtggatcccgcatttcggctcatgcatttcctacttgatggcaggctcgattttgattttgaaaaatgattttatttattaaaaaaaatgacttggagtcgccacttatttttgttttatttttaaaagggtaaacaaaataagaaataaaactctaagtgcgactccttattttggaaaaggtgatctacgaaaaaccggatcaggctcggggatcaagttacttatcgggaaggtacggtaaaagaccatagcacccctctaagtccctaaagtcgggtctctactaataaaatgaagctgatgtggcaattgacgagtaaatcaatgaatatcctgaatgatcatgcacacataagagtcgagacatgcatagacaacgattatagggaaaatgggtacatacctgggcaacgagccgccatgtgctatcaatagagagggttagtgcacaatttaggaataatcgcatgtatgtcagagagtaggataaatcaatcacgtatgataatcaaagcaagcgatcgatcaatcaatcaatcataaagtcacccatgttgggcccccaccaaagcccgtttatttagcatgacttaatgtcacagattccattattctggaattatgaaaaattcgttcacgcttattaaaatcaagaggagcgtggaagatcgtttgaaaaccatagcggaattaaaactatttgagagaaaattagacttttgaaatttaattgaaaaattggaatctcgaagatcactagaaaattggagttttagagtttatttgaagatcaaattcttagaggttgaatgtgagaatgtgaattttagaaatcgaatttgaaagaggttggaattttgaaaatgatttgagggttcggggtcttaaaaaaaaaagattaagttatgaaaattgggattatgagagttaaattttgaaagatatcagaatcgtaagttatttgagaagtagaaattatgaaagttgatttatgaaaattggaaatctcgaaaatcatttgaaggtggactttttagaaatgaacaaataaaatggtaataaaaataatgatggtaacaaatgagtaactgggtaaatacggtaatcggaacattaggaactgagaattaggttcggagataggacacttggaattttagatagctaaatttagaaatcggaattttgaagaattagactttaatgattgagatttttaagagaaataaatgggtaaatatggaataatgttattaattaatcaaaacgatatttggacggatgaatagtgaatagtggggtctgtgagattaaaaattaaattagaaaatcggattttgacaaaagtgatatttgaacggatgaaagtgaatagtgagattttgaaaattaagtttggaagtcggatatttgaacaagtggactctaattattggaatttttagaaaaaagaaataagcaaacgtgaaatttataacaatgataacaaagatgatatttgaatgaataaaagtgaatggtgaaatttttgagtctcaaggttaaatatgaaaatccggttttgaagaattgaattttaatgattgaaataaataaataaataaacacagaataatgatactaattaacaaaaataatgtttaaacgaataataagagaatagtgcaatttttctaattgagaatttgaattagggcgttggatttttaaaggatatgactttgaataaataggtaggtaggggattataatactaattaacgagaataatatttaggcgaataaagatggatagtagaatttttgggattgaagttttaattaaggcaaagggttttcgaaagattggactttgaaaagacatggaataatgattctaattgatgaggataaaatttagacgaaccgtaaaatttttaggattgaaaaattgagttaagacaagagatttttgaagaactaggttttaaataaatagacgaatatgagataataatcctaatcaatgaaaataagatttaaacgaatatttaaagaattaaattaaagcatgggatttttggaggattagactaaatagatggatgaatagaggataataattccaattgatggacataagatttaaacggattattgaaagattaaattaaagcatgggattttcttgatggattagactttgaataactaataaatacaggatatagattcaatttacgaaaatatgatttaaacaagtattttgaagaattaaattaaaacatgggatttttggaggattagactagatagatggatgaacataggataataattccaattgatgaacacaagatttaaatggattattgaaagattaaattactaaaataaatatgagataatgattctaattgatgaaaataaggtttaaacaaattattgaaaaattaggttaaggcatgggattttcgaaggattagactttaaatagataggtaaataggggaggataattctaatgaaaataagatttgaacgaattgcagaatttttagaattgaaaaattaagttagggagttagattttcgagggattaaactttaaataagtaaatgaatacaggatactaattcaaattaaagaaaataacatttagccaaatagtagaattttaggattgaaaattaaattatgacattggatctttttaaaggattagattttggataaatgaactaatataggatgataatactaattaacgaaaaataatatttaaacggaataaaaagaatagtggaatttttaggggtttgaaaattagatttggaattcagatttttgaagaataggaactttaatgattggagtttttttttttttttttttttaatgagatgaataaatatatatgggataaaaataattattgacaaacataatatctaaacatatgaaattgaatagttgaatatttgaaattgaaaattaatttaggaagatattagagtttcggaaattagattaaaatcttgaatcttgaaaattgactttggaattggggagctaaaaaaaagaacattatgaaatagaaactcttaaaaattagaaaggattttgggaaactaaactttgaaaatgaagattttgacaattagatttgaaagttaaaaagggtgaggattgaatcttgatattgagaatggagaggttgcacaaataagcaaatatatatgcatgagtgacactctccaccgactgcatgcatgaaagtaagtgggacaagtgggctttggaaatgggcttgagggggggtccatgcaaaacagtctccataaacgaatccgccttcctcgccgcttaactgctacatgttgcgtatagaagacgacgccggaccaccgccgctgccagtgccgtccccaccaagagcaacgtcgccgccatctggataaaacccaacctctttcgcagctccgaaccccattttatcgaaccttggaccaagcttcaggctgatatcattcagcccaaggaacccattccagctgctttacagccacatccatctttgaatcgggagctccatcagcatgaaccctcctacattaatcataaaatccattgccaactttgataccacatgtctaacactgtttccattagttctgaaagaagtctggctgtggtctaagcttcataaacttcatcttgacaagcagcgactccacttatgattcctccaatacttcaaaccagatgtccccaaaactcaaataatcactgcaaaatcaggtatctcatggtcgccatggcgcattcctgatgttccaagttcgttcgaaaagagaaatgatctcagagggaaggaattgggtgtctcgggtgcaaggaccagatttccggagcatgcacgtgggcgggtaaaatgacaaggaaacagctaagacatggataacatggtggtgagagaagtgggtttatggatacgggaaggtttagagagaggagttccttgctgatgtactactcatagaaatcagtggataaaacagtccccaaatattaagactccaatgcagccccgtacccaagaatgcccaaaataaccacaagaaacacatatgctgcactggttatggtctgtttgccaccctgcttaccaatcatactcttggcttgtgtcggagacccttgcatatgctctaaagaggtgtgccagagagccctgtgaactcatctagtctggaacttcatacgcataagcactcaaaaactctttacgccttatattcatatgcccagctctcctcaggtagacatcaaaacggggggaagaagaagaacacaaaagagaaaacaaaacataaaccaatgaaacaaacaaaacaaccaaagccatatttcctgtttagatccacaggcttggttgtaggtgggtgaactagaatatgtcccaaggagataagaactaaacaaagcaactattgatgcatagcactgactaaaacagagtcgtgctattctcaaatcatcacaaggaaaataggcaagatagccgccaagaaatccgagaaccgaagaggaatcataagacagaacgtatagtcaaacaagtcatagaaaatataaagaaaaaggaatgaagctgtatactgataaagaaaatgaaagatcaatggcagtcatacctcgcttgttttctccctcaagctcgaagaatcttctctcctttccctctggccctctcctcctatccctcctcctattcctctcttggtgtctttgtggcaacaggtgctatcttcccgggcaagccattacctccctttgatgttcatcacatcagcagcatggcttccctttgctgttcatcccatcagcagcatggcttccctgtctcttgcagctggtcccatgcatggagaggggtcccccccacacttctcgggtgctgccagctcctccagaatgctctcttccaatgctataaaaaaaacccttaaaaaaaaaaaaaactaccagcctttccctcctcaaagggggtctacaggtatgtctattgtatcattttttgtgtatccctacttatttatttatttatttttaagattttgattctctaattatttattttaaaaatattttccaaaaatgataaaaacaaataaattaaactcatgttgcaaagtaaaatttatttttatatataactttaaattatttttcaaaatacgatataaaatgaaaattttaaaattattcatcaaatgatttcatcatgattttttatatatgaaaattatgaaaaaagagttagcgctctttttaaatgaaaatgatattattaatattaaattttaatgaaattttagttaagtactttcaagaatgttattatcttattaataataaaataaaattaggaaaataaaactaaaaataatttaaattatagaaaatattgaatatggtaggaaaattgacttatgtttttgtagttcattaaaataaatttaaccatttaattaaagttttcttaaaagtgactttgttttgctaaaattggattaagggccaattagaaagtgattatgataaaaataattataattatgtagacccttattttggttattttgggagtacatgtttaccaccttttttatttttttggcagcacatgtatgatggagtaggttggcggtgacatttttcttgaggaatcagagaatgacaagtggttgggaatattatggtcgttagagaggagcgtgttttttgctagtttgaggaagatagcttggggggcaagatttttgggctaggtcgtaagagagagtgagcaacttggagggagggtgaagagagctagagtgagagctaaagagggaaagaacttgtgttgtggaggagaaggtagcgaaacactggaaattgagcattagcgcttaagcgaatcccaccaggtgtagtccccgtatacttcatcttcttccattttcgcattattttcttccatctcttgttgacattagagattcattttgatgattaagggtggtcaatgtatgcctgtttgcttggtttctcctatctcttttcatcctcatttatagggaaggcatttaagtcgagttatttaaattttagtttatggtaagtaatttggactttagtggcaaaattttatcatcttcctagttttctatcaatgagagtggatgagagagatggcctagagcgctgctacacgaacctttagtatgccagccatcaatgtcgaagcgtcgcgccttcaaggtccactagccatcggtataagctgtgcctcggtgaccaccaccagccgatggcgatcttcgttctcgttgttgcggtcaaagccactcgattgcttgagcattactatcgatgccagtataaagcaggttgttcaaatggacaaggctccaacaactttggggaccttactctctaggccaaatgccctccattggacgttgttgaacttgtggttcgtgagctagaagacgacctaaacttcaatgtcggcagaggttctatgctagccaccatggcatgatggaaatggaggcgtgcatcaagttggaaacacgaagaaacgtgggagttgttgtaggcaaggtcgttgctgccggagcaaccaacgagtgcgccatatcgacgacgagagcgcgtgtagtggcaggcgcacgactaagctggaggacccctatgacttcgtctggttggtatgctcgcctgcgaagaagccaactatcatggtaacctagagaccgacaaacttctatccgtcccctgaatgcaatgttggtgaggaagagctacagagaagtggcagtggttacatgggaagcgcctactgtgatgctattgggagttcaaggtgtgggaaggcagcatggaaatttgatccaccatgtgtcgtttttttatttttttattattcttcatgttttgatatcaaaaattaacttccatattttcaattttcaaactcaattttccaaaactccatttcctaaatttatttatttatttattttttataaaaaaactccaatttctttcaaattcaattcccaaaattccaatttctttcaaatttaatttcaaaaactccaattcttaaatttaattttcaagactccaattttcaattttttttttaagatttcaattttttataatcaattttcaaaattccggttttcttcaaataattataaatccactacaatcttcaaataattttaagtcgtcaattttctatctttccttaaggtttagggtcaccaagaatcctgtttttaataaactcgttgtctttttctttcaggcaaacacattcacaaattttctcttattttaaaataattttatcgtttttcactatttttaataagcatgaaggtaattttcataattcaaaaacaatagaatttatgagattaattaatgcaagaataaatcgggtttggtggggcccaacatcagtgatgatctcctgctctatttagtgacatgtgtgacatatttatgctcattattgtgcactaactccatttcattatagcgcatcatggctcgctgctaaggtacgcgcgcactcttcttttgactattatctatgcatgttttagctttcaatgtgtgatcattttgatattcatttatttccttaccaattgtcataattgtttaattttatttagtagagacccattttaggggcttagaggggtggtacggtcattaccgtacctttccaataagaaacctgacccctgagcccagattcgatttttcacagatcgctttttccaaataaggagtcacacttaaagttttatttcttattttgttttccctttaaaaataaaacaaaaataagtggcgactccaagtcatttcaaaaatcatttttcaaaataataaaaagtgagttcgcgccatttgagtgggaaacgcatgagcagaaatatgggatccacaaattatttttataatatttttattagaaatgtcattataaattaatcaatatttgaacataagtcaaaaattgttttaaatgataccttttaaaaatgtattatggaataaaattttttatcctttaaaagcagcaccattaaagatatttttaatttttatcatattttaacatgattttgaaaaatttgttacgatccaaattaggatgaagcaaaatgatcagaacttcgccagaaaacgagctgggactgggaaacgcttgaaaggggcaaggcacacccaaacggaatctagtctcactccttaaggaaataccctttttaaccttcccccttctggctttatatctaacttctccgagtccgttctggtccttctagccctaaagccacatagactctgtgtctctccaggagtaatcatccagacaccaagaaagaggtaataaaagcaa

SEQ ID NO: 12532 - DNA, 5618 bp, Vitis vinifera
  Intron number 2 from transcript GSVIVT01001210001 (locus G SVIVG01001210001) derived from phytozome v7.0 (chr-ID chr7 ; pos 763095 to 768712 reverse strand)
tgatcatctttcaggctgcattggggcgatttcgggttatatctgcaagagtgggaagggtcctagggaccccatgaggagatgtgtgggtggcctttttgttgcattcttgaaggcttatttggaaggtcagagtggagatttcaaagccattgttgacgaacctgatctggctcctgtgaagcttgatcctgttgagttcatagaagcatgaaatcatggattctttgtaatgctataaggagtgtgacagcagattttttttttttttttttcggttcgtctttgggaacaaagattcaaataaacgaaactgtgttgtattgctaatgacctctaatattctcaagacccatcatttgtgttagactaagaatgggggatgaggtgttccatattataagaacatcgagaccagggtcatttttgatggggtcttaatagatgatcattaattgtttccaattattatgtttgttttttctcttacatggcaatgcttaattgataataaaaatgcagtacaatgattcttggctttcagtactgtgatcaatacttttggaggtttcacttggcagtacactgccatccaactcagctaaagcaccattgattaattggaatttgcattattctagtacttggtatatatacctttgggagcaaataacatatgaaggcgtgtggaaagactatgtttgaggagtatttttggaaacggtttagaaaaataattttatcatattttgtaaatcaaaattttatttgaaatcttgaaatattttaaacttgttaattttctttgtttttaaaaatatgttttatccataatactttattttgagttattctttatatttatataattatttttaaaaaatcttaaaaaaagaaaaaagaaaaaataacttaaaacaattaaaatgtattattttaaaatattatattttctgattttagaaatagaaaattgttttatgtttttagaaataaaaaaattgtttcctgtttttttggttgttaaatatatttttttcatttttttttggagaaataggaaactattttaaaagatggttatcaagtaggacctaatttgccgagcactaaactttgacatttgaaattcacttgatgatgagttgatggggaagatgcacaatggtcgtcaacattcatatggggctttcctttattcattaattcctctagcttataaggctatgggccatcaaaatttatacactaaagttgtgtgttggtgaaaattgtcgttggtggggtaatgttggaaataggtttgctagttagatgactacaaacatcctttttcttttgttataggagaggaatcgaggaagacgttcataatatttgtccaaatattaacttcatttaatcattatatttgtcaaaattttaatttcaattcttttggaataaaattttattagtttgatggtaaggtatgtaatataaggtttaaggggtattttaggcattttatattaaataaggtaatggagggttttttaaggattttcattaaattttcaatggaggcaattaacaatcaacctatatatacgtcaatggtcatagttggtcaaaagggtggtcttgctcttatcaggctggtcatggggtgttggtataatttttcaaaattaatggactaaagtgtaattgtcgacaataatagtatgctaccatgtagaagtacaatcttatgctataatcaaggaggaaaatgtcaggatatatcggcgatatatcgtgtatcgggaggggtcgacacgatatttcgtggagaaaaatcggaggagagatatttatgcaaatattcccaaaatatcggcgatatatcggctcggggagatatatcggagattttttgaaaaaatcgcctctggtggcaaaatatcggcgatttatcttcgatatatcgccgatattttgacgatatttcccctcctttatgcaacgtgatctgacgacccagattacgcctgtgttgatccgactgcctaaatgtgattccaatggtaatatggcgattcaactacctaaatgtgattccaatggtaatatgacgatccaacagccaaattgctcccaatttttgatccaacggccaaaattgattttcaacggaaaattaatgttctaacggctattttgacccaaatttcttctataaataacccaaatttcatctatttcatccattttttgctttctttcttcattttctctttcattactccaatttttattaaggttgctcaattatttaatcattttaaggtatatttgttttaaattgtaattaattttgtttgcaattgtaattaattcatgtattttcaattaattagtatgtttgcaatatggatgatttaatgctatttttacattcaattgtaattatttttttatatttttatttaattaacttaggttaatttgattatttaattataaattgatatgtttattttagatgattatttgtgatttattttcacatttagaattaaattaaactagttaacttagctaaattatttaattaatttaattaacatgctaaattatttaattaatttaattaacatgaactagtatattttgaatatgaaatatgtttatttaatgaatttaatgtgtacaaattattgatatttaatgaaataaagtattttatgtgactttataatgagaacaattacaaaattaacatttcttatagatcgacgtgatataattacatataatattgtaaattatatcatatgtatatcaaatttttcaataaaacaactttaaaatgttcattatacttttaattatattattatgaggttttccttatatttctatgagtttttaataattttaagcctatcgatatttttttctagaatatccgtcgatatatctccgatatatccgtaaaattgaagtaccgatatatccgtgattaccgatattttcatcattggctataatactatgagcttgttttattaacaatattttctatagatgagatgagaatttaccaaattaatgacataagcaaagatttgtaaaagactaagaactatttttctttaggggggtaattctctctattgatgagttatttgtagtcaaccaaataaaccataacaatgtgaaacctttgctccctatatgtacgattgaaacattacagtaaaaccttcataaattaataatttcatttaaataatgaattttttcgattccaacttggactagtatactaagttaataactcactaaatacataaaataataatattttcaaaaatatttgaaggccccaaaaaaatataaattaataatcgatgaaaaacataatatatatatattaagtaacttcatcatatagtcaaactaggaggattgacatttggccaagatgtgatttatctctttccttgattggagtggaactttggttttctttagtgaggaaccgtttcacttgatggatggtcaaatgatcaagacgaaatgctttaggatggtcgaagagtaagttagtctatgataaaagacaacccgctctttggcttaagaatatgtattaagtatttttttataacttttattttattaattaaatagatgaagatatgcattgattacattttaactatttgtcctagtctttagttgctagtgagttgcatgagatatgggtcattcatttacgtagtcggtttgtttctattttagtggtcatttgtgtgagtatttttttgtatttaaacacttgctccatgaaaagtaagacatccatcaaacttatttatcatctcatctcagggttgtattgggaggtgctaacccctcgaagcttttaaacctactcttactaaacctttccttatcgcattatgagtctaacatcacttagaaactaaccattatttttgaatccaagatgattacttggatttagcacaaattttatgagagacaagaaatgttaattcttttgagaatgacacccaaatcctttgtgtccccttgaagcttaaccaatatataggtgcaaaaatatttgaaagagaaatcagagaatgcaaatatgaaaggatcgatccatatcgtccatgcaatattcttttgtctatacctattgttattctttctgttcaaagaaagaaaaggacacacccattgaagatgaaacccaagatacttgtagtatgtgactcatattgagtgaaaaacatatggagaaaaatgggcaaataccctcatggtacggttcaagagtatttttgaaatttcaatacttgagagttagtataaatacccctttatatatgtaaccctaattcagatatagtgaaagtcttctttcctattcctgtggacgtaggcaatctatcgaaccactttaaatctatctttttttttcccctctaattttttcactaggaatcgttgcatgaaaatcaataatactctgtcctagctcattgcaaagtgcagccaaactgtctttattaaaatttgtcattcttggcttgggtcactttcctgagttttgtttgggggtgggggggaccatttcaaaggttaatctttaattgaaatatagatgctatgtttttaaaaataaagtttttttttttttgggtggggaccatttcaaagattaatctttaattgaaatatagatgctatgtttttaaaaataaagtttaaggtgacattttagccaagaatattcccccaagttcattgagggtgtgtttagttcttaatagtacaaagcaaagaaaaaaaatacctatgaaaataatttttttatgtttagttttattatgaaaaaatatgaaataaattaaaatatatttaaaattaattaaaattttattcactttaaaattattttatcttcatgtagaagtggaaaagtaagttaaatgggtttaaagtaacacttaaaaaaaaatttatgactttaaatctacttttttaattttttttaatactttttatctttattttttttcttttacatttttcctcaaattttttgccaaccaaacattagttaaatcataagagtttgagctaaaacctcaaaaaaatataaatggagatggagataaaggtataagaataactaatggggttttgctgaatcccattaattatgcagattgaatgcagcacaaacactacatattttgcgtgttctaagttttacacttcttatagtttgaagctctattgcatatttcttcaaactcatgtcgcaaggctgcgtatgaaggaaatatcgggtgattggagtttaaacgtgtttttttattagaattaattggttaaaagggatgaaataattctcatttgaatttgacattttctatgttattgtttgaagaataatctatttttgactattttaagtatttagaatcagtatatttttgacaaaaccctttattatcgatcaacatattttttattatttagaatagaaaaatatggcactggatcaccatgtggggggtgaacgccgatcctccacccattataggataagaccgcctgtgtgtttcaac

SEQ ID NO: 12533 - DNA, 3172 bp, Vitis vinifera
  Intron number 2 from transcript GSVIVT01001085001 (locus G SVIVG01001085001) derived from phytozome v7.0 (chr-ID chr1 ; pos 22490228 to 22493399 reverse strand)
acctttacactttaagccacaagaagctttataatgttctcttatgatgaagaagctttatccattccagaaggcctttactcggaatgaacctctccagaaaataatctcacagtggagaaaaccccaagcaagaacagcgcaacagtcacactctcagaagctgtggagatatcagttaaatgtgattccagtgattgaggaagataacagaatccacaactaccagataccttctaataaatttcaaactcttgatggtggatgtatttaggcaaaaagctttgaaggagacaagttaaattaactataccttaaaatattttaattttgggtttttaaaaaaataattcttaatttttttagagctaagttatatttgaaagctaacaaatgaaaaatagttttctttattccccgtggaacttattatataccaatatatatattggagttgggtgggtgtccaagttggacgacccgatttgatctaattaaataagagattaggaaaatagtttattaaagttgaaattttcataaattgtttggaaactacccaatagaggaaaggaaagagatttttttatttcactttattttttttaggaaaagaaagacgagataactcaaaaataaaagttatttgcaaaaaaaagatgaaagacttttgtgttgtgaaacatagtggttttcgattttagtatagtataattcatgacttgaagcaaaatattgcacaattcgaagttttcccttctttttgaataaatttcaagaaaacagcgctttaaaattattataaaaataatatggttttggaactaagtttgaaaataatgcttttctatcaaatatttacttaaacatgtttatatattacgacattaaatttgttgtagaagaatctatttccagaacaaatttgaaagagaagtaaattttttaattaacaatcgatcacacatgttctttaaattgagaagagaaaactacaatacataggtctcgaagtttgcatattgatcgttgatagtgtaaagaaaatatgtgatgaaatctagaccgttggatgaagtacttgcaatggaacaaattataacatagtaacatcggataaaaatgaaaaaaggacgagagtaaactcatactcatacaaaagtaaaaggaccaaaatgcacttccgattaccacacgaggcgaagttctgaaccgtctgaaaatcattgcaattatcacgttttctttgctgtcctccggactgttgaaaagagcgtgaacttgccaaatcaaaaaggtgtttctctcttttcccgctcttctcacctgccttttgaacttcgtacttcaccaacgatataaccccaagccccatacctgatctcacaactcaattacagctgtcccttattctctgcggcactcgactctcttcggacttctccgcctttgtttcctcttctgtgaacactttttgcgatttttctaaggaggttgcttgtttggaaggtattttttgtcgattcgttttttatttttttatttcatgaatgttagatcagttttttggtattgatttgatggaacatcgtttggatgcctggaaatgcgaggaaaatgagtaggaaaacacgcaaaagcaaggttggaatagttgatcggtaacgagtgtttgaaaatgcatgagttttgagaattttgtttttgcttataaattattttattctcattcaaacaagaggaattttttttctcttagaccatgtttcggttgcagacaatctgaaacagcagtgaaaagaaaactgagaaagaaaaaactaagagaaaagaaaatagaaaataaatttaaaaaataattaatttctaactaatttaaattatatttaatttaatttaattttttattttttgttatttttcaagaaccaaacatctcttatagtttctcccaaaaaggagaatagaggtctcttcttgaaaactgtgagtgagagcttcaagaaacaaaatcagattcaacaaaaattttctcctcttttatcgcttttatttttaatttttggaaattagtggcctgaagtaaaatgtttcattttcttccttacatgaattcatataaatgtttatatatatatatatatattctatgaaattttgtataaattatattatattttaatttatttgaatattttgttgggaatctttggtctttattactcgtagttttcaagatccaagctgagcgtagggctctgtctggactgaaagtgcgagagaaaggatcaaagaagggaaagaggcaaatggaaaaaagggaaggaaaacgagaataatacctttgaatttaatatattttttcccatttctttctaaatatttatttgtagaatgaagaatatctaaacatgaaagttctaaactatttatcattatattatatttctcgtagttattttcatgaagaattcaacaagtgaaattgcgatctatttatttattttttgatccaaatgcaaaggttggatctcagaaacaatgaggaaatgaaagggaaaaaggagaagggcaacagaatgaaggaaaatggaaaagcaatttgaactaaaaatatatatatatatatatatatattctctcttgttttcttcaggatctagttttttcatgcaaacaattttttgtgattggtaaatttttttcggacttgaatctaaaaacctcccacaagccttccccatcctcttaccacttcaagcagacctcaagggctttcatgcaaacaattttaatcacacatcacacacatatttgtaacgcatcgaggttgcttttgtaaatgcttgagtcgcaaaagtttgagtagattaaattctatactgaaagagcagaacgctttgaacataaaacatcacagaatcatattttcctctactaaccattctttgttttcccaatttcctctaaatacgaacttaggaataaaaatgctggattaaggggtttcataatgtagatttaggaggaggtgggaatattccatatcaatagggttggaatttgaatttgaccctaattttcttaaaaacccatgactaaatcttcatatgattgctggaaatattgtgggaaagaacaagggaaaagaaagaagtggaagaaaatttaa

SEQ ID NO: 12534 - DNA, 3702 bp, Vitis vinifera
  Intron number 1 from transcript GSVIVT01026115001 (locus G SVIVG01026115001) derived from phytozome v7.0 (chr-ID chr1 8; pos 24392305 to 24396006)
aagtctctcagacgcatcatcagcgcatatctcaagtacttttcatctttttctatttttgcaattttattttatgtttgaatttttctgaaaataattcatttcttactttgatttctacttatccaatcagaggtttcgatgctttcatttttcacttcagttgttttttttaatgagctactgatgcagtaggggcttttgattcatttgttttattttttaaggctacgtttggttggtaagaaaaactgagggaaaggaaaaaaatggtactaaacggaactctcgtttgagcttgataagatgtttgtttttcaattggcttaaatatgtattttggccttttaaaaataaaataaaatattcttatcaatgaaattgagaaattttgatttaaatattatttattttttccttttttagcctatttattgattatttttttctagaattttcttttggtgatttggcaatgggggaacggttggttctctcccccagaggctgcttttagttctcgggaaaatgcgagggaaaataaaatgcaagtttcggtcaaataatatttttcttaaaatggtaatcatttgagactttggttttttacttttcacataaagttcttctattgcttcagtttttcaatttatctacattgccggttttttttttatcaaacatgtgggttctgatgaacttgaaatgttctattttgatttttaaaaccataattttggtaataaatcactttatttatttatttatttttttatctctgggttttttattgttgttcgtttgggtggtttgatcactgggaaaaatgttggttctgtttggttctcaagaaactgtgatggaaaggaaaaagaaaataagaaaaggcgaagcttcaaaattgctgaattttctacctttttgttctttcccttgttgttagtggggtccaaaaggagcctaaatcttaattctgatattaagttcccaatctttcttagataaagttgtcattgatttgtgtaaagtagagatggaatcagaaagttggcatttgcttggtgctgattatctttgcaattgatacttttattattttttgtatagccaaaaaatttctcctttcagtttataattttgcaattctggaaaatttcgggttatgtattttgtgaatagagctttggaaataaatgtataaatattctatgaaaattgactgtatgaaataagttatgagtagtttaatcatatgggatctgctgggttatgtattttgtgaatagagctttggaaataaatgtttaaatattctatgaaaattgactgtatgaaataagttgagtagtttaatcatatgggatctgcttgttgtttttctaaagaatcaaactattgtttcttatattttaaaaactgagagctcaaggacatttttcaaaaaatcgtatccgttgtcaaacaatctcttagcttttgaaatttaaaatcactgctattattctttgtttctttagtttgtcatgttgaaagtttttgtattttaggagatagttatgtccaggctgaattctaaaacaatggctatgttatttgtagagagtgaaacaaactgcaatgccaaactgcattacagaatgccaggggatgtaccaaaaaaaccaaaactacaaatagaactatgattaattggatgggcagagtgagaacatactgggatgatgaaaaatcaattgtctcttatagttagacttttaaattaccttccaatctggaacctgatgtttgaattacataatccttaattgataccagtaccacaaagaaggatgcattaaatattgtgatacagatgatatgattgccattaaaataactcatctagcattggaacattgccaaggggcactgctctttgtgccttcctgttatcagatcagactgttaagcccatggagatgggttgtaagagtatgctccaaccttggtgtatggtaatgaaccaagtacaggacatctaccaaaccagaaagcacctaataactcatcattgctggatatatatatatatatatatatatatatatatataattaagataataaggatgccaaggtggagtaccaatatgtgtcagttgcagggaataactggatgcaaggttttgtcagagtgatacgaacctggagtcaagttattgctgttttggaggctattttgagagtggagcttagcagggatagagtgtgttttaagatggaggttagctagagatggttgcttcattgttaactttttcctgtaggttgaggatagggggagaattgcaaaattacagtatctggatagcaggttatcaaaccgaatattcgggtatcaaatttggtttattttacgttgcttcttatctaaatctactagtttcttcattatttgtaacagttctttacttgggaggttgggatctctctattccgtacatatttgttcctgagttttttgaaataaataaagcgggtgaagtctttggaacgacaattggtatctttattacattagccaaaacttatttgttcttgttcatttctatcacaacaagatggactttacctaggctgagaatggaccaactattaaatcttggatggaaatttcttttacctatttctctaggtaatctattattaacaacttccagacatttcgggttaagaagatgtgaaagcgcattttgccgagttccttagagagagttgtctcgcgcccctaggtattctctacctacccacttgtgtcggtttcgggtactacctggaatgaaagaacaaaaatggattcatgaaggtttaattaatgaggagtagtgatattagacaacccgccctttctctttttttttgactctgtgggggaaaaatttgactatggtctaggttatgtgcagagggcaaactttgtttaactgtgtaactaccctacttctggagacttgtggtccatgcttctttattctctttgatattgcatggctcctgctgtcctgaagtcttcccaaagaggaggaaagaagttatgctcagacggcatgataagtttgtccaatgggatgggatgaaggttttatgttcagctccctttgcctggcatgatgtgtttggcttgaaccaaatattgtgtcttcattgaagggattgagaacttggaaaggaaagcaattattatgctgcacctctgtttatctggaatggactttttcttcgatttaattcttagttttggggtgtttgggctgtagtgggtgatgaggattgttctgttgcgtctggttgtaggttcacattccttcatggatttttctattttacactttcttttttcaatttttttggtgtaatttgatatttcctgaattttgccccttgtgtaatctttctcttcgttattcatgtgtacttaagtcacatgatgcttttccctgttatactaatatgttttttttcctgttctgttcacccttccaaatctagttcctgattgtgctggcttatacaggtttatcttaatttttatctgtaatcacgttactttctggtcgttatactaatctagctgtctaaatcactggtatgttttacatatgccattcaatgaatttttccagtcttgaccatatctattcttcttgtatatacagctatccag

SEQ ID NO: 12535 - DNA, 1221 bp, Vitis vinifera
  Intron number 6 from transcript GSVIVT01036059001 (locus G SVIVG01036059001) derived from phytozome v7.0 (chr-ID chr6 ; pos 21272004 to 21273224 reverse strand)
ttactagtttacaggtatgcagaagtaggtaaattgtttcttggcatgcacactgtcttgatcttcatgggtgtgtttgatcaccgtaattggtacttcaactaaacatatcaagtagtcctactgtttaagtgtgttttactgtgcaaatagtataaatgagatgccagttaaaaaacagactctacttgaaaatcacttaaatttctacaaccatggtcattaaatacttaagagaaacatttgctctcaggtttttaaagttttgtaacttttgattatcacttttaatcattgtttataaccaaattccttttaattttcaattcttttataacgaattctaagggtgaggaatttatcaaagttgtaaactctcttccactttgtcattttgattaaataggaaaaaaaatgatcatgcatataagtttattagattctttacattaaatcatctacatatttcattttttaaattatgaattatataaaaacagttgaatttttttactgtattcttcaatcatcaccaaaaaaacatagtagtacatgtgacatagcttaacatatggttcttcatagaaaaatctagtaattgtttgtggattaatctgtaaaacaaacttttcttttcttttaattcttttaattttttgtttatcaaacagtataactgaatctgaattcattacttaaatttcagatgctaccagtggctttttatttttgtacattcaataatacttgcagttcagtattcaattttcagttttattaaacaccccctcttcaactctttgagagagttttattctttttgttttattttttgtttacattgcctctgccaatcctatggttttgatggtctgggccctaaatgaagaacaattgtggtaactggtaattagacagcaaccaaggtttagtcaaacaaatattaaatctatctgaagtgagcagaaagccaaagtaggttttggctagctgactgcaatatctagaaaaaagctgtggaattgagttcattgaattgcatgggtatatgcaacattcagggaatggtggaccatctgtgatatttgtcaccactggagagaactggagaatttggaaagaaaaattgtttgcatctttcctaaacttgcaggatgtggtcttatgaatagtttttcctctgcaggaagaagttgaaaacctttctattcaggagcgcag

SEQ ID NO: 12536 - DNA, 13156 bp, Vitis vinifera
  Intron number 10 from transcript GSVIVT01012941001 (locus GSVIVG01012941001) derived from phytozome v7.0 (chr-ID chr 17; pos 14030105 to 14043260)
ttcttaagcagattttattaccggtatgttctgacatatattctgccttattgtttggataattaaagatggtcatctttttgtcaggatttctgcttttaatagtaaattgtattgcaaaaataatgttctaggttagtctaagttgactcacacatgctaaatttgaaatgacaaacctttgaggggttttacagcatttgtgtgtccttgaagattttttgagcacaagatttctgagtaatttgatgtgctaatttctttgaccttaggatgttaggtaatcacattaatccttaattcattttgttagaatttgatgaatcaatttggagcaacttaagttggattgattgagcattccatgtgctagtgagaaattgggcatcaagaatcagtaactatgaaatactattgatgaaagaaaaagatgtctactaggaaggatgagaaattgttcacaaggaaaagttcctgcaaagtaaggccttagtatagtcccactacacccaaacaaatatctcttggtgaatagtgtttttttaggaatgaacaactagtccatgctgtattttttttgagcattactttgtaagtaatctaattttttttcatgctcactaagtcatggcaacatcataagcctcatttttggagctactcttctcttccttgcaaactcattgtcatctcttcttgaatatgaagctactaggcagcaaatttgtgttcatgcaatttaacaagaagtagttcaattttgagcagtttgctttgcctttacttcttctgtatgaatgcttcgaagctagtgtaatataataaacttgtgtgtgtgtgtgtatgtttaagttgactgtatgaaccattggatttcaaataatgaatttgtaatataataaacttatttccttgcttctctttgggctttctgttccaaggtttttaaggggactccccttaatgtgttacaacttgactggttagcggtgtgtaattccaaaggattggtctaatctagagagtttgtttgtttttactgtgtactttcttgtttttgtattcttgtagtttagttttctttggtgagaggatttctcatccttctcttgtacttctttttttctatcaatatatccctttgtcgtttcctatcaaaaaaaaaaaaatgaatttgtacaatcttgaccccagcacattgatattagtgtatgcttgcaaactcaactctatacttctttcaaacagaatacctttccaagagtgaatttcaagtatcagagattatatagtctaccccaagatgactttgttttggtgaatgcatagaccaacttataatgctcgaggcataggctatatcccggtctagtatgggataagtatatcgactttccaactaacctttgatgcatatgtcggtctacaactgcctcctccttaacatcatcaagtttgtgattctatccactaggagtgtcaaccgacttacatcctagcatcctagtttcccttagcagatcagaaacatatttttgttgtgatataaaaataccactccttgagtgagccacttatatatatgcaagaaatgcttcagttttccaagatcttttatttcaactttgcagctagaatttttttaagccactctatttcctctaaatcatttctagtaacaattatgtcattttcatagacaattggagcagtaaccattcctaaagttgagtgcttaagaaagaaagtatgatctccttgacttttttgatacttcacccccactatagcattagtgaatctaccaaaaccatactctaggatattgcttgagtgcatatggagcctttttttagcctgcacacatggttgttattgaaattcttattaaatcttgttggagcttccatatagactctctttcaagttactatgtaaaaatgcatttttgacaacaaattcctactaggactaaccaagattggtagtcaaatacaactagatacacataatattcatctttgcccttggggcaaaggtctcttgataatcaactccataggtcttagctactaatatagctttgtgtcactctagagtcccatgtgcattgtatttcatgccaaatacccatttacacccatttggcatatgtccctttaagaagttatacattttcccatgtttgacccttcttaagtgctcttacaatcttatttccttacttatggcttttctctaattctcattcctaaatgttttgtggaaaaatgtaatttgtatgtaggttggcaaattggctaaattagggaagttataactatatatttctgtaattaaggagagaattaggacaatcttgtaatcaaggggatctaatataattaggttaggaaggttcttatttttggtgctaggaataattgtataaatatgtgagtctgtgtagattgaaattaaggaaaaatttattctctttcttccttccaattccttagattcttcatggtatcaaagctttaggctcataaatctgggaatcaagaagagaagtgttttcggccttcattatcaagttcgaagatcattgtcaaccttcattattgacctttaagggtttcctactcatttgaattgcgccattgctgcaaacacggtttgtatagtcactcttgtcttagcctcacactaagctgcaaacacagatcgtgaactcatcaccaaagcaacaggagaccaacaaccacctttgtccttgcgccattggtacaataggagattgagagcttaggacctctgatgcaactaccttgattgtcgttatcctagattgccactagctagggctttaacacaattctgagctctacgtgttgtcttcaacatgttctttaactttcaaaaacctttggagtttttatatttgaaccacaaaaaaaaaaaaaaatgttaatgacgtattagaaactcccactataaccactcagtctgaggaagttataaccagtcacaccatgggagaattatagaatattcaagcgcctacaaatttaatgggaacaattatttaaaatggtcacgacttgtttgtacctttctgaacgaaaaaaaggaaattaagtcatttcttaggaattggaccaaagagaggagatcctcagtttgatacctgggacaaacatgactcaatgattatttatttatcttattttgtgtattgtttgataccgagccaagacaccaagaccgatatgcctcagggccctctaagtcgatgattgcgatcgcgactttgaaccatggtataattttgtaattaaggagagaattaggacaatcccataatcaagggtatctgatgtgattaggttaggaaggttcctatttttggtgctaagaatgtgggtttgtgcaaattgaaattaaggaaaaatttattctctttattccttccaattatttagattcttcatgtttcttggattgtttacgaaatttcgatgagatttaggtgacaaaagaatgctttgtgtgaagatatcaatttatcggttgagacaatggaaataggttgttgagtgtgcttttgtgttccttttttagtagcaatagcccttaggtatcctcaaaatcaggttcatcatgagaatcatcaacattttccaacctatttttattttgttctggtcatggttgttaccttctttgatagacctgcaatgtggcgacactagggcctccacaagcctgtttgagatttgtgtttagaaacagttttctattatgaaaatgggaaagctgttttccagacttgaaaaaatgtttggtaattttttgataggaaacaatgttttgaaaacttgttctgaaaatagtgattttaattttttttttcagttgttttcatttattttctaggggttgtttcaaaaaataattctagaaatatgggaaatgattgaaaataaatcattgtagatttttattatttttaagtaatatttgaaaacatagaaaacaggttgagaacattccaagttcttaaacaaccttttgatttaggaaacatcaaagaactacttttgaaaactatcatccaaaattattttttggtaaatgtttttgaaaatgttcccaaacaggcccatgtctctcacctttcatctgtaatttcagagatgcagtaggtggaatcaagggagacatagattgttcaagataagaaaaaagatggtttattttccactaaaggctcccctctgaaggtaagtcttgggatagaatgatcggttttccacaaaatgacacccatggttgtgaagaactttttggaagatggttgttgcgtttgtaaccctttttttgtttcagaatatcctataatttgttcttcttttaagaatggatatgaacataggggaaacaaccaaacacttgagaagggagttagcaaaaaccattaacatcaaggaaaaactatgagaaatcaatctttggagattgatgatttgagactgtaaaagcattttggttaggtgctcaacctttaaaactacttccccctagtagaactcaagcacattttttgaaatattagggttgttataacttctgaagatgcctattttttctctttgcaaaccctttttttattattttattttatttttatttttatttttattttttgtttttgtgaagaatcattacaagaacattgatgaaatgatgcatgtttcttggaaaaatggtgctaaaattggattcaagtatcccctctcattattgttttttgacaggtaaatttttttgtcatcatgggccttgaacttggaaccttccacaaacccttcccaacccttttatcacatgagccaagcctcaaagtattccctcttattatcagaatgagaaaggaaaaatgttaccttgcaatttaaatctttgttcatttgatagattaataaaagattaacaaatagttttggcacatgaatattgacttcaaggataaagatggtgaccaattactattgctaaagtaccataaactatgttaatatttttatttccaggatatgaactgtatgtagagaaaaaatgtgcataatttgtcatatgtgtggaagaattaaattaggaaagtcgtgattttgtagagagaattaggtaatcttgtgatcaaagggattttttgtaattaagttaggaaagttttccatttaggtgctaggattttttgtatatatatgagtctttgtacaggcaaaagattaaggaaaagaatttttaccttgcattctttccagctctcttctacaatatgttcagtaatgcctgactcattgatcttggagtttgagaaacagtcttttgtgatggtaagagcatgagaatgaaaataattacttgagtgtaaagagcacaaaccatttgggttttctagtgattagaggagatttctaagttactcaattttctttttgttgaactctccaatttcagtattgttggttgcattctcttggaaaacttcttcagaatgatcaacacatgcttgtcttcctcgctttccagtttgtgctccttgattgtcattgttttcgcttactgactgaagttttccatgaagcttccaatagttctccttggtgtgccttggctttttattgtagttctaccctaaaccatctttattaatagttgatttgctagcttctattttcacggattgtagaaagtttgctgttgttattctgcaacccttaattcataactaggactccattgttcggtttggctgtaacaagtgttgagcctttgatggattgattatcaaacattattgtctgatgtccttctttagtctttgttattgagactagccaggaactcaaagattctctttttttttttttttttttgcatgattctgtaacatagtagcatcttcactatacttcattttaaatttttggtaatggtccaactcatagcgccttcattgtattataatactctatgacaaacatgattccttgtttggtggttgtgatttttgtcttgatttcattgatttaggcagcatctttgaccttggagtacgtttgtcgcattgcttcctagatttcctttgctgtggttaggagtttacaagtgccactgatctcaggttgcatagaactttagagctaggataatcatcaaattttgttcatcccaaacatcaaatttggaatcatcacgaataggctttggtccaattagatgatttagctttcctttacctttcaagaaagttgaaacaagttctaaccaaaggagataattctttctattcaattgataagatgcttgaagattctaatactcgactgtaacctgttgagaagcaacaacttggttgtttgcctcagatatttgaaacatggtgtgttgagtaaaggctaaatttgtaaccgcatagaatggtatgaaaaaagagatgaaaatggttctttgttccaatagttgaaactgtgaaataactaaagaatgaaagagacaaaagctttgataccatgaagttgaatgtatgattgattatatttcgaataatgaatctgtatagttttataggtgtctatatataactattaaaagaaaaaactaactttcctaaaatatctgtcctaaaatcaaggaaccaaaaagcctttggcttccatatcctatgaggattcttaactgattcatcaacgtttttgatattatttctgttgaaatttggcattcaaagttagggttcttaatttaggaaagttgttttaggaataaaaaaggagagatcatttaggatgattcagtttcctaattttaggagagattcagtttcctaattttaggagagaatcaagccagattgatatcttcttattcggtcatttgtgtatatatatgtgtatggtgtgtacctaaaaaattaataaaaaggaattcaaaaattcttcatggtatcagagccagttttctgaaaccctaatcccttctggccatctcttattcaggccatcattcattccggccaaatctctctggccatctctcaatccgaccatctctctctggccatctctcatttcggtcatcagtccctgttctcagagccaagggagaaaacgctttctggtcgatcgaatcatcgtcagaaaacattcactattggcaacttttccggcgacggttttttctacaccgcaaggaccgcctggaggaaatctccaatttttcccaaagcaccggagccagaaaaccatccacgcgcgtttttccggccgacgcgtgagggcgcgtgagccactttccggcgacgcgcttcctcctccaggatcgcctgacgccgaccagccacccttcttacctgtttctgccatccgagccctgcacgtgcctcttttggggttcttttgcctccgtgggccctgcgatcagctttttcgacgtcctccggctattttttctcaacttcaatccctgcacgtgccttgggaagtgttcttctacctttccggtccatgacaaaatacagaatggcatcatcacacgtatccagcgtcacgtcaccagaatcagggggcagatctgaaattccaaaccttggtggcagtgattcctttcctattctcgtcacaggacacaaattaaatggccataactatttacagtggtcacaatctatgttgctgttcatttgcggtaaaggaaaggatgagtacctcactggagaagcagctatgccagaaactacagaaccgggtttcaggaagtggaagattgaaaatagcatgatcatgtcatggcttatcaattccatgaacaatgacataggtgaaaattttttgttgtttaagactgcaaaggacatctgggatgcagccaaagaaacttactcaagttctgaaaatacttcagaactttttcaggttgaatcagccttacatgacttccgtcaaggagagcaatcagttactcagtattacaacacaatcacaaggtattggcagcaacttgacttattcgagactcactcatggaaatgttcggatgatgcagcaacatacaggaaaattgtggaacaaaagagactgttcaagtttttcctaggactaaacagggaattggatgatgttagaggccgaatcatgggcattaaaccccttccaagtctcagggagtctttttcagaggttaggcgtgaagaaagtagaaagaaagtgatgatgggatccaaagagcaacctgccccaacattggatgcctctgcccttgctgctcggtcatttaatagtagtggtggagatcgtcagaaacgggataggccttggtgtgattattgtaagaaaccaggccattataaggaggcttgctggaagcttcatggcaaaccggctgattggaaaccaaagccacggtctgacagagatggtagagcacatgtggctaccaactctgagagcacatctgttcccgagccgagtccattcaacaaagagcagatggagatgctacagaaactattaagccaagttggcagtggcagtactaccgggatagccctcactgctaatcaaggaggaatgaagccgtggatagtggacacaggtgcttctgatcacatgacaggagatgctgccattcttcaaaattacaagccaagtaatggtcattcatccgtccatattgctgatggttcaaagtcaaaaattgccgggacaggttctataaaacttactaaagacttatatcttgactctgtcctccatgttccaaacttggattgtaatcttttgtctattagcaaattggcccgtgatctccaatgtgttactaaattctatccaaactcgtgtgtttttcaggactagaaatcggggaagatgattggcagtgctgaactgtgttccgggctctacctcctctcatgtggccaattctcaaaccaagtctcttaagcaagttgcgtacagtctcatagtatgttagagtctttcaattctgtgtcaaattctaaggtcaataaagatagtgagattataatgttacactatcgccttggtcatcctagctttgtttaccttgcaaaattgtttcccaaattatttatcaataaaaatccagcatcttatcactgtgaaatttgtcagtttgcaaagcatactcgaatagtatatcctcaaatcccatacaaacctttgactgttttctctctagtacatagtgatgtgtggggtccctctcggataaaaaatatttctggcactcgatggtttgtgacattcgttgatgatcatacacgggtaacatgggttttccttatgaaagaaaagtcagaggtcgggcacatttttcaaaccttcaatcttatggttcaaaatcaattcaattccaaaattcaagtcctcaagtcaaataatgcaaaggaatactttactagtagtctcagtacttatcttcaaaatcacggcattatccatataagttcttgcgttgacaccccacaacaaaatggggtggctgaacgcaagaatagacatctcttggaagttgcccgatgccttatgttttcctctaatgttccaaactatttctggggggaagctattctcacagctacctatttgattaaccgtatgccatccagggtgcttacctttcaatccccacgtcaacttttcttaaaacaatttcctcacacccgtgcagcctcttctaatttaccactcaaagtatttggttgcacgacattcgttcatgtgtatcctcaaaatcgtagcaaatttgctcctcgagccaataagtgcattttcctagggtattctctaacccaaaaagggtataaatgctattctccaaccaacaaaagattttacaccaccatggacgtctctttctttgaacatgtcttcttctatcccaaatctcatgttcagggggagagcatgaatgaacatcaagtttgggagtctcttcttgagggtgtaccttcttttcactcagagtcaccaaatccttcccaatttgcgcccactgagttgtccacacccatgccttcattagtccagccagcccagcacacagatgttccttctcccgtgaccatccagtctcccatgcctattcaacctatagccccacaacttgctaatgagaacttacaagtttacatcaggaggaggaaaagacaggaattagagcacggatcacagtcaacatgtggccaatatattgactccaattcaagtcttcctgaagagaacataggtgaggatagggttggagaggtgttaattcccagcattgatgattctactctgccgattgcattgaggaagggtgttaggagatgtacagatcatccaattgggaattatgttacgtatgaagggctatcaccatcttacagagcatttgctacttctcttgatgatactcaggttcccaacacaatacaagaggcactcaaaatttcagaatggaagaaggcagtacaagatgagattgatgcacttgagaagaatgggacgtggactatcacagatttgccggttgggaagaggcccgtggggtgcaagtggattttcaccataaaatacaaagcagatggatcagtcgagagattcaaggctcgtttggtagctagagggtttacacaatcctatgggatagactatcaggaaacttttgctcctgttgcaaaactgaacactatcaggattcttctctcattggctgtcaatcaagattggtgcttgcaacaactggacataaaaaatgcgtttctaaatggtgacctagaagaggaagtctacatggaaataccacctggtttggaagaaagtatggcaaagaatcaggtttgcaaactccaaaaatccttgtacggccttaaacaatctccccgagcctggtttgatagattcacaaaagcaatcctaaagctgggttacaaacaaggtcaggctgatcatactctatttgtcaagaagtctcatgccgggaaaatggccatattgatagtctatgtcgatgatattattctatctgggaatgatatggaggaattacagaagttgaagaagtatttgtcagaagagtttgaagttaaagaccttggaaatttgaaatatttccttggtatggaagtggctagatcaaggaagggaattgtagtctctcaaagaaaatatatactcgatcttcttaaggagaccggtatgctgggatgcaaaccaattgatactcctatggatagtcagaagaaacttggtatcgagaaagaaagtacaccggtagacagggggagatatcagcggcttgtcgggcgcttgatttatctctcacacactaggccagatattggctttgcagtgagtgctgtaagtcaattcatgcacagccccactgtggaacacatggaagcagtctacaggattcttagatatttaaaaatgacaccagggaaaggtttattcttcagaaagacagagaaccatgacattgaagtatactcagatgcggattgggcaggaaacatcattgacaggcggtccacttcaggatattgttcttttgtctggggaaatcttgttacctggaggagtaagaagcaaacagttgtagccagaagtagtgcagaagctgagtacagagctcttgcacagggaatctgtgaagggatttggataaaaagggttcttagtgaattgggacaaacgagttcatctccaattctgatgatgtgtgataatcaggcagctataagcatagcaaagaaccccgtgcatcatgataggaccaagcatgttgagattgacagacacttcatcacagagaaggtgactagtgagacggttaaattgaactatgttccttccaagcaccaaaccgcagacatcctcaccaaagctttacttaggcctaacttcgaagacttaacttgcaagctgggattatatgatatatattctccagcttgagggggagtgttgaaatttggcattcaaagttagggttcttaatttaggaaagttgttttaggaataaaaaaggagagatcatttaggatgattcagtttcctaattttaggagagattcagtttcctaattttaggagagaatcaagccagattgatatctttttattcggtcatttgtgtatatatatgtgtatggtgtgtacctaaaaaattaataaaaagaattcagaaattcttcaatttcatttgacaccttaatttgatgttccttgtttttcttattctttaatctgttttgctttaaataatataaaagaagtttcttatggagatgactaaaaattgcatttatgctttaaattattcactggaatgacagctcattgacatgaaactttctctttggacatccaacttggtattattagatgaatcaagtatcaccgagatagccttaggattaatacctttttattttattttataaaattttaaaatgatgaaaaactaagaaatatttattaatgaacttttgctattagaaactgagaaatattattaatgaaacaaaaataagggtgttaggaaggatgagaatccttcacaaggaaaaagaccgagctaaataagaccccctcaatgtagtctcaataagaccaagcacatgtaactagaattttttgggaatgaatgacaatggtcatgctctatttttgctttcgtagtaccttgtaggtaatctgatcttgattaactcttacaaagtcatggcaatatcatgagtctcacatattatgaaactattattctcttccttgcaagctccatgtgtcatctcttcttgaatatgaagttactaggcagctaattttgtgggttaaagtattgcaatttaacaagaaaataattccattctatgagtagtttgctttgctttttgctgctcttatatgaatgctttttagctagtctatttctttatccctttaataggattaaacttaatttcttttattttcttttatgttatatctcttgtattgttacaaaaaacatataatatcttttatatttaactttacacctgatttgatattctattgtttttctcatttctttttatatttgtaggaaactaact

SEQ ID NO: 12537 - DNA, 15787 bp, Vitis vinifera
  Intron number 4 from transcript GSVIVT01037056001 (locus G SVIVG01037056001) derived from phytozome v7.0 (chr-ID chr3 ; pos 8283967 to 8299753 reverse strand)
ataggtattcttaattatcaacactcttgagttcaactttcttggatatatacctatgtttgtctaacttagataattaatgcctatttagaattcataactattgatgatgattgttaaagccattcgttgtcaaagaaaatttaatatgaaattggcaagcatttgtttcatcattgttggaggactttatggaaaatgtttattgcttaacttttatggattgagacaagtaaataaagtttaatttattttccttgaaaaatcaattacttttagtagatattataatttgttggtggatatgtcctaaccatccttttccatcattgccattaagattttcttcattctaatgttttgcaattatagtaaacattgtaatgagagaaattattggggacaaattcagcttgtattctctatgatgcaattattggggacatgttttaccttaaaactaatagctcgttgtgtgagtctcatgttgggttcactatgcgaaatgagagaaatcgtatcacaatgtgggattcaattttaaacttttaaccaagcttcaaccttttatgagcacaataatttttgaaactaggccacattattccatggggccatggtttagtgcttgtggttgggcaagacaatggaggattcatgatgaaaataatttcaaatgataaaactcggtcaagtttcaacttgctgatgaagtgagatggaggagagagagagagagggttagagagagagagagagagcgacggaggagtgcgaggcttcccgagagcaaccgagaatgcagagggcaaggtccttgcgaggcatgggaaaagcttcaagaagggtggcttcggagtggagtcgaagtcgtttgaggttgaggtggaggagaagaaaggcagattgcaagctacgattgtggagtggaaaaaagggatttccttgtggattaggctaggatcggcgagtcttgggctattcctcgattgtctggttctttgtattaaggatgtgagaatggtaaaatgggtaagaaagtggaaggaaaacgggagggcttattctctggtgcgagatcaaaacaaaggggggtgcttcctccggttagatgttgtggatctggagaacaaaaggtttagcatattcatccccaaagaaagaggagcaaagggtggttgggtttcaatggtggagacgctacggcgcttgggatgtgcttatggaggaatgataagccaaaaagaagaagagttacgtttgaagccaagtatggtgaaaacctttacgaaagtggtcaaaatgccaaggggtaaagatagggcaacaattagggtggaggtcacaaagaaggagagctatgccggaacttaaacaaactggctcattgtgtggttgggatatggaaccctagcgcagcaaagggggatgacctacgaagttgggggacccatttggcgaaaatctggagtctaaagggcaacctagggttagcaaaactggagagaggcaaggtattgatggaatttgagctcttgatagaagcagagcaagccattaaacttggaagcatctcggtttgggggatctttcttcgcctggagaaatggaggcttgagacgggatgtctgagggagggggagaacatgagtgaagcctaggtgctggttgtaggcttacccgtctccttatgggagcgggacattctgagaaggataggggaggagtgtgggggttttcttgcagtcgactcccaaacggagaagatggaggaattgcagtgggcctggttattggtgaagcgtaacggcgatgaacttcccaatgtggtggaggtttgggttgaagagctgtgctactcgctaactctctggtgggaggtcaagccagtaatgagagcggcgacagcaggaaagagagggaagaatgttgcaacaggaggggaggttgggggtgaggcttgtacacgtgcgggcgagcgcgtgctggaggcgaaggacggttcgaggctcgaggccctactgctgcctgccgatgggacgcggggccaatcaagcgggttggggcaagttatggaccctattcggagctttgatgggtcgttgggtgggtcacaaggatcgggcgggcttaccttgctgggcctaacagagcccccttggagctctaaggaatcagagcccattgggcttgatcctttctcggacctcccttgcaaaaatgggccgtctctttttgggctgtcgtctaggaagatttctaggcgggccaagactttggagcctccagtgatgcctaggctggacaaccgaggcccacctatgcccttagctgtggttagagcccagttgggggaggcccgtccctccatggtaattagccaaagcctaatggggggtccagacgctggtatttctcctttttgggtgaaggatggcttgcggaggccttctgaggaggagattcagtccgagggaagatctaagaccgaccgtgccttgttggaggaagatgcaaggtatgaaaacgtccctatctctattggaccggtggtttctggttctcttttttcttcctctcctatttatggtcggactccattgggggagtattacgacttttatggggctggcttggacttaacccagggggttacacctcgattgtgtaacgtcactaggtctacagagcaggaaatagttaagcgctgggagttgatagaggttaatactgacagtattgaagagagcagagaggaattgtgcctagctcggtctatgcgacaaggaggtagaggatgggaggaagcaagttgggaggaaagtgatctggctaggttcaacaagtttttgggattttcgacagagggagtggagaaagatattttggagtttctggtcaaaattagaaagaggagggaaaaagttcatagcaaaactcttctggagaaatcgagattcgaaagggaattgaaaaggcttgaatgttccatcaattatgagggggggaagaagaagaagtgtgctgtgcaaggaagagggtgctagattatggaagtccaatgaagataaggctgttgagctggaatgtgcgtggaactaatgatagctctaaaagaaaggtgattaaggccatgatcagaagccaaaaagtggacttgttttgtatctaggagacgaaaattcaatcaatgtcagagggtttggtaaggagtttgggctctgggaggtttcttgattggggtgccatgggtgctcagggagctacgggagggattttgatatgttgggataaaaggaccctggaggtacttgagatggagatggggcagttctcgatttcttgtatgcttaggaatgtagaagatgggaatgcttggatcttcacaggagtgtacatgccgttttctaaagaagaaagggagattctgtgggaagagctcggggcaatcaggggcatctgggatgacccctggtgtttagggggcgacttcaatattaccctctcccaaagggaaaggagcaatcagggaagtctgaccggtgcaatgagaagatttgttcaggttgttgatgagctagagctcctggatcttcctatacaagggggtgtgttttcatggagcaggggtaggaacaatcaatcttgggctagactggatcgattcctagtgacccagaactggcttgatcactttagtggggttgtccagagtaggttacccagacccacttctgatcactttcccatcttgctgaaggggggtgggttaagacggggcctttccccgttcaggtttgaaaacatgtggctcaaagttgatgggtttaaggatcttcttcaggattggtggcaggggtcgggggggagagggagggccagttttagattggctactaagatgaaggtcatgaaggaaaaaatcaaaggatggaacagggatgtgtttggaaggctggaagttaataaaaactcagcccttcaacaagtcgcattctgggatggggtggagagtgaaaggagtttgatagaaggtgaaacggagctgaaaagaaaagctaaggaaacctttaaaaagtgggtgttattggaagaaactcattggagacaagtgtcaagggagctgtggcttaaggaaggggacaagaacacaagtttctttcaccggatggccaatgcccaccgaagaaataactctttggataaaattaagatcaatggggggtggttggctgagaagcaagaggtgagagaggggattgtgaatgcttttcagcagttgctttcagaggagctaggctggagagctgatattgaggggctacaccttcaaagtctaaaccgtaatgaagctgaatcttggagctgcccttcactgaggaagaaatccattctgctctgatggaaatgaatggagataaggctccaagcccggatgggatcacagtggccttttggcaatcttgctgggacttcatgaaggaggagattgtggacctgtttaaggagttttttgataagaaatcttttgctaagagtctcaatactaccttcctagtcctcattccaaagaaaggtggggctgaggaccttggggacttcaggcccatcaatcttctagggggattgtataagcttttggccaaagttctggccaataggctgaaaaaggttttagataaggtggtttctgcggatcaaaatgcttttgtgaggggaagatagattttggatgccttgctcatagctaatgaggtgattgatttttggcataaatgtaaagagaaagggttgatttgtaaactggatattgaaaaagcatatgatagcattaattggaatttcctcatgaaggtcttgcacaagatgggctttggatctcgttggatggagtggatttggtggtgcatttcaactgcaaaattttatgttctggttaatggggtgctagcaggttacttctccaattccagggggctgcgtcaaggagatcccctttcttcttacctttttgtgttgggcatggaagtgctaagcgtacttataagaagggctgttgatgggggattcatttcaggctgtagtctttgagggagggggggaatggagatgaatgtgtctcatttgctctttgtttatgacacaattattttctgcgacgtaaggaaagaacacctaacctctctaagttggattttggcgtggtttgaggcagcctctggtctaagaataaacctagttcaaagcgaagtaattccggttggggaggttgaagacattgacgaattggcagtggagttagggtgtagagtggggtctcttcctactgtctatttagggctgccccttggagccaaccacaaggcctcgtctatgtgggatggggtggaagaaagaatgagaagaaggttagccctttgaaaaagacaatatttgtcaaagggtgggagaactaccctcattaaaagtactttggctagcttactgatttaccaattgtgtctctttcgaatgcccaagctagtagcaaaaaggctcgaaaaattacaaagggactttctttggggaaggggaagcttggaaaggaaaatccatttaatcaattaggaggtggtgtgcactcaaaaggagaaggggggtctaggtattttcaagattgatctcttgaacaaggccttgttgggcaaatggatttggagatttgcctttgaaaaagaaatcctttggaagaaggtgatcggggtgaagtatggccatgagggttttggttggcgtactaatgaagctcgcggaacgtttggagtgggggtttggaaggagattttgaaggaggcgaactggtgctgggataacatagggttcaaggtgggagaggggatcaaggtcaatttctggactgatcagtggtgtggtaatgaggcgctgtcccaaaattttccctagctatttgccttggtggtccataggaacgccacggttaatgaagtgtgggatttaagccttggtcaaggaggttggaacattagattctctagagattctaatgattgggagctggatgctataggagagttgtttcatatgctgagggacttgaggatttcttcagaagaggactcagtgatatggaaaggaaggggtcatggtttttttcggattagggatgcttataagctgctggcagctcctagtgccatcaccttcccgaaaaagagcatttgggtggataaggttccaaccaaagttgctttttttgcttaggaggccacgtgggagaagatcctaactttggataggctccaaagacggggctgacacctttctaatcgttgctttttgtgtggttgtgaagaggaaaatgtaaatcatattcttttacactgtatagtggtcagggtcctctgggagatcgtccttgccttgtttggggctcattgggtgttcccagagacggtcaaagaggtgttacttagttggagggacccctttgtggggaaaaagaggaaaaagatttggaactccatcttgttgtgtattttttggacggtatggaaggaaagaaatagattagcttttagggggggctctttagctattcagaagttaaaaaattcttttgtatgtaatttgtggagttgggctaaggtgtatatgggagaggagtcctcttcgcttttaggatttttggaatggcttgccgtttcttaagggctggtgaggtttattgttcatgtgttttttgtttttaggctactatgctttgtggcttttcgccctttaatatatttgtgctcatttataaaaaaaaaaaaatttcaaatgataattttgtatgcttgggtcgtgtaaattttttgtttggtgttctttaatccaattatttttcctttgcttataaaagatttgggtttttcatttttctttgggtagaatattgtgtttgtgtgaattttatgtcctaaaatgttagtgaggatgatgaactaagggtttgatggttagaaaaaccattcttagaggaggaaattaaagaggttaaagtccctgacaacaagaagttttctttagctttttatcaagtgcattggcttaccttgagagaagatttatgtaaatactttctaaaattagagcataacaacgtaattaataaaatcacaaagtccaccttaagtactcttcttcctaagagagtgcctacccttaggattcaagattttaaaccattggcttattgactagtctatataagagcttaacaaaagtcctctctaagcaattacaagaggtactttgtgaaactatctgccccttctaaaggaccctttttttaggaaatttagttctttacattgttttggttgctaatacatcatggatgatagttgtgattaggggaagagaggtttactttcaaagtggacttgagaaaagcctataaccatgttgattagggtttttgaccacctcttcataggaaatgtttgagttgttagttagtttgattgtagttattaatgatagaacaagggttaggcgaaggcatttacaagccctaggcaaaggggattctctatcccttaaataatagtcatggttcataattatagtctcggtcaccaatttcagaggtactaaggtggatcgattgcaacatcttagattagtattagacaatacaagcaatatgtttgtgttgagaaaatctttaagagacttgatctttgaataagttttttttagagggaagaataactcttattttgcatgttacatttccatttccaaaatccctatttaggcctttaggatggagaaaatttcaaggagatttcttatggttaagtattagaaaaggcaagaaagagggtaattgttggattgaaaaagattcaaagggattttcttggtaggtgggtgaggggttgttgaaacaaaagccacttttggtgatttggtttgttgtttgcttggagaaacaaaaaaggggctagggcataaaaattttgtctataattaataagactcttttgggaaaatggtcttggagatttgtgagtgaaaggaatcctctttggaaatgggtaattgtagcctgtagtccaacacaggcaagaaaaaggatggtggtgcattaaagaagtgagaaaagagtatggagtgggggtctggaaggcaatcaaagatagttgcgagtttttcaaggataaaacgggttttaaggttggttctaggaacaaggtgaagttttgaaaggacaagtggtgtggggacacacctttgagggaattgtttttgaagctctattcaatagtctcttcaaaaaaatgcttgggtgattgaccactgagatagtggtagctagagtcctaggtttatgaggtagttgtatgactaggatttaaaagaggtaaaggtcttttctggtaggttgtttgaacacttaattagtttgagcattgaagatattatggtgtggttggctacaaagaacggtattttttcagttaagtctttctattcctctttagcaaataggaaaacagagtacaactctatgacaatttggaatttttgggtggcattgagaatcaacttgtttgcttgggaatcaacatggactaggattttgactctagactagctcaaaaggaggagttggtggattcctaatagatgttacatgtgcaaagtagaagaagaaacaagcgaccattttctccttcattgttcaaaagcacacattttgtgacaattgatttatgctttttttggtgtacagtgagtgatggactctctctggttagaggggttatcttgagctattacaagtcctttgttggaaaaaaagagaaaaaaggcttggaaggttgttccgttatacttgttttagaccatataaagagagagaaatgggagagcttttgataatcgtgaaagcatggaccaaataattaaaaattctttcttgtatctttctcgggattggattagattgtatattggggatggttctttgtcgttgttagactttgtggattggttctatttgtagggcatggttgttagtttttgtgtcttcatgcctttttttgttcttttggttgctttgtatacatcatttatactttttttttaatacaatctttacttacctatcaaaaaaaagaaaaaaaaaatagagggggggaggggaggcaagaaagatcacttgatttggaatcatgtttgcaagcttaaacatgagtaggggataggtcttctaaaagtggctataaggaataaagctctcatagatgagtaactttgatggacctcacttcacttgtcaagagtaaagctcttgtaagcaagggtggaagtgttgggatatgtcgatgatattttgctaataaatcgggtgttggtccaccttgatgcaacaggtggcacaaaaatgttgatcctccaaaatttgggattttctccattttttcactgatttattggtcatatagcgctattttgcgattattgccaattttttagtgctagcacctttcctgccatgtcattgtgtcatatccttttccattcaatgctaaaaatctacaattaattgaagaagcagactcaactagcctaaatcttcttgcccaaccagcccaattctttttgttgtgacaagttgaggggcaccgtctctataaatagagccttgttttctcttaaagtttcaatgtgggattgattgcgcttacacttaaaaaaaaaacacttaatgttgacattaaaggaaggattgaacttgggtccttcgatttaggatggatggcttgtgccatttagccaaatctttttttttttcttcttattatatgtgcacatggaattatatatattgtaaatatcttttataaattataaatatcttttatacattatattataaattaattaaactaaagttattataaataagttaattttaattatcttattatgtattttatatactaattaactacaaaataaatataaatttataaataaaattatcaatatttttaaataaaaaatacttatctatatatcatcgtttcttttatatcctttaatatattcaaactaaacatattatcattttaatattaatgtgttttcaaatttgtacattattgcctaatgttacaaattcattatatatatttcttcaataaaataatgtcaacttatgtattattgtttcttctatcatttttgagttttcccaatgtttatgagttttaataaatttttcttccattgatattttttatcaaaattttcatcgatatttcttgatatatcccgatatatttgcaaaatccaactattgatatattcttgataaccaatatttttatccttgtttgtaagtgatttgatggttttgactacttttgacattgtgctattaaacatttataggttgcattatagtggataggtgctaacctttgtcattaggtggtcataccttcctcttcgaaaaattatttcttgggactattaggaatttggttgttttgtttaatacgtcattgttgaagggtcaaacacctagttgtgaggatctttgttgagggggccatgcctttttctatgatgctcatctctatcttctctctccaattagagatcttccatatctccttttctcatctaagtctttctattatgcttatgccttctctgagatcattagtccatcctcatctctatcttcatctctttattttattttattttttttggatgagaggtgtcggatcctagccccgtgggcttgttctcctcaaatgtcccttttgggataaagaagtagaagtgagagccaaagccataattttcaaaaagcactattgttattgtaagatttcatcaaatatgaaataactttctacttaagccaaaatagagcttctagaaaaataacattttattggcttccatgttaagatctttttcttaggcataagctcttttaggaaatatagccaaataggttcaaaaactcttgttaagcttaaaagagtgctttgggcttcttctaagtcaatccaaacaaggccttattctttctattgtgccttttccaagagtgtttgtccataaatctttctgtagtcgaattttatttgaaaaattttccttttggagtttttgcatggtaaatggctaataaaaagggtaataccgaatactttgtataaattaagaaacctaataaagtcactaaccctgagtgttggttgttgtctaggtaactctggaaagatgaggattaatgtgtttttgaagatatagagctaatgaggttagagttccatttaagctagcaaattttgatttacccattggccaagatcccaacattactagacagtctaattaatgcatcctccttgtgttagtaacctcaaggtgcatgggaattaagttgttattctcttttggatgtctcatgaaagagagacttgaacttttgatgcttggctttgtgtggttattaattttctttttttcttttttttttatataggtaatttttcttccttttttatatgattatatggaatccaatcttcaacctccctaatcccgaaaccaaccccttgttactaaactaggtgtcaagggctataaaattattgaccttccaagaggtattcatttatttcgaagtcttgaactttggatgctttgatatgtaagatttgaccttctgagagggtgtactttgtttggaagcttaggttagccaacttggagggaaatggagttgttttttgtcctagctttgcttgaaggtttgatcaaggcatccctttcctggttagtaatctccaagtgaagagggactaagtagtattttcttttgggtgccttaagaaggagagggacaaactttgaatgcttttatttgtaagatcactaaccgtctaagagggtactcctttatttgaaagccttgaacattggatgcttggttttataagattattgaccttctaagaggatgttctctttttcttagaagccttgaactttggatgcttggttctgtaagattattgatcttctaagagggcgttcctttgtttggaagccaaagttggaatttgttgggatttccctttgttttcttttgttggataaattcttaatcaagcatagggtctgttagcccaagggttctcctaatcaggttttgatgataacaaatcatagttaagttactaattggtttgaattgtaaagaatcttaggtattaatttggaaattcatcaaatgacctaatggatacaagatcaagacgtttggaagacctttaatcataggaaacaaatgtaagatgaatgcatgggtgcacttagggtttacatatcatttcatgcatctttaaaaaacttggtttattctttaaagttttatttccatcaaaacccgagttttatcaaatgtatcttaggcaaaatgtttcaaaattgacatattaatttacctaaagaccttgcctaagtgttagaaaagaaaaaaacagaaaaagataggttttcggggccaaattgttgaaccggtctaggcattgggccaaccggctcaaccggccagggtaccggtcgactggttccctttgcccggtcaaggatcgatcgaggagtgcaaaaacactctctctcttccagtagcctcaccttcccgatcgaggtatcctccttctcggtcaacttccggttgaggttcggtcgaagtcccatcgaagcaatgctaacttgccaaagcattaaatgctccaacggttggtgaaccggtagacccccagctcgaccggttaagactgctttttgtttttcttggctcccgaggttagaaacctataaatagagagctccacttcatttatgagatatagaacacctacatttatttgtctacccacttattcttgccttaaaagctctcatttctttcttggtgctttaaatcttcacttgcatatcctttagtgtacctttgtgattcatcctagctttgatttgtatttgaactatcattgagttaggttgagggattcattcttgtaaattgagtgttaaagccttcaagtgagttgaatcttgaagagattgtgtaagagtccattggagtcggaatcctagtgtaaaggagattagaagcttggttgaaccttcaagttagtagaaccctcactcagttaggagcttgaggagagtggacgtaggcaaggaagtgtcgaaccactataaaatctgagtttgatttctctaactctatctctttatatttgcttcttttgtgcttgaatttgtcgtgttcaaaaagaattttcaaaacccaattcacccccccctcttgggtgtttttctcatttaagtttagcctttattttctcagggtctttagtgtaaaccccaaatacatgcattcagccacaaactgcacaaatcgagtaaatagggttgccaatagaacgacgaagctctatcccattcttgcctcgattatataactgattcttcatccttgttctaaacttgggacggggtagatcgatggattccattcctatgtgcacaaagaaagtaaaactctacccctacccaggcttgccttgttcttgaaaaagataacaacataaatcttgcaactctcatcccttttccctagcttatcaacaaaataggtaaaaaaacacacactattaaacataaataactaacaactctctctctctctcatgggcaaacaaaaaatatatcaatagtgccaataaaagaaagacgcaccaaagtacatgggacttgtacaagggcgccaaagagcgaacaaatttctttccttttctccatctttctgaacaaccaaacaggccacaaacacaccaaaaaaagggtaaaaaaggaaaaaaaatcatacaattttctttctttttcctagctttctcaaccaaataaggcaacacacaataaaaacaacataccactagaattggatcagaacattgttataaatagtgtctactggccacgtgctataatccattggaaacaaccaccaaaaaatctcaaacaaacctcaccaaacaaaacaatatatttacttgatcagatgacttgatgatttcaagatgagaatcattctttgtattgatgttgtggaactcaatgctgttgtactaagaacacatcttctccaagggatcgttggttttattagaggagacatcaatgaagatggcaaatggtgagtctaggccatgagtagttcatagaggtgggattcaatcaagctgctgccgatcaagaagatggtgaaaggagacatctctttgccatctaaattgagcctcaccattgaagagagaatggagaaatggtggataaaaataaatatttatttggggtgaagtaggtacaagacctaaccatagcccaaacatgaatcatgttttaaaattttttccaaatttgttctgttcccaattacaatctctctatacttgccccattgccatccctacaatgtgctgcttttcctacgaaggggttttggattatttttgcactcttggaagtcaattctttcatttgagaggcaacttggaagaaaattgttacattgcttagctaaagggacaggttggccattaacgagttggtgtttcttgtgcagtcagaaaaaggtatcaactaaccatattctcctttgtgtgtatcttactctattaggaagttcttgttaggttggcatggaagctttgtgaagaagaggaagaagaggttttggaggatgacctctctttgactattttgctttatttgggtaggtgtagaagatgttttgaggaagtggagagctcagcaatgacactgaatttttattttttatttttatttaaattactgtgctctcttggtctaatgtggtattagtttgtaaggttggcaattttcttgaccttctcgactattttggatgaatgtgttcctggtatcttaggcactctttgtatactttctatgtgcatagggtgtggcttgttttgttagacactttttcaataaaattgttttgcccgttaaaaaaaatcaccaattaaatgacatggaggctgtacaaagaccccagaattggtgaaacataatttgataagaaacatggttaaataaaatggtacaaaagaaacaagatatgagtcaagttgtggaataagccatcggtcttattagccaatctgtgaaatggcaacaaaagcacaactttaatcaagcaactttaatcatgtcttaggtttgcatttaaggaataaaattgtcttcattgtgcatgtggtctcaaatatatgttagtatctgcatcaacatctccaatatctacttgtgtgaatatatgttttcccaagttttgtcataacctctattatagttgatatctatattttcttccttggttgtttaatttcccaatttttctccataattcttatgatgtgaagagtcccaaataagcattctgtcaaatatatgtttgaatagaaactgctcaatgtactattttactcataaagtttggaattagattatcgtctttctgaaagtggaattaatgtgaggaagttgatagaaacttgatattgcttaatcataaaaaatcgtatctattggagaagaatattgaatagcttgcttataatgtatttatggtttttgacatcataatgtgcaagggtagagctcttca

SEQ ID NO: 12538 - DNA, 2226 bp, Vitis vinifera
  Intron number 5 from transcript GSVIVT01013859001 (locus G SVIVG01013859001) derived from phytozome v7.0 (chr-ID chr1 6; pos 5423292 to 5425517 reverse strand)
cagttgaggtattacctatactctagtctgtaatcactattcattatatgtctatctattctaatttacagttgtatggtgtagatagtttaaattttgctgatacaagaagatataggtgtcttattagaaaacttatatatttagttgctattggtgttgtttgtcaatccatggagagtcctaagcaagtgcactgggatgttgtttgctgtattcttagatatctgaaatgaacagttggaatgaatattttgtataagaaatccctaaacttgacattgtctctaatttagatgtttattaggctggtttttgatgtgatagacgatctgtgagtgactattacacttttatgggagcttatttggtaatctggaaacataagaaacaaaattctagtgctaaggtaaagtgttgcgctattatttatgctacttgtgagctcatgtgaatacaaaatcttttgaaaggactaggtgttgaaactaagaagcttacagttatgttttgtgataatcaagctactacatgttacaagtaattgtatgcttcaccagagcatcaagcatctcaaggggaattgttatttcattcaggaggtagtgatgcgataatgctaaaggtatcaaagaaccctttggtaatacatttgcatagtcctgaggtagtacatccattataaaaaaaatagtcctgaggtaataccagctatcctggaacattgtctatcatcatcatgtccttgaagattcctagcatttctctagtttgataactcacaatgtagcaaggatgctatatgtgatgcttttcctccatgactccctcccaaaccctaggaaagatgattacatatttgtaatgcctctagggacaatccatgcaattccaaacgagaacaacctctaccataatcccagtgcaaatgggcaactgaggaagcaaaggtcaatcaatttcccactcctttttctatgctgttcaccttgtattctttgtcttgatgcacgatgtactgtcccagaatataagtaaatgagtaaaaagctggagaataaacccattctccaatccagcctttttttatgttttcttttttttcattttccttccattcaattcaatcacaagtcattttgtgaaaatctgaacacaagttcaaatctggacttgctcaactttggggaactagacaagtgctaaagatttcttgagcagtcaaagccttaggctggcaggagggagttaaaatctttctgaaaattccataattaaaaaaatcattaaatcaataagaaaatatatggagcactaatgggagacggggcttccaagcaacatgacatgattttttttcttagaagaagcttcttagttctttctttttcagaattgcagtagattgtaattatttttaacatgattagtgcgcatgtaattctaaaagaatgacttagttaaccatcttccagtccattctctgatcgcttccaagaaggaacagggggaagttgtggaataaagtacctctttgttgacatcccttcaagtgtcatggaagttgtgttttcacttcgatgtggcttccaatcatccttgacactctgatggggaaggaaacaatgttgttgacaggtttaattggttaaaacttgaaatgaaggacttttacttgtcctttttcttctggaaaccttattgagcaaaagggttttgaaaatgcatgccaccggacaaaaattaatcttatatcccaatttttatttaattcactgtagcatatccttcctcaatgccataatatcaaaacttattttgttaagaaacctaaacagaatgcagaattttcccctggggtgtgggctggtgtttcatgttagtattttttgcaagaacataaaccaaagctctgaaataggggtttcacacactggcttattattctctttcactgtggtagttaacatcattttctaggcctaattatacattcaaaggggtgtttcaataattatgcaagtattgatagagatatgcaagtggaaatcacattggtttaatgtattctggaatttccatactagtgaagggctgtatgtgacttttctagggggaaaatcattgatatcaaatatactgctgtttgtagcttccagtagttaatagtttgtcagttgccaaaatgcagtcaggtagatcctatagtggcatctttctctggag

SEQ ID NO: 12539 - DNA, 3891 bp, Vitis vinifera
  Intron number 10 from transcript GSVIVT01011959001 (locus GSVIVG01011959001) derived from phytozome v7.0 (chr-ID chr 1; pos 2626342 to 2630232)
gaacaggctcgactttattacgctggggcatctgggttagtatttctataccatcatttagtgtctttccagatgacatcttctttcagttctactttaggagtgcaaatttgatagcctgattattacttttttgaggttcttaaggacctaagttagttagtgtttattctttaccataatgcccttttacaagtggtagacagtaatgcttattataaaataacttgtttaacaataagttggagttggattgggtatcttttacacttttttgtggtgaaggaaattttagcaaatttgtatccccaagtggcaacaattgtagttccaccatcttgaaatattttcattagcaattatgatcctttattaatgcctctgcaacatacccatttgttattattagatagtcaaatatcaagaagcaatggaagttttaaccataagactataactacttgaaggcattatgtgtttttcttcactctctaatatgtagtgcaagcagtattataatgatgaggatgattgtgcttttcttctctttcttctactattattcttctgtcatctttcattgcctttccgattttcattagctctaacaaacactgagaggttgctctccattatatttttctggtgattttgcttgttccaactttctttttgttttctttgttgttcctcctttgttaaacagctgcttaggttttgacagaatgggcattttggttctggtaccgatcgatgtaatgctcgtgatagatgagtaatgacaaaacatcacattctctaaaactttttcattttcttaaggggaaaaaaaaaatacaatgactaggtatgtatggtcttgttaacctaaagaatactaagaatgatgggtgaaatgaattctcaaaagaaattacattaaaaaaacattaattctatcaatgaatgaaaaaaatatggtcttcacctaagccatattgaaaagaatagggaaagttatagttaacttaattacctaaggataaaatataaaaatagataaaaacctaattggataagaaacctaaagcaatataacaattaaaataataagaattattatttttttttaaaaaaaaaatcttcatccgttagagcaccatgaatccctaggttgcaaataattggccttcaaatttgattggataataaaataaaatgcttcattaatatattgtaagtcctttcctccacggcatgtgttttaaaattgtctcaactttcccatcaaacatgagatcgtgttgtatttgatgaagaactgtatattttccatgctttgttgtaatattcattcaattagtccagcatgacataacaaaataatctattattaattttctaatgacttataaagggagtgaattggagcaagttgagccaaaaatgatcatcatattggtgaccaatagagtagtcagagtataatatgtttttccttagtagaaaatcacttggtgcaaattttcttccatggtgaaggactattcataaaaaaatatgcggcttactcatatcaatcaaacattgtacaatgattggctcagatgtgatcagtcatcatcatcgatttatggtggagaatcctaatctatgaaactattagaattatagttgccttttgaaatcttcatagcctctgttggagaattggtgcagaaattgtcagattatatagcctgtatgggctgggatttaatttgaatttgtttctttttttgtacaattggcttgatttatttcctgtaagtagggattaagttagtagctgatttagtttctgtaattagtggttgatttagtggagtaattccaggcctagaatagtaatttccttttcttttttcgattgtaaacgttataaataggctataaatatattcaaagaataaacaagtattattcagaaatcattctctgtactcgtggtatcagagtcttaatcttaataattttttccccttccatctatcgacttcaattgtcaacatgagtccaaattttttccagctttaattgtaggaattgttcacatatccttttgaccttcattgtcagacttgatacaaggggttggttcaaaacccatttttcagtatctattttttcctggcatgtgtcctcactattatagattacactaatatcatcttatctccaatcagcccaagatgacagaaaaatctgatgcctcttccactactacacaaataaccataaacactcaaaaacccaattcaagtattttattggaaggcaatttggtaacttggaggagtaagaaagagtccgtggttgccaagtcaagtgtcgaagtagaattttgaaccttggctcatggactatgtgtgcttctctggataaaaattattcatagtgatcttagagtaagttggaaaggtcatataaagctttactgtgttggctattagtatagctcacaatatagttcactatgattaaactcagtatgttaaaattgatcatcatttcatcaaggagaaattgggtactgggttggtatgcacccccgatatatcccttagaaagacagttgaccaacatattgaccaagggacttgcagttcaaccatttcaatctattgcaagaagttggcaatgaagaacgtttactcaccagcttgagggaagagaattggtgccataatttccagattatacaacctatataaactgagatttaatttgaatttcttttctctttttttttttttttctgtatagttgacttgatttgtttcctgtacttagggcttgacttagtagctgatttatttttttataattagtggttgatttagtggaataattctaggcctagaatagagtaatttccttttcttttttcgtctgtaaacattataaatatgctgtaaatatattcaaagaatatacaagtattatttagaaatcattctctgttttcagcctccaataactcatgaccttcaaggtttgatctttcataccacttgacgcagcatatattttggttctaatatcacttttgcattcacattagatggctgttgattacaaaaggcaacatgttctagaagactaattttcttcagattgagtaacagttgaataacaaaaaaaaaaaaaaaagaaaaaagaagaagaagacgaagtaacatcttgtagatcttgttgatttccttaaagaaagtaccaggaaccagatatctttagtcttgttcatgacgaagaaaaataggtaaaaagattctcaaagaaaaaaatctaagaagactaattttattgaagaataaaaagtaatagtctcccccaaaatcataactgagaaaatgtgttcatagacctaataaccctacaaagaataggaaaagaattgtagtcttcagtagcttaattacctaaaaacaattaagaaatcttagtgactagcaaacttaaagctgtaaagcacctaataaataaatctaaaataataagaactgtttttctgaaaaaaaaataaaaaattatgagccaggtctgcatcaggttttgatgaactaagagatgaagagtctctccaagcataactgaaaacagtttctggaactgtatggaaatgacaggtgagaatggattcttgagcttctcccctttctgagtcctcttgtatgttttattttgctgttaagatcattcaatacatctggatgtataatgtatggtgcatgttattttgctgtatactgcatgatatatatgtaggaggaaacaatagaggtgttcaaagaccaccctttctccactgatatttgtttgggttgcaaatattcaggtacaacactttctcacctgatactgtgaagaaat

SEQ ID NO: 12540 - DNA, 917 bp, Vitis vinifera
  Intron number 6 from transcript GSVIVT01001399001 (locus G SVIVG01001399001) derived from phytozome v7.0 (chr-ID chr1 3; pos 24255964 to 24256880 reverse strand)
tagttgaagttcctgtgccccctcgcccctttggagttttcatgagcttatcttgaactgtctctcttccttctagcagttctatatgaaattgaattttccttttttttttggttgtatgaaccttccacacttttgacccatatatatatatatataaactcaaatccaattctaacccattcaaacctcatgcatgtcaatccgaacaccatattagacccgggttacacaagcaattagacaagtcaaatctagtctaatataacacttctaatataaaaaataaaaaaaaataaaaaaatagagaaaaattatacatttaagaaaatttagtatgcattttttaacattaaaaaatattttcagaaaaaacgcatcaagtaaaaccacttcaattagagaataaggaaaaaaaatcaatttcattttatattcatgtgtttggattgttttggagaataaaataataagaataaaaaaaaaatccgttgttatgatcatgtgaaaaatatatatttacacatatattgtagatttaatcttatgttataggaatacaaataaaattataaaaaatattccgaaattaaagatatctatataagtaaatttttttttataattattttccttttaatgaaaaaaaaattcaatacaaggaatttaaaatactgtcaattttcattggtttaaaattttattaaatacttcttttatttttttattttttttattttttcacctcccttggttcaaattttttagttagtaggggtaattgtaagtgaaattaatttttttttttaaatctttttttcaactggtgtaaatggcaggggtaagacaactccttctgtttggctgtttgcttcctctttggaagtttaatgcccgactggaaaataagaatccag

SEQ ID NO: 12541 - DNA, 12624 bp, Vitis vinifera
  Intron number 2 from transcript GSVIVT01037993001 (locus G SVIVG01037993001) derived from phytozome v7.0 (chr-ID chr1 0; pos 12189242 to 12201865 reverse strand)
tacgacagtggtactacctgccacattactcagctgtaagtaaataattttttttttctttcaatttttgaaaattattattattattattattattattattattttaaattctacttcccattattatcttttacatcatctgaagagaagaataggaaatgctagaagggggtagtttgaccattttctctgctcaagtattataaataataatcactttcatataatgtacaaaaatatttttagagatttatattgaaaaaaaataagaattttaaaaactaagatatcaaaaagtttttattacttataattttaaatttttataattaaaatttgaatttttttataatttttataattaaaatttgaaaaaaaaatgtttttgatattttgttttaatttctattttaaatattcgatatcaagattaaaagaaatttacatattatatgcttctttaccgttagtcacctcttttctctttcttgaattaatgtaggcatagaaaaagcatgagcaatgcaaaaaaattcgaatatggtgtttttagatttgttttttgtggaatttaggagaacatgatttttatttttatttttatttttttttagtttgatgcatttttcattttcttaggagtttgatgataggcccaacgtaaatcttgtttaaaacaggtaattgatccaaaaactcattgataactaaaactaaattatatcttttaccttagggggatttatgtaaacatgcactaattaaaaaatatggatgacacgagaacccaaaaaagttattttttatggggagtgtattttggaaaaaataattctcgtttcatgcactagaacaatgtctaccttacattactcaaaaatgtccttatatgtgtacatggattgccatccataccagcccaactcacatgaagatagtacatcatcattcaatcaagaaatatactttaagccaaaatagtgttactttaagataaaaataatattactttaagaccaaaacacatgtaaaggcattttcggataacgtgatgtagatactattccagtgcatgaaatgagaattattttccttaaaatgcattcccatgaaaatgacttttttggattctcttttcatccatattttgtaaacaatacatgtatacataattcccccttaccttatcaatcttcaaagctatgcaattagtcatatagagattgacattcaataagtttaaaataaggccatggataggttgaaaaatcccataacatggcaacaattgaaggtagccacaaagtccttaatggaacatcacatccacgaacccttaatggtaaaagtttgcacaaaattgacatccttaaatttataccctcataccctcatgggttgatttctacatttggaaaatgtcttttagctagtagaagttttttaagtacatcaattgcttgatcattaatcgatggaatatgattatgttagaataccttggaaaaatctagtccaagcccaagatctcaaacaaatgcatgcatttaagatcctcggtgtagcagaaaactagatatgcctttaaaacttttctagggtaaagataacaagaaatcattttgtagatttggatgttttcaaatctttttctagtcgatggagaacatgatctcaaagacctagagatcttcttcctattaactttttcttgaatcttagtggtgaagaagggtggacttctctctagagggatgggggctaaggttttttttttctctctctttggaagacaatgatgaatgtgagcacctaaccttaaaccctaagagggtttatataggctccctatgagtttaaatgaccttaacccatcttaagcttaggtcacttaatatgacccactgggtttatttattagctttattgaactctaattaataattaacctaatttagaaagataattcataagcttttgtgtaaccttatttttttaccaaaacacccttatgcacacctatgaataaaaccccaaatatcctttaaaaataatgtacaaccaaggagtgcaagcttgagtgaggaccattgggactcataggaaaattctagatcccttaaatcctaattatgaaatttactcaacatcccactatagagagtcaactatactccaacatcttatgaaatgaaatcaagaaataaattgattaaatctaatttaatcaatttctcaagtccataacctattaaccactgcatgtaagttccccatgaactaatgtttataatctaacgaaatggaaactatcaacctcttaagattacctttattatcattgagtttgaaatatatcctcttattttgtgaccaactaacatattctaactcattataaacatatgtcaaatccactaaaagaatgaccatgatgttgtaggttctatgatcccaactccttaggatcactcaaagggacatattttctcaatctcatgagatatcatgattactacctcatggatacctattgtcacttgtcttaattaataataaccaaatctataaagaatatatgaccacctcagggtctcactcataagtcaaagtcactgaagaccacagtataacttaatagtctctcaaggttgagaactcataaagtaagtagcttagtgaaatcatgaccacccgataactgatgtcatgattcaccatatgtcttattcaatacatcatagtgcgcttaccatgggaaactcatcccaatgacaaaggcaattcattactccaattaggagatagtgcactataacctcatataggttgcctaagtccgtgaactagttgtgaataactcatcaacttgcaaggaagtcatgaattgaatcttttgtgcaattctaatacactctagtcatgtataataatagttatgtagacctaaatgctcaaatcaaccataatgcataaacatgatagtgaagtgaaattgaaatcataacataaatattaatgaaatcttatattgttatattatatcatgtttttaagggccctattctaacagattcactattaattgattttacagcaccttttgttgtaccaaatataaatctagctcaatatatttagtctttaataaaggaatggatttatagacaatgcaactatgctaagattatcacaccacattattataattctatattacttcacctttaattcaataatgacttagccatgttgcattagtagaacttctataccttatcaatgtgcttgacttttagaaagcatgttgcttttcaaaacactagaacaccacattactcctaaaatatatgcaaaacctagaagttgatcattttttataagatcattgccccacctatatatgagtatcctattaattttagtgactagacttcttcaatgttctacaaaaatcaatagcaaccttaagataccttagtatctttttcatagatttccaatgtgtatcaaaggagtttgcataaattagcaaagctatttatactataatctttctagcttggtaatggttatatactagagtgtaccacctacactcctgtattcttgactattcataactggaacaccttccttaaaagacaattagagtctactaatcattaatgtaaataaaggcttagcattagtcatcttcattttctctaaaaggccagtgatatatttcttctaagagcttctatccttgagaaaaaaactcaattaccgtaaatcttttaaggaaaaagctccattcaaatgagaagtaacaaaaaatctttaataacatgcctaataagtatgatattgtccacatagaataggatgaacacacatgattttgcatgaaatccagtctaatgacttgctcccctcttgtgtacatattgttacttgtagacctaatagactcttatgacttaaaaatacatgtacatggttaagaggaattcatacatatatatgtcagaattttttttttagtattcgatgtgaaatatcataatcactcactatgcaaaaacaatgtccttatcgtttccgacaaaattaagaggctaaacaaactctcacaacatggttgaaaattggttttgatatcatttgttactacccactccctcccatgtatatattgtatgttttaggctcaaagagccctcatgactttaaaacatatctacatagttaagaaaagtctatacatatatgatgctaggaattttttttctttattcaatatgagatttcataatcaccccttaggcagataagatattctcatcgtgcaccatatgatttggggtcaaatagacaaacactccttatgggcctaaaaaaaagtcccacactgaagtcggggatcaactatgatactatctacaacaatcaacttcctctcgtgtagatattgtttgctttaagcccaaaggaccctcacgactttggaacatatctatgtgattaagagaaactaatacatatataatgttaaaaaaaatttccattatctaatgtgagatatcatatctagtgaaaagacaatgatctaccttaaaaaaaagaaaaccctaaatgttataaagaaattcttagtttgttaatctaggcccatgaaacttgtttacaaatcaaattttattagccattcccttgttcaaaccggagtggttgctttatataaacttccgcatgaagaatgccattaagaaagacatcattagtatcaagttgtcatatctctaaacctcttgtcaatgtaactattaacacaattcttatggaagttggtttcactatagaacataatgtctcaataaagtcaagacccactatctgatggtagcacttggctactaatatggaattacatctagaaatagagatctcaatatttttcttaagtttaaacacctatttacacttggttgaccttctatattaaggttaaggcactaagggttaggtctaatttttcattagagcattgtattcataagcattatctcatttcactaaccatgtagaagagcttcagtgacattagatggctcctacatggtgatatcaaataaaaatattttttgtttaaaattaccaaccttagatcatgtgaccctaggtatgaattagttgttgaaggaataagagtacaatataaaataatagaaattaaggtaagagaggcatgagattataaagaaagagaagtttgaatccatagagcaagatttaaatttgaaaagaaaacattttctacaaataagtggtttatggaagagtggcttataggtggaatagtaataggttggacagtagtgtcacctatcgattgatgatacataataaatggtaatggagctgtatgagaacaagcttgtaagggaggaacaaagctagaataaaaaagtgaggaaattgtagaactttgttattttttagcaaatggaaaactatattcatcaaatataatatgtttggaaacatatactttaccatcaataacaagaaaatttgtaaaaggtataagtaagagatctaaattgatgtctatgattgttatatgggtgtaaatgaggaaaacataagtaactagatatctttctatgatggaagttatattttaccttaaataatggcttcatagagtgtttctaatgaaaaactatatttggagggttgttgataagaaaaacaacactagagaagcctcaaactaaaatctaagtggtaaagaggcttgagttaataaagtaaggtctaattaagcaaatcacctgtgcttatgctatatatagtgtcattctgttcatatatgtgagaagatgaattattatgtgtgatggcataggaatcaagtaaggatgtaagtgatcaaaacttacttcaccaatctatttgaaaaaatttgagcttagagtttaatggctcatcaacttaagtttcaaaataaatgaaagattgataaacctcatatttggagttaagaaagttgatccttgtaaataaaaaacatgcactaatggtagagaagtttggaaaaactccatttctaactatttcctatttggcaataagagcaaatgaaaagaattttattgattataagtaacaaccttttgagctagatggtcaatctcttatgccaaatgttaagaattggactattagaagaacacgaatcaataatagaaataggaaatgcactcgaattagcaatatatcattgttgaaactagctagaccaaggttttagatcaaaaacttgaagcataaggtttcaaggtcaatgttagtattactttgataattaaacctaaataatccattatgtagagtttttcccaaaaccattgtgctagtaacatagtcattcacaagacacaaagtaaggtaaaactcgagtagggaattcctcggattactccattccctatcctaagactagattaggtgtatgaaatcctcttaggtctctagatcctatgcaacaaaaacaaaagacaattttttttaaagaaataagatctagattaatacattagaaaagtttaccaaagatttggatgctcctaaatcaaatttgtgtggtgaaaaatcaattcatagtcatcggaagccttgtagactcgtgatctttcgtccattgactctactttaatccttagcacacaaatgatggtatgtttaggaaagtagaggctaaagttctcttctttctttttgggtggtggaagacaactaaaaaaatttagaaaccctaatctctaagggaggtatttatagggttccccattgagtttaagtgacttgagcccatcaagggcttaggttactatatttaggccaaaaaaggtcttaattgattaattaacccaacaatttgtctaattaatcaattattcaaagccaaagatgtttttcattaattcatacacaaacttataaaattaccaaaatgcccttatacacataagtgaacatagagcttatctacccctcataaatcatgtcatcaaggtagatgaccttgtgtatggaccattgaaacccgtaggatagtattggctcccttacaatacaaatttgaagttgattcaaaatcccactatagaaattcaaaatccattagaatacaaagattctctatagtgagattttgaatcaattacactttaatgccttatgtaaataataatgagacactaagtgcttgggtctatgacctgcaattcattgtgtatagtttcctatggactagtgttcgtagtttaatgaggtgaaatctattcatctctcaagactacctttactattcttgagttccaaatcctcatattatgtaactgacatatcttagctctttaagagcttatgtcaatttccacttaaggaactactatagtcatagtttacatgaacacacctccttaggaacacactttcttaggatcacccaagaaaacactttatttcaatcccatgagatattatggtgcttctattgagaatatgtattgttaccaacttctatcattagtgacccaattcataaggaagatatgatcactttaggatctcacctataggtcaaagccactgctaactttgacacaaactcaatattctctcaaggttgagaaacgacacaacgtagcatcttagtgaagttatgactactcgatagcctaacgtcacaatttaccataggtccaatctaatgtgtaaccatacaactagtgcacttgccctgggaaactcatcccaatgggtaagactagtcatcactccaattaagaggtactgcactatagcctctaatagttgcctagacccataaactagttgtgaacaaatcatttaattttaaggaacctgtgacttggatcttccatgtaattcctaatgcacccaagttacgtacaatgcaagaggtgtaggttaaaattcttacaaaatataatgcatgaaatgaggatggataaaagtgaacatggattttattaataaataataaacttcaaagcttatcacatcatttcatacttttaagggatatatcctaacaacatgaagtacaaattattatccttgacaaaatgtgagacactaatgatatttttatacattaaaggaacataaagtaaattattgagatgtactctagaactagaattagaagtagaattatgaaacacatgagattaactagtattagtgattattaagcttgaaccatttcccatatgaatgttgtcattttcatgttaccctatttcaaaatataggttgttacaaatcgttggtgacatggttagtatcataggcatatggataccaattaagatcaacaatatttagaggagtcaccattactatcatagacttgttattgttttgattgttgcttcaaccattgtctaaagttgttattaacactaagaaatatgacataaaacctataatagcatgtgtattgtatgccctaattttccaaaaagttagcattataggattttctatgtcctcatccatagccacttaatcctcaactaacttgaaaattctaattttctttaggtttttgttgttgaccttgaaataagaggttcctatatatatgtgcattagtaaaaataattgtgttatgttgaatcttatcctttagagaaaataacaaagatgatgttgaaatgcaatctagtatctgtttgagctttgaggcacatgcatataagattctaggcataatggaagtgataaaaattaaaactttgaacccatattatgtgttataaaccatacctgtagtttgaatgtttccaaatttaaatcttctcgtaattgagatcttgaaacctcatgatcttccacccaatgactctttttttttttatctatggcacttttgtagagtacacacttagagaggttcctatcaaaaaaattacacacttagagaggagagagaggagggggctaggtctatagaagattaactgtctaaaatattgtaatctaaccttaaaactcatggtgtttatatagactcccttatgggataaagtcattctttgatttgtggtacttttgtagagtgactacacaactatagaggagagagaggacgaggctaggtctttagaagactaattgtctaacatattagattctagccctaaaactcatgggtttatatagactctcctgggggttgaagtgactttagcctaacttgggtttgagtcacttaatctagctcattggatcttaattaattaattagcctaaacgagctcttatttaattaattactctgatatagataaacaaaactaaataaacataaaatcttgtgcaaccttacacttttaccaaaatgtctttatgtgcataaataattaattctccataaagcctcaaaataaataatcataagttcttatgcaactttgcgcttttaccaaaacacctttatgcacatatatgattaaatcttcaatttttttctcaaacctttgtgctaagaaagattatgagattgagtagggaccattaggacccataagaatatactatcttccttggaatccaattttaaaattgactcaacactccactaaagagagtttaattgcactctagtatccaatatcattacattgaaaaaagaattgattaaatccaatttaatcaattcctataacctatgacctactgtctgctacatgcaaactccttatgaattgacatttgtaatctaacaaggtagatgttattgtcctcttaaagttacttatgcaatccttgagtctcatatcctcctattatgtgatcaactaacatatttttgtccacaaatgatatatgccaaatttcaattaaagaattactacaacaccatagatttcataatcataagtccttaggatcacttaagaggataccctatctcaaactttaatatatcatggtacttattttgagaatacttattaccacatgtcttaatcaatagtgacttaatccatagagaatatataacacatataggtcaaagccattgaagacctcaacactaactcaatattaaagcattacatcatcatacatactagtgcactcaccataggaaaccatctcgatgaccaagacaagtcatccctctaattaggaggtgtactatagccttagatagattgtgtaagttcataaaccaatagtgaacaactcatcaacttgcaaggaacccttgacatagatcttttgtgcaattcctaatgtacctaagtcatatacaatacaagaactataggcttgaatgctcaaataaactttgatacaattaatggataggaaaatagaaagtcaagtctaactttgatacaaaatgtattacttttaagggctctatcctaacaaatgcaaccttaagtaactaagcctcatgacaagaagtgatgacatacataattgaatcatacactacccctaagcttgctagaattgctaaaatctaatcttcattgaaattatcataatatgtatttgtctttataaaataatcattctctatgagtttacctttcttctaactctaaagtagaaatatataatgcataaccttagctcttgattgggaggcacaattttgcttaatggtttcccaaacatcatgagccatgtcacaaccaaccaattgaggaagaatacttgagtcattaaagcaagaagccaagaaatgagtggatgatcttgtctctcttgtgtaatgaaggaaggattcattgttaaagtgtctccatcttgaatcaacttaagaggaacttcttgagtcctatgaatgaaccctttgaggttgtaatttgttgttttcgtaggaggtaattgttatacttaaatttcactatagtcaattgatttagaaggttagccatatgaatcatggatgcaatcaagaaggttgatagagttggagtcaatgagttcttcggtgttgctgcaattgttgaattcattattactcatggattcaaggcatcatagattttttgaagaggatgtcatgcatgagtagagagatgctctaataccaacacataaatgcaacatggagagaaagtaaaaccatatttttttagaaagaaatagcttaatgattcttttatatgcacattaaaaattagctaaaacctaagttattgattctctaggtaagacctttacttatgggtcattgatagtgcataataaaacctatgttgttggatgaaagtaccaataataataacaaactaggtataaaaaaatgagaccaaactttgtacaaagtaatgagatcaaaatacacacatgatgatatctaattggttgtgtcttttggtatataccaatttggaacaatagccaaaccttaaaattttaaaattgaacaaggtcaaccaaggatatatttatgaagtgtaataagctatgatacactactagcttctttaaaaagctatcaattaagttaaagcattgtgcttaactgatctaacaacattataaccatttaacaaatcaagtgagctatcatcatgtttgctttataaccaaaatatcgtgatggctttttattaggacatctcctaccaataattaattatattttaaaaagaattttctatccttatgaaaaggttacacttagttagattgatgaaccaaaatcagatgaaaagaaattcaaataaaattgagataggaaggaattcaaatctaaataaatcaaatccactaaaagaccaatttactattaaatggaatgaaaaaaaaaagaattttataatttctaaaagtagacaataattggaattctaaaattactttttgtttataaaattgaaattagaaatagggtaaatttcattcatctctcctaaggtttgagttaaatacacttaactattatgaatttcagatttcatcaaatacctcccttattttaaatcaaaagggaggtgaatgaaaatagaaaatgtttgatccatgaaactgtattaatgtttcttattgggctttgagctcatcctttttggttgataatctttcaggtaaccttagttcaggtgaggagtgactgttaggagggaaatttgtctttattaggacatttgtttaaactctttttattttggacattatttagatgttaaaacttaattctcatttgaattattttgagtttggagttatttggacaataacactttggttgatgtagtagtttttttaaaagttgatacttggagattttatatttttgtccctactctaaataggaatttgataattggtaaatttatagttacaatacgaatgtttgtgtcgtttccactttgaccctttgggcttgaggtgtgaaatgaccgtcatgctcttggagtggactttagagcgtgacatacagtactagtttgatgagccttactaattattttggaaaccaagtcaggtcaggcttgccttaggagaagcttgaattgcaaagttgcactctaaccattttttaattgtgtgtatatttcaggagagtgt

SEQ ID NO: 12542 - DNA, 3894 bp, Vitis vinifera
  Intron number 7 from transcript GSVIVT01020999001 (locus G SVIVG01020999001) derived from phytozome v7.0 (chr-ID chr5 ; pos 15638031 to 15641924 reverse strand)
ttgaggtatggtttccttaatatcttaagttttgaacttatcccttggcctattatttttttgtgtatcattgtccaacgaaatgcacaattaaagacaaaccttcaatatcaaagattttgttgccactataatggtgatttaaaagagttgtgataagctaacagttagattgacaaaagtttaggtcctttgacaatcacccaccagaggttgcttaaggctaaaccaatatcacaatgatgtctaatttcttagttgttaatgcttgaatttacttggtgtttttatggtggttgcttgtgtgtttctgcagttggtttggccattaataggtgctcaagccaaacaaccacatttagcttatttaaaattgggcacttggttttcaaggcacctacttgcaaatatgttattttaaatgtgaatttttttccaaccatatgaggtctagagatgcttgtgcaagatttcctgtgattatattgatgagcttttgcctcatctttattatgtatgagatgagacactaaaagattgaggcaattctatttctattaatttattttttctggaaatttattttctacatatttttttatattctgtcctgtggagctctatttcatggtctgtaatccaatttctttacatggatgtcacaattgtatttcataaatacagaatttaaaaattatgtttaagataataagtaaaaaattggatttttttagaagcaatttaattgagcaattaccatcaatatgtaatatttgtttttttgtacaatgttttgagaaaaatgttcaaggtcaaatcttagtgtttttgataaaagagaacattatttgatcataaaccatgttgagaagtatctcaaattcctatttggtatatatatttggtaaaaatattgtgtagaatatttcatttgttattaatttcttgtaaaattataggtttccttgtagaatatagaaaagtgttaggaatctttatataaatattttattttatgagggggaaattcatgagtggagatgaccatgtaaagcatatatcgagcaagtagagaagtgaggaacaatggagacacgtagtagagtcagaccttgtggttcaaggtgtaagtactaggagaggggaacatgagattgtctaacacttgaaaatttagggaagtggttgtggaggtatcttaaggaaagttatgctctttggcatcatgttatcttaagtatctatgggacacatccaatagattggaagccaataatttagccagatggtcatgtcgttcccctggaaagccattgcacttattctctaggttatttctacatacacttgttttgtggtgggtgatggtaccagaattcaattctgggaagatttgtggtgggggggaccaacctttgcatccataatttcctagactttttaagtcaccacatctagaaacctatccatctcagctattttgggtgactgcacctctttgtcttaggatctttatttccgttggaatctaactaatgtggaaattgaagatcttagaagactaatgaccttactctctcatgtacacttctccttttgttcaaaatgcgaaagcttgagtactttctttttttgaagtattttcagtaaaatcttttttcttagccttgtccaatttttcaaattcagttcctttccacccaataattttttttttgtgaaaatctagagcccctcctaaggttaggccctttgcttggttagtgacacctaagaaggtaaatactaatgacatgctacaattgagaagaccatccaaagccttgggccctgattggtacactctttgtaggaggagtggagagacggttgattatctctttctacatcattcagttacgttggggttatggcacaagatattctcatagactgcgatggtgtgggttcaactaggtagtatttacaatatgatgcgtatctctttcaagtgttttgggaactttactagagacaatactctttggaagagttctggtctcactttgttgtggattgggtggagatagaggaatgataggatttttgaggatacttggaagatgactgagatgatgtgggacttgcttcatttccatgtttctttttgggcttactgtactaatgttttgaaatcatttcctttgagtgtaatgcaactttattggctttcagtatgtacaccctaggggtgggtttacttggtgaagtccttagttgagcttcaggagttgttatacttgtataaccttttttggttccttttgtatagtcctacttgtatagtgaagttttctttgggtcttttgatcagatttgtattttatggggaggatttctcatccttctcatgtttttattcactttttaattaatacatcctttgtttctgataaaaaaaaaaaaaaaaaagaatttgtgtttgctttatcgtccttttgtaatttctctatggtatgatggattgtttttctcttattggtagatgtagccatgtaggtataattggccgaaccatgtgaaaatgtcatgtatctttgtgttgtgtgtgaatttccttttatctttatgttgtttcaccagcatgtgatatcaaagtctttgcaccttcctttggtacaaataagtagatacttcaatgcagtaacaaattaatgttagtctttcaaaaatgtcaatcttttagtgttcaacttgatttttgtattaaaaaatgagagagcatatggctaagcttaacacatttagaagcttattccttttgaaatagtaggatatgaagcaatgaagtctcttccatcatgcctaccttgttaaaaattaatgtcattttagtggcagagtttgagaaggaaatcaattgccttcttaggaaaatggagtcaagaaaagttcgcggggttaaggtggtaggggaaaagaagaaatcactttcggctacttgtttggaggggagattcaaaagctcgaatgcttgatcaattacagatgctctcttctctcaaccaggggaagggggaggggcaatggagttcaagttgctttgtgttgacatggctttcttcaattcctgctaggttgtttttggggtcttggaggtctgtggcatgttctctattccttgctaggctttagggattgtttgtgtgtgggttgtgttttagcactggtctttcccgcttgggagagtccgtttgttctagaatgtcgtggtttggttggcttaagggtggttggtatttccctttctcttgctagccttttggcgtgtgttgtatacttcgatgtgtactttattgtgcctttttgctagtgctctataatatattctctcatttacctatcaaaaaaagaaaaaaaagaaaaaagaaaaaaaacatcccctcaaatctatattaggctcctctcatttctatccaaacccttttgatctacacattgaatggacaactgagttgaatgacattgagacgaatgcctttaaaaacattagtacaagagggcaagaaagaagaatagaagtgaagtagatcctacaatgtctttgatgacctccatttatgttcaaagattgtagcatttctcttcacctcacaatccaaatgaatatgagacaaacaatatgctaaaggttttttcctctaatggaagctctatatgaaattattatattgcatgtactagagggtgtcacattagcttgatttttcagactcatgtgtgctttcgaagttctacctccatcatcatgtgattcaaaacataggttcttagattgtttttgttgtgtcgtttcctaaggattctttggatgtcattttaactctattccaaatgctgttcagatttttccaa

SEQ ID NO: 12543 - DNA, 5933 bp, Vitis vinifera
  Intron number 6 from transcript GSVIVT01018280001 (locus G SVIVG01018280001) derived from phytozome v7.0 (chr-ID chr1 5; pos 12074912 to 12080844 reverse strand)
gagtcaaagcaatttcagaacagcaggtgtttcattcatttcacagcttatttatggtgataactggcatattgtaaagtcatttgaattcatgataacttctgtatcatctaggagcccaatttttgaaagagaatccttttttttaattttttgcaattggctgttttgttcattatttctttgcactatggttaccgtaaagccaaagggggagacaacataagaaccaaaacatggggaacaccctcaaagaaatctagagaaatatgaagtgaggaaaggatttggcattgaatggacacttatacactagaccaaaaatgtgatacactagagaaaagtcatatgaaaaactgaacttttgggagtaactaaagaaacttgtagtaaggaggagattgtgagacacgcgtttctcttgagtgtttttaggcattctcaagtttttctagaagcttctagagtgttcccaaaaatgttttcctaaggttttgaagactcttttatttatttattttttattcattttctatttctatttttatttatttttaagataatggggaatgcactccaacaagaagacatttaacctatctgttagctaggaaaatccctatgtgatatgggttggcacttcaccccacatcacttgaatactggggaggttcaaacttgggacttttggtccattaatggagggcactatggcccctcgctacacctatggcagttttaaaaactcttctaatgattttaaccattgttgcacctccttttctagtgcattttattcttaaaagaaagttctcccttttttgtgatatatttgtgtatacttccctatgaaaggaagatttctaaaaccagctcataatgtttctcctgaaatttcctaaaagttttgtcctagattcggacatagctttccctattgctaattttcttaacaactgtggtttgcatctagtacggtttactatgtaactattacattgtagcatttttttcccctagttgtaacaatatttcctgtttttattcaatatttgtcttccacatcaccaatatttaaatcataaacctaatttagttaaaattaaatccttatacatgaaaagattgatcatagaatatcttatgggtgaattactcgattgcattaaagcttagttcatatcgacaatacttacaatactaactatatctttccacattttctttccatattaataagaaacaagaggtgtattaaaggcaagtacgtgagaaggacgaggaatcctcccttgatttacaaaagccaataaaaaactggaagattgaatttttttaagatactaggaagacctatacatctatatagaactatgagaacattcaatacaaaaacctctcattcaagtgaggttttatacatccatataaccataaggattaacaacattgcatccgaatagaacttgaaacaagtatcctatcctcaatatccaaacccttatgatccacacaccgaatgccaatcaagttaaacaatattgagagggatgcccttaaaatctatttttcacttgaatttctctttgatggagcttcacaaacccttatatgagattgtcatcatatcacatattctcctaaatagaacccaatccaaactggataatcttaatagcctatgccataggcctaaagtgaatggacaatgtaagaaaaaagatggttgactatttctccactcctcaagcacacaatgcaccaaggaggaaattgtgaggagcccttatgtgagactttctcgtccttgtttgccttatttgattctaaagaggcatggatggttgatttgtgggaacatcgaggtgaaggaggaaattggaacttccattttgttagaaacttgaatgattgggagttaggtgttatggagtgttttctttctaaactccaaggacattcagtgaagagggagcgggaggatcttctacatcatctctattgacagttatgtcatctacataaatggtaagtgcggtaatcttcttttcaggtgattgcttaatgaaaagggtatgatctccttggctttggtgatagccaaatttgagcaaagacttagcaaatctttcaaatcatgcctgaagagactgcttcaaaccgtacaatgatttcttcaatctacacaccttttcattgctgaattttccttcaaagctaggagacaaatccataaatacttcttcttccaagttcccatgcaaaaaaaacattttttacattaaattcttgtagaggctagttaagatttgctgctaaggataaaagaatggaattcatctttgccataggtgcaaaagtttcttggtagtcaattccataggcttgtgtgtaaccctttgctattaacctaccgttatacttttcaattgaaccatcaaccttgttttttatagtgaacacccacttgcatcccacggattttttttttctttgggaaaataacaatatcccatgtttcatttttatacaaggctttcatctcctcatttatagccttcttccactgagaatcacatagaccctcttgtacatttttaggaactgaatttgaggacaaatgaatggtaaaggccttatattggtggcaaagtctatgataggatagaaagtttgacaaaggatgtttagtacaacttctaacacccatgtgaatagctacaggaatattaagaacagtgtcaaaaccctgattaagaagagagggattaaaaggattagatgtacctaattctggagttgatgactggttgtgtgtaagatagattgggtcttgttcttgcattggtagccttcgcctcctagagtaaaccatcaagtctgaatcggcattttctgcactattggttttatgatgtctgtttcttttcctgctgttggatgtatgttgtctacctcctctacatcaccatgtttagtagcattttctgctactgctggttttatgatgtcagtttttattcgtgttgctggttgtatgttgtctatctcctccacatcaccatgtttagtagcatgactctaaatgggaaaaggaaacatcgaagactgatcttcttgcaatattttccccccctgaagatcaaatttctggtaatagggttggttttaaaaaaacttacatccatggagacaaatttcctttgtgtaggtagatgatagcacttgtaccctttttgtgtgggggaatagcctaaaaaaaaaatacacttagtggctttaggatcaagtttggatccgttattgtttgggatggggacaaatatagtacaaccaaaaactttgggtggaaggcagccaagacaatttatgtgaggtaggtgttgttttaggatgcctattggagtcttggagtataggcttttgtgggcatcctattgataaggtaggcaaactgtaagcactacatctccccaaaaaaacttaggaacatttctagcaaacattagggctccagctacctccaacaaatgtctattcttcctttcggctaccccattttgttgaagagtacctacacaagaggtttgatgaataatcccattctccaagaaataatttccaagggttcggtttaaatactcccctctatgatctaatttcacaacttgcaattttgcattaaactgggttcaaatcatataatgcaactgtttaagggggaggatagtattggatttttcttttaggagatagatctatgtggttcaagtacagtcattaataaaacttgtgaaccattttgctcctaaatgacaaggaacttgtgaaggaccctaaacattaatgtggatgaaagaaaaaagaatttcgcttcttttactgctcaaaggataagaaatatggtggttttttaataactcacaaacttcacattggaatttagaaggatccaagttgacacaatttagggtataaagttttcaaagagaaaaaacttggatgccctaatctttcatatattaaccatagttattattattattattatttttctgtatttccttttatttaatgaatttgaatctttccttgctcctcaatagccaagtaatagagaccctctctctcttcagcactaccaattatcttcctcgtagttaagtcttgaaacacacaatgtgtgggaaagaaagttacaaaatagttacaaaacatatttgggacatacaaagcagatgaaagagtgatattgggggtgattgaaacattgcctttaccactaagtcaaagatcctttagcaacctgtactttttggttgctagaatatggaatgtatgatagaaaaacattagactctttagtcatgtgattagttgcccctgaatcaataatccaagtgttagaatgaagaatactagaagtactaagggttgttttaaaagtacttgattgtgcaaaagtacaagaagtggaggaagaggaaaccttagattttcccataatcttatacaagagatctagttgttcttttgtgaaagggagattgtttgaggttgatgttgaacctagtgtctttggtgtttctaaattgcgtgttacccttgtgggcgtccttagcccttgattgtggctttccatgcaatttccaacatgtctctctagtatgttttggcttgttgcaatgatggcaataaataagtgtcgatggcaatagaaggttacgaatatgataggcaagggttggcaatgaaggctaagaagaagaaaaaaaaaactaccaaaaacctttttccaactctgataccatgttggaaaataattttttttatttttatttttctttgaaaaactagtacaaatatatatacaactttcaaacttgtaaaataaatggaaatagaataacacagctgacctattcctaaaattcttcctacaaatcccctctaaattagaacttatttacatagtcaactaatctaaatatttagaaaatatgcagaaaattaggaataaatcaaataaactccttgaaatcatgaattattggattccaacaataccctggttttaaaacaagttttcaaaaaacttatttttattaaaaaattaccaaacgtgttttcaagtctaaaaaatagttttctatttttaacagaaagttgtttattaaaaatagttcctaaacaagctcttaatagtaatctttgattctctaatataatggttgataatcatttttgagcatgtgtgactgcattttttggttttgatgctggaaatggtttgatacttcattgacatagaaaatgctttggaattttgtcaacaatggattatgaaacaagagatttaaggcatgtttctaaaacacttctgaaaaaacactttttgagaataattttcaaaaccaaattttttgatgttttctagaacaaaaatctatttgggaatttgaaatgttctcaaactgttttctgtgttcccaaatatttcttaattttttatttatttgtaatgctttattttcaaatcattctccatctttgtacaactaatttttaaaacaacacctagaaaacaagtgaaaacaataaaaaatgttctcagaaataccctggtttcaaaaaactgttttttgttaaaaaattaccaaatgtgtttcaagtctgaaaaacagttttctattttcaatagaaaactgttttttagaaatagttcccaacaatggttggtaaatggtttaattaaacattgtcattgatatatctattggtatcccatgtttgaatcttgacaaaactggcaatattagtatctaaattttgtattaaatgtgatgatgggatctaggtaccactaattaggtggagttaagcttaattgttattttctttcatgctaattttatttcaggagtcattatcgg

SEQ ID NO: 12544 - DNA, 4913 bp, Vitis vinifera
  Intron number 3 from transcript GSVIVT01026559001 (locus G SVIVG01026559001) derived from phytozome v7.0 (chr-ID chr4 ; pos 21857892 to 21862804)
aagcgaacgcggcgctccttgattacataagctcggtgagtctttctgtaatattttgttttctggaaatagatttgtgctttgtttggttgctgtgaaaatgcgggaaaagaaaccaatccgagttttctattcaactctgactaacaccgctcttgggtctagttttcctcagaaagcaacaatgtagctctcagtatttaaaatggagcactactttaaatcttgaggtagataaaagtaggtgagattgaggcggacaacaatagtacttgttcaacaattataatgtctaatgtagaaggcttcggctttgattttattttagtgggattcattgcaattgtcacattggaaaatttatctgtgcattggggaaaaacataaaatgaaaagaaattctttgaatattttgatctgatggctgaagagggaaacattcttggttgggtgctttttagttcgatgttaagatagaaatatgagtattgtaacgaggttttaacaccctctccgcatggaggacaagtttcatccacaaagaatagaatggtacatcccaactaagaatgtcaattgtgtgggatttttattaagatttcctagggataaagtacatatttacaaataatttacttatttattcaagtttaagtgaacggtacttccttataacattagcttaagcattgtatgatggatcatggatcatcagtattctaggattgccaataacaatgtagtagttttggaaagaagtgatgttgcctcttataggatacattgatggagggtggtctcttataattaggtagtagtgagaacatgaatatgtggatacttttgttttgcatttatatgtactttgtttcagtgttagtttttattattttcttttcttttccttctttggataagcaaatgagtgggcaccctgtgtacatagggttatagaagcagcaccaagagataagattcttttcctttttcataggaaataagaaattaaagtattgaaggagattaaattcagggtaaggttttcaatagaaaactgatgttgtgaagataaagtggtaagttaaaaatcccccacagaatggttattagaatgaatgccatccaagaggtcaacatacaaatcattctatatatagatatatatagtctcaaaattttaaaactgaacaccacacatttattttgataaaagatatgtatttctatgttaggatgtgggtctgcttgtgtgtaaagtttcacactcaaatccatatagtagcaagggcagttgaggcctgaatttggtggcaaggggtttgaatgggggataagggggtttcaagtaaggaacaaaatttgatgttaccattgaaaaaccagaaaagttaggggtattagtggtccccaatatcaaaactgtctgatgtgtatcgttaagttggaattttaagaaaatgccccaaattttgccatttttctatgaaaattctgccagtttcatccagcgagctagctgtaggggtgcctatattgtacatgtgagacatatgattagtatgtaaaatgtgtgtgcaactgaaattttgttgaaatattgcaatatttcttgatgttttgggaaatatcttaatatatttatatgattattactttattccatcttttttttccatttattttacattttgggctattttcactccaaacaagatttcctaactcactgaaaattttacctaaaatttcaataaaatcataagtcctatagtaaattaaatcaccttaaaactgaatctaaacttatctataaatcaacttcaaaatcacccatatccaaaaaaataaatataaaaaatcaacttaaaaattgtacctatatttattgctaaaatttacttaacaaattactctaaaaatcaactgaaaaaaaaatcaatttaaaagattcaacttacatttcataatcagtcttaactactactcaaagttcattgcacacaaatataacttaattaaaaaaatgaatctaaaattctacctaaattttacaacaaaaattaacctaaaactctccctacctaaatatcaaactatgagaataggggtgatgatggttttgaactccctagagattctaagacgatacctaggctatccatgaccatggtattctccaataatcttatgtttttaaaaatttgtcataaaatagatgcctatggaccaatttacactttcattggtcagagcacacaacttttgtccgatatactacatacttatgatgtagataacttttgtttatattttaacttttgtttatattttgactctaagtggtgcaccattgcatgtcttagtaatctttgaagttccattttaactttccatgttatgttagtaatttccttcatttcttttgaaaagtttctgatattgatattttgtcaatatttttatcgataccctaatatttgtatggttgatatatctatcaatactcgccttttggtccttggtttttggtttgattccaattaaaatgtatttctgataaagaaaaaaatatctatatcaagtaaataaaacttgtaaaatggtaaagattcaacattcaaatagtaccaacaactgctacatcaaaatgcttacccttacaactaattgattatagcaatcatacttggttcattttaagaactttctttaatagtcttagcaagagagagggagcattagacaagaagaccctaagcaactactcctttatattttaatgtcaatggatgataaattttcaaaaaattttgaattcaatttcattaaaaaggattatgtttttatagactccatcatcatggctttaatctaaatacatattgatgcattggtaagttctaatatctgcccatgaaattgagtggagcatgttttcttcatttgatttactggtaggctcctcttaaacatttttggaactgccagatagttgctaataggatggtaaaaaaaatatatatcttaaccccttcataaaatcagatacacacattaatttgtgactgaaacttatgacaaaacatcagttgataatactgactagtttattaatagttttgagctttgattgatcacgtgaccgataaaacagagaggtgttgtaagaaaaaattgaacataaatcttgagcagcttatttcatataaattaaacttatttcgtataaattagtggactttctttaaaaaaaaaaatttaagaaatattcataaatgaaaccccaaaaggggttgtaacccaagtacatggaaagtgtcaatagcatcaagagaaggaaacagaaaaaaactccctaggggtaacaggataattacaagaatgattcaaaattcaagaaagacatccgtccattccccaagaactcaaccttccatattaatagattgcaaataaaactccttttacttcctgtccaaaatctcacttccggaaaaatctggaaattcctgtataggatggttttacattttgaataggagtaaattccatttttttaattattgggttattagtaggttttttatttattatttttctttttgatttcattatagcataggaaaattttgtccaaccaatgttttgcagctatcctgacttttaaaagtatgatagatcagatgtgacatgacttggagagatgacacttgaaattagagcattgttggaagccaaagctagggaatttgtggtagtaggaaaagtgagcttgaaggttttaactatggggttgaaggaggaaaagttgaataaaagtagtagaataaaaagcaatttgcaagggatatgaccctttttggtatgtaacagtgagtcattattcatgaagccgacccaaatggttgggaccaaactttctattattaggatgatgattgttattgagatttgacaaatttacatttttgtgaaaataataaaaataagaattggtttacaattgatgggattggaagaagaaattattgcatgcagattgctttgaaaaattttgagtaaatatattttcattctccattcaatacccccgaaatcccatggttgtttagaatggtaattttttttttcttttggatacatattcttagaagagctatttctcaagattggttagaagctttacctatttccaagttagacttttatagattgaatggtttcataggtccatgacactgaatcatttgtttgcactatggggggctttcactattttgattataaaatgtcatcaggatatatatatatatatatttataggtaaatttttgtcccccattgagacttgaacctagaacctcccacaagccctccccatccctttactacttgagtcgggccttaagggcagaatgttataagaatataatccttgtctttttttccccccctcttcttttctttaattttcttttttgaaaaatagtaggttcttctttggtggtggtactgagtagattaggctgatacaccaaactcttgtcatgattgcttcacaattgtaaatagatagcaccttcttcacaactgttcctttcttcttcattactacatagctagatacattcctatgaatatggtaagatgtgttcatatgctaaaaaggactgtggagtacatcaattgttacttgagatttcttcttggttttcttgtccaaaaaatttatttattttaaatcttttccgttctcttttgcttggattaattgtttttctgtctgttcttttccttcctcagtatagtttgtttatttaaaaagtaatgttctcaatgctgataaattttacagagttcatttttctccattaacaggttgtaggagtgaaaagaaggcaggtgtctattag

SEQ ID NO: 12545 - DNA, 7224 bp, Vitis vinifera
  Intron number 2 from transcript GSVIVT01032946001 (locus G SVIVG01032946001) derived from phytozome v7.0 (chr-ID chr1 4; pos 24509803 to 24517026)
ctatcacattatcatacatcattgctcctagattggtttgtcattaacccctcataacttggttttggtcaactttctctatcattatccatttttagtttacccaattgcctaatacctttttatgtccccccatatcattgtagactttgtagttgttctgtaactttttctttcccctcagttttaacaaaaatagtccacttataaaaaaaaaatcgacaaaatagattatcctataatataattctcaaactagtgtttctaagccatgtaggcattcatgtgacataaaatatttccctttttttttacgtgacaaaaccgtagttggtaattcgaaattgtagtgaccaactatagttttgaacttaaactttgaaaaataattaattaatacaataattttataatgctaaatttttaacaaaattaaactaaaatatttctatataaatttaaaataccaaaacttttaaaaaataaaaagtgaaatcgtgcacaaagattaaaaggtcaaaaaattacacttagaaaacattatatgatgtatacaaaacaaattctttcatttcatgtatattaaattttaaaaataatctcataaatttaagtaaccacttacaaattaataaatagaaaataaataattaatatcataaaattttaaaactaaatttattttaacaaaaataaactaaaatattttcaaatgaaatagcaaaacttaaaaaaaaaagggagaaactttaagtcaaaactgtagttggtgatgatggttttaagcttaagttcaaagccatggtcaccaactatggttttaagcttaaatttaaaactgtagttagtgactatggttttgttcattttaaaaaatattcaaaatcatgtaaaaaaagagagaaaaaaatctttgactgtgtggatgcctacgtggttgagaaacactagcttgggaattattttcttggggaatctagtttgtggatttttttaagggattattttgttttaaaactctcaattctaagagcatgttagctatttaatttttgcatttttattgtacagtcatgtagtgatcctttcatgttatttcagaggaggattttatgaatcctgagtttccatcatactatattttccttttatataaatttttttttttttgataggaaacaacacgtatatattgatagaaaaaaaagtacaatagaaggatgatgaatcctcccactagagatgaaactaaacaacacaaaaagataacaagacactacactaagaaaactacgaacaatttcccttgactagaccgtcccgttggaactacacactgctagccaatctagttgtaacacgttaaggggtatgcccttaaaaaccacggaacaaaaaacccaaagagaagtaaggaaatgaatagaatcccaaagattctctgaattcctaactttgtcctcaaatatcttgacatttctttcccgccacacaacccaaattaaagctatgcacgaattctaccacaaaaccatccctctcttggatttgccaaaatctttgaaatgcttctcagaggaacccaatccaacttggctagctgaaataatctgtgccacaaccccaacaacacagaacaatgtaggaaaagatgatatgctgattctccttgcttcatgcacaacttacaaatgtcaggattaagagctttgtggggtctcctcaattgtagcaagtcattagtatttgccttcttgtgtgccacaagccaggtaaaggccttaactttgaaggggacttgagaattccatacaaacttagtagggaaaagtggagataaattagacatttgggacaaggctataaagaaagacttgattgtgaacaatcctgaagaagataaggaccatgatctcgcatctgaagccgaagtggatatatgcatacaatcaagagattggatgagacgttctagattttctatctcagaatcggaaagattacgacgtaaattaaagttctatgagaaagggcgatcaaaatcgagaattgaagatatagtaatatttttttccgtgattactctaaacagtcttggatattggactttgaagatctgatcccccaccacaaatctttccaaaaacgaattatttcctcatctcctacgacaaaccgagtatactcggaaaaatcttgaaaaacttgtgcaatagccttccaaggacaacaatgtgaccatctgactaaaatgttggcatcccaaccatttgagtgtgtcccgtaaatgcttagaatgtcttgatgccacagagctgtactctccctaggaaacctccacaaccacttccctaaaagagcacaattccttagaggaatcttcccaaaccccaaacccacttttacctcggctttcacaccgtatcccaactaacaagatgatctcttttaccttccccaacccctgaccaaagaaaatccctttgcaatctctcaatttttgcagccactgaagcgggaatcttaaacagagaaagaaagtagctaggaatgtgggaaaaacacgagtggataagagttatcttaccaccgaaagataagtaagccttttgccacccgtctaatctcctagagattctctcaatcactggatcccagaatccataagcaattggattccctcctaaaggaagacccaggtatagtataggccaatcaaaagtcttgcattcaagcaacaaggctaacctagagagatgattctgatcaaggttgatgccaaaaagattactcttgtcaagattgaccttaagcctagaaatttgcccaaacactaataattaactcttaagagtttgcaattcttccgcgcaagagttagcaaagaagatggtatcatctgcgaattgatgggacactctaattctatttctacctaccttgaaaccctccaacacacttctttccttagctttcaacatcattctagtcaatacatctgcaacaatagtgaataggaaaggggataaagggccaccttgccttaaacctctagatgccttgacccgccctttagcattaccattcactagaatagcataagagatcgaagacagacaacctctcatctaaatcctccatttagaactaaactctttcttctccaacacgtgatccaaaaaatcccatttcacatggtcctaagccttttcaaagtctattttgaatacaactccttcctcccctgatcgccttttcttgtccactatctcattggctataagaactgcatccaaaatttgtctcccttgaacaaaagcaccttgagtagagtggatagtctcgtgtagtactcctcttaatcgccttgtcaggacttttgctattatcttatagagacatgtgatcaggctaataggtctaaaatccgaaatcttctttgactgactctttttgggcaaaagaactatgaatgaggcattggtattttgattaataatcccgctactgtgaaactctgtgaacacctttactaagtcatccttgatcacatcccaacaatcctaaaacactgcaatggtaaaaccatcaggccccggcgccttatccctgtctaacttaaaaaatggcattaaagatctcttcttcggagaaaggggagtccaacctagaagcactctcttctgatataggggaccaatcaatgccttctactctccaagactctctaggaggactcgagtagagccttttgaaatatagtaatatctcctttgtgatgctcttggaattatccaacaccaaacctctttcattctccaagaacttgatgaagttcttgtttcgtctcccgttagccactttgtgaaacaactttgaattgcaatccccgtctttaacccatttcaccttaactttttgtctctaatgaatttcttctctcaaaattaattcctctagctccctttttctttcaactctttgagcagaaagatcagaagagagaaccccttcttgttcaatgacatcaatgttagctatttcatccaagatggtttttttcctttcctttagcattccaaaagtattcttattccaatctttcaattttgccttaacaaattgtaacttcctcatgaacttgtgaccttcccaaccatttccatcaaattctctccactaactactaaagcactttttgaaatttggatgttgtagccacatattctaaaacctaaaaggtgttgggccccacttgaaagaattggtatccaaaacaattggccagtgatcccatgtccatctaggaagaactttttgaaggctttaagggaaggaaagctctcactcatttgaatagagaaaccgatccaatctcttgcacactggtgactcttgcatatttgaccaagtaaaaggggcattctgtaatgggggatcaagtagttcacaatctcttataaaaccatcaaaatccctcatgctagaagtaaagctagagccacccaatttttctgaactactccttataacattgaagtcacctcccacacaccataaaggaaaagtaaggccaaaaaggtctaacagctccacccaaaaatccttcctaattaaggggctatttgggccataaactgcggacaaccacaatggtccgcatccttccaacaaaaacttgattgagatagaaaaagatccaattaccacttcctcgctgctcattttctttgagtcccaaatgatcaaaatccctcctgaagccccgcacgccggaagagcagcccactccttattcctaattgaccagacactacctacaaaccttctgtcgcacacctctctttttgtttcctgaaacatcactacatccggattctagagccgcaaaaaatccttaaccacccttcgctttttcctagatcccaaacccctagtattccagcttatgatcttcataaaaacaccacactatccctagacctccaaaccaatgcctacatatctcaaatatctgtggcaaatctgttcttccgtcttgaatacaccttaatatccaaggaacttaagacctcacatactttagccattttgctgggggagagaccttctatttggaacccacccatcgggggtaactctgcatccccctggctaactgtacccaggttaggcgtgctgggcttggtcttaacagatttaaaattctcggacaaaagatttaaactatctaattgggacattgcaacatcatgattaggattgccaacagacccaagacaaaaagctccaacgtcatttttttttgaaatttttttagatattactcgatttttcgtagaaaactgagactgaaaggctgaagtgggaagattgggaacagaaggactcgggtatggaagagccaagccagagaaaggagaaagaaaaggcagagatggctaagaaaattgatgagaagatacctcgaaattttccactaccgtcattccacagtaccccacagagttgagccctttttcactggttgcaggaaaatacggaaaaatcgtgactcatccacgatgaggacaacccacaaaacccttaatacctgctccgtcttcacctttagaggaattgcgcattttctccttcccctttgaaagaaaaggagccctaagaagagtcctttcatataaatttttccatgctatgttttttccctatctttgtgcctgatccattaaatgggatattatgtattccccaatcagaatcaaacttccaaatggcaatgttttatatagagaaatatttcaagcatgcctagaaatattttatacaccataggtgcagctaaaacacttgaatgtaaccaagttgattatgaatcaattgattttgggtgctcattggtgtcatttgcattagagttattcaaactaacgaaagacgggaaaaaaagaaatcctcaaagaaatgtagatagtgttctcacagcacatcaataagctcaatgcttacctaatatggtaatgcattaggtagggaaggaagggttacaaaatttaatcatagttataggctttattaaacctacaactcatacaaacttattcaaccttatatactgatatattaagactcaaaatctgtttctgaaaatactcaaacttctaacaataaaaaaaatatggcaatgactctcatgttaaacatttcttccatggttgtggctggtccacttgattgattcctcatgctattatggttcatcacagtttcaggttcagttcctggttggattggtgtaatagtttactactctttcccaacttgaataataagcttaagggatgtcaaaaagttgaaattattaataaagatatgctaatctctaacttgaacctgccacttgctcaagattagtcatttggttctaaatgtgtgatttttgagagaaatgaatctaacctgatgataaatgagccaagtcctggggaattctcgttaactatcaaagtccaactcaagtagttttgagaaattattaatcatttaaaaaatgttttaagtattaaatatattatttagcttaaatatttttttcttaagtataaatcaattaacatcagttttgggttaggataaatttgttgatatattttgggtgataccaaaatccaccccattgttgactcttatttatctcattcttgtacttttgaaaaatatcaaaagaaaatctactctagaaaatctgatgggttggggagtctcacttgactggaaattattcatgatcaagtctgataaaagaaatatccataatcgagttgaccaaactcactaaccttttaagttgtgcctaaaggtcctaaactaacattgatatctaaaaaggaattctaaatttagaactagagatttaacaattatagtacttggaatgaaaatgattctgaatgcccctaaataagtcaaatatcttattattttgaatttacaatgagaccgtataaactcaacaatttctttcttgtacgttggtattcaattttgatcataagcttttcataattcaatgtttaagtgtttatagacaattacgtatatcactatctttggcattactaataccacactttttaaatgaattctctatattccatactcttattctgtaccctgacctgatttttttgaatatctattgactataggcccgtagaggtggtattg

SEQ ID NO: 12546 - DNA, 10047 bp, Vitis vinifera
  Intron number 7 from transcript GSVIVT01013086001 (locus G SVIVG01013086001) derived from phytozome v7.0 (chr-ID chr2 ; pos 8472972 to 8483018)
tgttgaagtccacaataacccatcttcagtgcaaggtgagggtacaatttggctctattagtgtggagatttttggattttgtgaggttatttgtgagttaaggattccttctatataatttgttctttttaaattgcaacttagataaataatgtgaagatctaaggcagtaatttctgtatgttaatgagatatttgggttactatatattttgacttcatggatgatagaccccttagtctacatgatcagatgcttgtaattactaaatgtatgacaacacgctatatattatttatttatatttaaatcattgttgctttgttttaaatgcttttatatccttcttcctaagggaccctttttgatggacaagccacaaatatattaacaatgcctaaatgggtgcactaaagtatatgcatgtatacaaagatcccaaaaggcaaagaaaaaggaagagagaaacaaaaaacaactccctccccctactttgagctaagtcaatcaacaaagtttatcatgtatattgagaagttttctatgtacactttaacttgctttgaaaaattgtacataaaggagactttgattgcttggtttgtctaatcaattgtttcaaatgatctcttcccaacacaagagaggtcttcttactgaagagtatattacccaagctgtaccaaacaaagagcaaaccaaccattataggatttttacttttgagcgatgaaggagaatacgatcaaccatttcttcttatactttgcagtataacatctaatggaaaaatatctattccctccttttgagttggtctagcgtcaagatcctctaaactgcttctcatgcagagaagccaccctttattggtatccgtgggttccaggctttgcttgtgggggaatggctctattgttcttgtacacaaagagagaaattaccacacttaaattccacccaaaccatactacatttctcatcccttcaaattgcctctgcatgtattcttcaaatagaaaattgcatgtgatgaagctcctagtcatagattggtcttgaaaaacaagggttccaaaagcctcctccccagcttgctttgatacctcattggcctttggcaatggatatactaaacaatgtagggaaggaatctcttaatgatgacccaccactctatatatctttccaaaatttaaccttcagtccattacccaccatgaaacctgttctattgttacaaatttctcacccacttctaattgccttttacaaccccgccctattagcttgtcgtctttatttgatttcattgattggttgggttgcaaggaaggtgatggtgttgttttttatgtatccctcttctttttggcctaggtgccttgtatacatcgtgtatacatttggctgctttttttaggcactcttaatacaattgcttttacctattaaaaaaaagggaaaaaaatcccatgcccctacaacaccatcctcccttttcttcactaaacttccctataatcaccccttccaaagtattccttcttgctagtggatctccaacttcatttgctgagaagagccttgttgagaatgaaccgttttcttataccaaggtctccattcttcttgtcaatgcaaacaatctgctaatttactgaatgagcttttttcttaagctctttccctaaaagaaatctttttggatcttctctaattttaggctcaccatttgaggaatgataaataatgacatggagtagatcgaacaaattaaataaaggacttcttttagagtgaaccttcctccttttgagaggtattgtcctttccacatagcaagtttttattaaatcttttctccattgcatcctatacccttgatgatttgtaagggatgcccaaaggcagaccaattaagtagttgggagctcccctacattgctgcccatagcaacaactagtttgtccacattagcaaacaacctccataatgaagaggtatggagagagagggtatctttgctctaaactcctagaactttggaaaaaaccagatgggatcccattaactaagagtctaggatagagaagtgagctaaagagattgattgtttgacatgattatgtgccttctcaatatctagtttataaataatgccattggtgttgctcattagcctttgaatctatgacctcatttttgtaaagaccgtggctaaaacttttttaccctcaacaaaaatatgttaatgaacagaaatcacttttcccaccactttttgtattgttttagccaagaattttgctagaagcttatataactcacccattgaactaattggtttaaaatattttagatccttttttttttataggtaaaaccaaaattttaaattaaaatattttagatcctatggtcccctttcttatgaactcacactagaaatgtgacatttaagcctccttcaaaagagcttggctcatagaactctccaaaaaaacccaacaccctacaacatactttgtgttcgaaaaaaggcaattttccttgtattcccttgcattctgatttataatatacacacaaaagaagagttgacaagattccttatattaggcaacttgatttctaaggtatattatggaatttaccaagatttcttggtacaaatttttttcatgtcaactgttgcaagaaaagaaaaatatatggcaggaaaaaataataagaatacatgtggatcttcatacaacaatttacccaaaataatttgctgatttttgggctattcttttaacacttctcaagctgatgcaaagatattttgcatcctcagcatgtttaagattgcataaaatgtggactatgtaggccttgttaatatgtgtgccagctatttgcaagaggtgatgtatggagtaatctatcttcacatgcttagtttggtcatgatgaatgaggttatgagctacatttatagcaactttgttatcacaatatggctttatgggttctttcaaagtgatgccaaggtctataagaatgatctttatttagagtagttctcaaatcttttcatctttattgaattgttccatagcgagaatcctatgacagttgagtttttccttattcgatgtgactttgtttttgtactcctctataagaggaactttattgagttggcattgctctcttgtgtggaaaaagtggtggaaagtttgccttgtgccctttttggatgctttggatgaaaagaaacaggagaactttcgaagatgcaaaacaatcagaacaagcaatcaagtcctccatttgttcatgatagccgtggaggtgtttagttgtctattgaggagggctattagtgggggctacttatctggttggagggtgagagggaggagtggtgaggggattctaatctcgcacttgttatttgttgatgatacattggtatttggtgaggcgtctcaagaccagatgacttatctaagctgacttctcatgtggtttaaggcttgctcgggtttgagaatcaatttggagaaaagcgagttaattccggtgggcagggtgcataatataaaggacttggccttggagttggggtgtaatgtgggtggtctccctttttgctatttgggtatgcctttgggggcccccttcaaatcagtggtggtgtgggatggtgttgaagagaggtttcgaaaaaggctaccaatgtggaagagacagtatatctcaaaaggggggagactcactctaatccgaagcactttatctagcatgcctatctatttcatgtcccttttttgtatgccaagaaaagtgaggctgagattggagaagattcagatggattttctttggggtggtggagctcttgtgcagaaaccgcatcttgttaggtggaacatgatttgcttggtaaaaatgaaaggtggtttgggtgtgagaaatctagctttgatgaatataactttcttaagcaagtggaaaagtcatcagtcacaagtatggtgaagaagatgggggatggtgctcccgtgcagtgagtgagaggtatgttgtgggattgtggaaaacaattaggaaggagtggatttatttgagtgataggttggcctaccaagtgggtaatgggtagagagtgagattttgaatggacaagtggtgtggagatgagccactttgtgagtccccttattttccatttctttgtctaatgaagcttggtgtcggatgtttggaaccttgatgatgatgggggcggttagacccctcttttctcaagggcgtttaatgattgggaggtagagttggtggagcctttttttgcagaagatctaagcttttagggtgcaaaaggaggtggaagatagagtgatttggatagcttcaaggtgtggcacctttacggtcaagtccctttattctatcttggagcctaagattctcctttgttccctagtggtggtatttggagggcgagtgtgcctcctaaggtgactttctttgcttgggaggcttcttaggggaaactctcaactttggaccaacttcaaaggaggggacactcgttggcaaataagtgttttctatgcctttctgaagtagagacggtggatcaccttcttcattgtgcaaagactctggttctgtggaattttctcttctccctctttggtgtgacttggattctttcttgtttagtgaaagaaactcttcttgggtgacatgtggcttttgtggggaaagcttgtaaaaaggcttggcaaatggaccctttatgtatattttggacagtctggaaggaaatgaatatgttagcgtttggtaatgaggagctttcgcttcaaagattgaaaaattcttttgtatgtaatctttggtcttgggttaggatgtctatagttttgagcccttcttcgcttgtaagcttcattgattggttagactctaagggcaagtgatgttttttgtttctatcccttcccctttggtttgagccttttggcttcttttgtatactccctgtatactctgagggcattgcttttggtgctttctcttttctatatatacatcttttttatctatcaaaaaaaaaaaaaaaaaaggcaatcaagtcctccattatgtgtgtctttttggattgggattagatgttcatagatgattgttctatgaccatgataggctttgttgattggttgggtgctaattaaggatagaacaattgttttttgttggctttctttacttttgttcatttgatgcgcattttgtatacattatgtggactttggtgtgctctttatcaggtgcttttaatatatatccttattttgtctattgggggaaaaaaattacttgttgctttttaacttttcaagtaactagatttccttttaagaaggtacaaattgaccttttatcgacaattgatctagcctaattagcatcatcgtaagcttcaaattttatatttccattcttttgaaataagatttccttgcttggtgtagactttagatgacgtaggattttgtatgttaccttcatgtgagattcatgtggtgaatgcatgaattggcttactacaactatgctgtttgcaatgtctggtcgggtgtgagataaataaattaatttctctactaatttttgatataggctgcagtctatgatatcatcctccattttccctcatggtttatgattttgctgaattggagtctttgtttgttggtttacaccctagcatccttgtttcccttagcaaatcaagggtatatttttgtggggaaatagacattcctccttttgagtgtgcctcttcaatcgtgaggaaatactttagactccatagatccttgatctcaaattcattgggcagataagttttagtctttgaattttcccctcatcatttctagtaacggtaatgtcatccatataaattgtcaaggcagttagcttaccaaaggaaatactttatcattgaatatatgaatctcccaaaccatgggtcttggggaccctttatgttcataaaggggcttcttagtaggtttgcaaactttgttcttccaaaccttgtcatcaaacttaggtgggttatccttgtatagctcttctaagtcttcatgtaagaaagtattgtcatatgaaattgctgcaagatgtagtcaagattagcagctaaatacaataggtatgaatagtgtttatttttttctacaggtataaaagtctcttggtagtcaatactataagttagggtgaattccttggctaccaagctagacttatacccttttactaccccatcagccttgtatttaattgtgaaaatctacttacaacaacttactattttcccccctttgggaaccccaatcatatcctgtgtgtcattctttttctaagtcatgcatctcatcattaattgctttcctctaattcttttgtctaattgcctcttagactgtgttttgaatttcaatagaagacattttttattttttttgatcagaaacgaagaagattatattaataaaagaacaaatacaggagagaaaaaagagacaatagaaagaggaaaaaaccaagggaaggatgagaggtccttcctacacaaataccaaggaaaaactcccaacaatagaactctaaaaacaaaagaaaccctatcaatcttcaaactcttgaaacgcaaaccccaatccaattgagttgtagaatgcttagaggaactcctctaaaagcttcagtacaagaagcccatagagaagaataaaaccggatcaaatcccaaactatctcttccgttctccctttatcctcaaagatcctattgtttctttcttgccacaccatccaaatcaaagtaaggcaagcaatttgccaaagtgtcttgcctcttaatgagttccctaagcctttaaaagaaataaccaacatgtcctcaagtctccttggagggacccaaatcaaacctactagattgaacaacatgtgccaaagtccaatggtaacgggacaatgaagaaaaaggtggtcaatcgactctccatttcctttgcaaagaatgcaccattgaggatagagggctttgtagggtcttctcaattgcaacttgtcattagtgtttaccttcccatgtgctactaacaagcgagggccttaacctttgaagggacttttgagctccataaaaacttggccggaaatttcaatagaagacatttgggtaataaatgcttggtatgtagaaaataaacgatgcaatgaggtaaaatttgaaataggatgtagagtgcattttgtagtgccttttcttaatgcaatggactaactcaaatcatcatagaaattagaatgaatattttcattacttgattcatggttggatgatgggatatgagatgatgctttagattgtcctttcctcgaatacacttttagtttaaaggtgttttctggtagcgtaaactaaaagtgtatgctgttcgcatgtgttccctttccttaagctacttctcatgttcattggttggaatcccaatgggaaaatcttctaaaattttctcatagtttagcattgcttcaaaaaaaatctgctggaatttctcatgtttactggctgattcatcagagggatccaaggttagaacatttgaaactacagagaatattggtgtaaaatttgatcattatggggctgaaaaatcttggacaatagggaaaattgatgtgaaatctaaggtagaggcatttggcacatcatccgattttggaaggacacatcccgcattcctaccattcctaggaaaaatttctacagcttatcttcaattcttccaacctcccccttaagataggtgtaaaatatagggttgacattcaaagaaggtgacatccatggtgataatatgatctttttgttggagggtggtagcatttatatcccttttgagtggattaatatccaagaaagacacacctaagagctcttgggttaagtttatgagtttatctctagattgtttgggattgtgaatgaaggatacaccacccaatatttatacccttaaagttgggaaaagaagagagtactgttatgaggtatttgaagccaaggattcaagaagacatttgatttatgaggaatgtagtcaaaatggcttccctccaacatgattttgaaacattcatttgaaaaaataaagacctagcaacttccaagatatgtctattttttcctctttgctatcgtattttgttgtggggtatacatgaagattgatgcacaatgccttcattttggagataagtgacaagatcatgattgaagtatatcctctcactatctgaccttaaagtatggattttggtaccaaattgggtacaaaccaatttgtagaataatgggaaagtggaactatagtgtagtcattaatgaaggtaacaaatcatctagaccccgaaatatttggaattttagagggtgcccaaacatctgtgtatattaaactaaaaacagaagtttgttttgcatttttttattagaaaaggtacatgatggtgtcttgcaaactcacaaaccctgcaatgaaagtcatgggatttagttttgctaaaaaatgtgggaaacatattttatatacaagaataagttgttttaagggatcgtgcatttaaattacacacaatactcactaagaatattgcatgtctgacctgattagaaaaatacaaaaatgaatgttgcatgtctgtatagttcccagattttaggtatccatctctttcagcaagagtgatgatccattgtggtgttattgcacccaaatccaaaagttgtagggcttttcttctataagttgtggatgattttggctatccacagagtgcatggggtaagaaaattttcctttagtttggaggtgacttgtccctttaatcaatatggttttctggtgtgagaaattggacccagttttgttgacatcgtagaattcctttctcctttttaacaaatcatttattttggaaaaataaacatttagctcataactcatttcggaataaatctgatattcgaggatttatcctctaaaacttcttctatcatgtgaattatttttaacttcttgggtgtggaatagaggatgccgtagttcattggatagcagactgggatcacatattcaccatcacaagttaatcttaagattatatattgagatcaagcaactggtatctgcctgataggatttactttaggaatacccttgtatatcagatatcatagatggaaaataaggacatgattctttctaaaatagagttcaaagtattcgttacacataggcatctgcataggatccttcctataggcaaaagacatgtaaacatgataaagggctcaaatagattgttgctgcatgatcaggatttactaactagcagtgaattgcatatgaaaataaattgattccattctttctgaaacagaatttgaagtttttgtatctacatctgtatacaattctttataggacaaaagacataaacaagacgaagcttcgttattttagatcaggcttaaataaaatccatttaagatatttcaatattcttgtatttagctactaaagtaattgccctgcatgatcttacttcccattgaataagatgctgccacagaaggtgagtaagaaaaatacatttcttcctccttccactgaaataattttgtttacatgatgtcaatgcttcatacctgaggtggatttggttacttccaagaaaatcaatcattggaaatgatttcagacaacattgcttcagatggtaatagctgttccagcaggagcgttaattttgggaacctttccctgtttccacctcttatatttgagttgataattgttttaatcttttggactacttgtgaaatctggccgttttttcttccatttgaacaaatctttctgtctatgctttgtaggttccatcaaaaacatc

SEQ ID NO: 12547 - DNA, 5069 bp, Vitis vinifera
  Intron number 13 from transcript GSVIVT01014441001 (locus GSVIVG01014441001) derived from phytozome v7.0 (chr-ID chr 19; pos 3791976 to 3797044 reverse strand)
gatcagagctcaagcttccactagtccggataaaggtaatcttcttcagcttatttaacttgattctgacaggaaagatgattctcacagttgaagatctctcatttttctgtacttctacccatttggagcaaatgtcactttgtaatatctttttcttaagtgttctttgctgttatatatttagtagaaaaatataaaattatacatacataagcagcttctatatttttattttctaatatctttccaaaggtgggagaatcacccttattaagagcacgctggccagcatgccgatttaccaattgtccctttttcaaatgcccaagattgtagcaaaaaggctggaaaaattacaaagagacttcttttggggaaggggaaacttggaaaggaaagtccacttaatcaattgggaggtggtgtgcgctcaaaaggagaagggtggtttaggcttaaggaagattatccttctgaacaaggccttgctgggaaaatgggtttggagatttgctattgaaaaggataatctttggaagaaggtgttgttggtgaagtatggccaagagggttttgggtggaggcctaatggggttcgtgggacgtatgaagtgggggtttggaaggagattttgaaggaggtttgctggtgttgggataatttccagtttaaagtgggtaaagggactaaaattaagttctgaattgatcattggtgcggcaatgcaacgttgtcccaaatcttcccctagttatatactttggcggtcaataggaatgcaacggttaatgaagtgtgggactctagctttggtcaaagagggtggaacctcagattttctagagactataataattgggagttagatttgataggggagttgctgagtttgttgagggattgtaggatatcttcaaaggaggattcagttttttggaaaagtggggaaagtggtatttttggggttaaggacgcttatattctgttggtcgctcccaatgacttcgctttcccgaaaaagaacatttgggtggataaggctccaaccaaagctgctttttttgcttgagaggccacttgggggaagattctcaccctggataggcttcaaaaatggggatggcagctccccaatcgttgttttttgtgtggttgtgaagaagaaactgtaaatcatatttttttacactgtatagtggtcagggtcctttgggagatcatacttgccttgtttggggttccgtgggtgtccccagagatagttaaagaggtgttgttcagttggaaggacccttttgtagggaaaaaaaggaaaaagatttggaattccatcccgttgtgtattttttggacggtttggaaggagaggaataggttagcttttaggaggaggggtctttagctattcagaaactcaaaaattcttttgtttgtaatctgtggagttgggctcgggtgtacattggtgaggagcccttgtctctcttaggctttttggagtggctagcgtccacttaagggttggtgaggttgtttgttgcttgtgtttgttggtttaggctactgtgtatactccctgtatgccttgtgactttttgccgcttcttaatctattgcttgcttatttatcaaaaaaatatcttacttgaaaaaactgaagagttggatccttctatggtatttcctgatgcaaatgatcacaaactctatacttggggaaaaggtgaggattacaagtgttgcaggaggaagaaatttcatgtcatacaagtgtgatccttaccttgtatcttgcaaaatatacatacattgtttgaaatttcatgaaatatagaagctgcatacgttgtttgaaagttcatattacacatttgaaatatatatttgaaaggaggaagcattcaagcatgttaagctatgttgttttaaattgaatctgttgtcaaaattttgaatgttggtttaaggggtcaatccaggctcaggttccctaaaagcaagatatttactataagtgttaagatgaagaagtgatttaatttttgttcagcccatgcttcagtttctaggaagtgaagatgcgtaattggaagtgcaaatcatgttcaatagagtgacaactagagaattttttagtttttgaagaatatcagaagtagtatatgaaaaacttacttatcatgaactatataaatgtaacatgtaggttgaaggaaaccatggatataatggtcttccttgtgatgagaagtaataaaaaaaaaagagaaacaaaaatccttctagtttagtacttatttaattagaattgatcatttgattgcattgaaatagtaaatataaagaaagatgagaagttttttctacagtatggaatccattgtacaaagtttgatcagaaaaaggaagctagatgtatgctagtccaaaaaagcaaatatatttgaacaataaaaaataattaaagtaacactgatcacaatcatggagggaaaaaatctcacataaaaaagaagaaaaaaagaagcaaatgttttgcttcatgctaatgcatctaccacttgctcagctaagcacctagcaaaggaattatccaactctgaagtagtttgaacaatttggtgcaaccagctgcctgttatcaaaacttccatggtcctcattctttttaatgtcctataatatgacaatagtagaatctcctactaagagataggagagacccaaagttttcatctgcagtaaactgccataatttgttactactgagaattacaatttactgttttcaaggagtcttgtgttatttttctaaaaatatataattgttctgttaaaaaagtaaactaatgaatttattggatcatccataatcatacattcatttttttttatcataaacaaaaaatttattgacatgactctttaagtgcaagggaagatgagaaatccttcaaaaaatacaaaggatgataataaaaaggagaaaatacccaacaagagcagcaagattgctacagatcaagggtgaaacaaaatactgctttatcaacaaattgagaagatccaaaagccttggcctacaataagcccttcgataagagttaatctcagtctccattgccaatctctgtcctgcaggtttagaaaaggctctcaacattgtaccatggtgatctctaatcaaacctcatattccaaactagctcaagcctcaagttacctagagcacacccatcaaagtttaacttaatcaaacttaactgtgaaaaaaaaaagtttaacttaatcaaacccattggaggtgaagtctatattgaaagcaacccataacctgcaaaccatagccatgaaaagtgcatctagacatgtggcagcacatcgcagaccagtgtgctccttgcttgaggttaggtgctgttcaataacaaaggtatgacctaggcccaaaagacatgcaccttgagccaagcgcaaggctgtctgaaggtgcaattgagttgacaacatttttgggatatgtatatataaatgtgtgtgtgcacgcacacacacaaaaagatgttttgatccttgtgtgtgttttaacaagcctaaaatgacaccatttcatatggagcctttaaacaaagggcccaaattaggtcttcatagaagctaagaggagagctggaaaagaaaaggagaaaaagggaagaagaagaagagaagaaggatacacacatggtgctggtagttcttaataaagatattaatttctcaatttgtctcttagcacactcatgagtcacaacacctctttggtatttacatttgtattatttatttatctatttattgtatcgtgtgaatttatatttgtgacttagggtacctcacttcatttaggtgcacaccttgggttgctccttgcgcctaggctccaagatgatttggtaccttaaatgtgttttacatctttagaaaccatgctgcaaaccatgttccaatcaaggtgtagaatgttcaaaggagtaccctcaaaagttgtagaggtagaagcctaggaggaggggaaatataccaacttctaaggtcttccatttatcctcaaaaatcatcacattcctcttcctacaagccatccataacaaggtaaggcaagccacatgccaaaatacccttcctcttggagtatccccaaacctgaatcatcatactggttacattccttggaggaacccaatctatgccaaaggcacaaagtcattggccaatataaaaaaagatgattaattgactggccacaccttaggcacataacacaaagatccaagctgagaacgcataatcatgtgttcgtcaaatgtatcaaattgaagccaagaactgtttgttttaatcctatttctgaaattattttgtaattcctcgtgaaagcaataagtgttaagcataggaatcaattgcactgcttatcactcttggtctaggtccaaggaggtagtttgtgtctgcagatgttgcatcaattgggttggttcctctttggcttgtatggcactctctttgtgcaaatagacatttcaaaaacagacataatattgtgcactcccttgctaccccattttgcttgttatgcgttttgctccttttctactaggttatgttacagatctcaagtgtcaaacaaggtcctgacaatttctatgagaaagaaatattctgaggctaatctttttcttctgacattcctttgttgtcatggatgatttttcctcctgtgctttccaatgcttctctcctgtttgaatctcccgttaactgtgtcctggtatgctgtttcattcttgtatctagaacccattgtctcactcgattcccaattccattttatgttgatcctttctggttttggttgtgacatttttcattatttacatgccttttaccttgggtgggaggatgtgatgtgtaaagggatgcaagcttttaagaacaatggcattgtggagtgtgtaaccattaaatacaattttatccttagcctttcttttttatttaacaggtagattactctggattt

SEQ ID NO: 12548 - DNA, 7610 bp, Vitis vinifera
  Intron number 2 from transcript GSVIVT01032279001 (locus G SVIVG01032279001) derived from phytozome v7.0 (chr-ID chr1 1; pos 14437007 to 14444616)
aaaaggtttccattgggaagacaaaattcgaagaggtaatctgtgtataagttgttttcaagctttattagttgttttaagtgatcaattattatagagttacatttgagttaagctgatttgtccatagtgcaaattttctctattttctgttgcagttaccttgatatgcttgggtattgtatacagtgtaagcatgcctagttttggatgtactatttatgacctagtgctttgatgcctaaatttaagcctccaatggtaggcaacttgaaaacactgttttcttttataggtttttttttttcccttctttttctttttgttggaatatgacctagaacctcttcattcccactccatctcagcagataaggaacattggagttgttacaactagaatctcataaagagaaatattttttggttgaaaatttgttctctctctccttctctcactcgcttgatgacttaaaaaagacaaattataaggaacattggagttgttacaactagaatttcacaaagagaaatattttttaataataataataataataatagaatcccacatacacacaactaaaaaggatactgagctacttaaatagatctaaagacctgaagtaggattgttgcaactttaggaatttttgataaatttagcaccaatcactatcttttaatcccattcaattttaatgtatttgtctatttgataccttgttgaatagcaaacaaaatttcatcttgaaaagcaatacattttgtcataagattgcaacccctagtagtatttttttgttgattaaagatattaggtttattttagagagatttgatgattatatccacagtcatgacttaagggaacaaataggttagctgacagaaactaagaaggatttatatattgaataatcttgtttttggaacattaaattgttatatagattacttatgtttgtaaggatgatgctcagaatctatatcactccacacactaatttattttctttaatatttttttattttcataaaagaagagattttttttttctaaagtaaaattaacacataattgggatggcctctatggctagttggttcacttagaatccaatgtttattggaattcaagatttgtaatagattttcaagtttgggagtgggaggtggtgggtgaattcttggataggaggatctttgaggggataaagtgtccgacttccaagctttaggaggctgttgtgctcaacttttgtcttagatagaaggtgactctttagtcatgtggtgttctcctttggatttcattggtagtttgggttgtactattggatggagagtcttgctttttccattctcttttctttctagtacagtttgagtatactcttaagtatacatggattacaccagtcatttcatatttaacttgagttcttttaaatttatgattaatgaataaatcacgtaacatcaaaattctagcaaccatcagaagagcagcttgggtattttgtgtcaaattttaatggttagatacaatctttataacctaaacaaaaagtggaaaagatggaagatctagatatttttgttgatctccattgttttactaagtttagcatcaattagtcatttaccaaatgaagaaatctcaacccttataaggctgaagaaatgaaaatcaaacttaatttggcatggaacaaaagtgggacatacttgggaaccctattagctattctagcataaggataatttgtaagtttgaaaattatgggaatatttttgaatttgagctcctacttctcaaaagcttagttagttagtgcaaagtagcatcttgtattgcatagttccccattggattggcttttgagaagtcaagatttcctttttaagctgaataataggagctttcaagcctatttgggtagttttattaaagagttttgacttaaaaaatagcttagtatgaaatcgaggaaaatgttgtattttatagaagctaatttctaactaatgtaggagttttttcatatttaatggaagtttttataatatcaattttgcttcttcaaaataataacttcgatttcacttaaacttctagctaaagctaaaaacaagaagcaattcttaatggctcttagtttcgagttgaaaataagcttctagcaaacttgacatgctaaattaatgtggtagactactagtctagaagtgtataattgagttggacactctaacttgactaccggtcaagttgttgtataactaaatccaaccccttagtaaagttggttgaaaatactctatgtcaactccaatcaagtaattgtataattgtgatgtaggacaatcgtaggatggttgaacacaatcaaataagtggactaggatttaattcttttaggatttaagaaggaaaatgaataataaaaattatggtaatgggaaaaagtaaaataaaatataggaaaagtaagataaaggataaaagatggaaacattagtgtcttagaagaaaaataatggagtctcaccattaaaatttgtagggtatgcaagaattataaatcattggtcattcattaatctgattttaaattgattacccttatttgtaagctttagaaaaccttaaaacctaaataaaactatgaaaaaagaaacctaaccaatatagcaacttgttatgactcttatttatttcctaaaactcctaaacctctaaataataagattaaaataaaatagtaactttttgtctaaaattagaaacttaactttataaaaacttcttgtaataagagtttctaatgaagaagacttctagatttttaagtaaactcaaatagaaacttcaaaaaaaaatgtttaagaaattagaaagtttagaaatgtagaaacttcttttaaggagaaatttccaataacaaaacttctcaaattctaaatgcaactcaaacactaattattagctaattatgactctagatagccacattagcagtaaaaaatcacattgtgatggaggaagggcatgaaatgcattagagtttgaggttgtaagattatagttgattttttttctctattttgttaatgaatatattgaaatacattatttaattcttttattgtctttatttttattttttattccttgtttgtttgttttagggtttgattcaatttacatggtgcttggtaaaattaaaacttattgacttaaaatgactttaatttaaattttgttgaatttgttgacttaaaacttatttcttaatatttactttaagtcattaagttgatttaccaaacgtatgcttagtctattgatttttttttaatttttacatattgttctccaatagcttagtataaaatatgaagtatgtttaccagtaatttaatagtaactgatttactttgtcataacttagtgtttaacatttactatgttagtaagcttcattatgctaagtaacaagtaataaataatgactaagtaaatgtttagctgcagtgccattttgattactttggtagcatctagggacttagttttgtattacaggcttatagtatgactaaattggtagggacaacaacatatttagtatttgaatagttgaattttgaattgtattcacctacaaaattttacaattaaggatctacatgttaaaggaatagtggttagaatattgagatgcatgttcaaggaagtagggttgtaacttgtaagctccctctcaagatgattaaggttaggcatgcttgaagcaacacttgggtcatgcaggaagtcgtgtccaatttgtaataaagtttgtattgaagctagggtatatttgatgaaacatactaagggataatggtgaagaaaatttaacggttttggatcttctaagagagggattgttttatggcaagctgcatgcatcgctttaatttgggtggtgtgacgggaaagaaatacaaggattttttaggataaagcaaggaattcagagaacctttgggattctattcatttccttgcttctctttggactttttgttctaaggtttttaaggggattccccttaacgtgttacaacttgattggttagcggtgtgtaatcccaatgggttgacctaacctagagagtttgcttgtttttactttgtattttcttgtatttgattccttgtagttttgtttttctttggtgggaggattcctcatccttttcttgtacatcatttttatcaatatattcctttgtcgtttcctataaaaaaaatgttgaagaaataaagaaaatgaaattataattggagaaagagttgaagttgaagcatggtgatgatgggagatttatttgaaccatgtgatgacttggattggcttatgaatatatggtcaacaagagagtccaaggatacatatagaggaaggaaagatcaatagaggttaggtcatgttgtttagcctaatatgttgagggaggaaattgtgaagctttaagatggtttggtggaagaggagtgtggtactggggtagctcaaatagaccttgaggcttttatccattacaacatccactgtgattgtaatctacaatggattgctcagaatgcatctgcacctaggttgactatatgagttattgagcttcacagagttagagttatgacaacctgaaatcaggagttccttgatataaacttaaaaagcaaacttagtgaaagtgttttcctaattataacgtataatcacctgcctttgaatagtcattgtgattctgttggatacaacccatcttagatgtggttgctgaaggtaggaaaagcctgactagtcctactccttatgaagattcatgaggttaaaagtgaaaagtttgcttattaattcataatcacctgcctttgaatagtcattgtgattgtgttggatgcaacacatcttagaaggcttgcaaaagtcaggaaaagctggagggatcctattccttatgaagattttgaggttaaaaagtgaaaagtttggtaattggaagaagcgataatgcctttcaaggaactttggaaagagggattaccattatgtggtggctagggtggattcatgaataaaaacataacaaatatctgataaagtccaagatggctctaattttccacaaattaagtgatggttctatatgtgcatagtataaatgcaaagtattttctggtctgatagacaaattaatggatgagatcgaaggaaattactctccaagtgggtatatctagtcaattagccaccaaggccttggaaaaaatgttaaatttttttttttaactggtcttatcttgatgacaatgataagaaagcaatgtaaacagtgtattgaagtgggttgagaaaatcaccatgtaaccgcatgaagaaatttccaatgattatgaattctacgtcctgccagtgcaagtgtagaagggtaataattagcaagtcacaattagccatgtatttacattaggctaatatggactaatgaaaaaatacttgtccataaaattatggccaattgaaacattccacaatgaataaatgttcatttgaaagtttatacactgaataaattttcaaaaaataaagcaacttagtgtggttgcatgaggtcctcaattgaggaaggtaaattgttttctaattatatggactaataaaatacaacttgtccctaaaattgtggctaattaaaggtttccacattgaataaattttcaaaaaatataccaattcaatgtgtcacatgaaggcaacaattctaggggtaagttgtatttttattagtccataaacttgcccatgaaattgtggctaattgagagttgcacatcatattttagattattaaaattatttgtttaagtaactttagttcattgcaaagattaaggaataactctcttgtgattgaatactacaaaaatattgtctttgtaactcctagaaaggagaagcccttaaccttcaaggctaaattcagaagacatgaagttgaggagaactttctctccaagtgagacttaagcctcttctagggaggttcaagactttttcaaaaaaggtgtgaagtgtctttgaatcttttatgggaggctccaaagtatctttgaatctcaaaagaaggctctaaaagatctatgactcttcaaaggaggctctaaaatgtctttggatctttaaatgaggctctcaagtgtcttctagtccttagaggaggctctaaagtgtctatgaatcttcaaggcttcaaaagatcttcaaagtttcaagattaacatctctaaaagtcttccttgattgagatcaacctattcaggttctccatcaatgtttttgtgaaacttcaagactctaatctcaaaaggccaaatcaaggatttcactttccttggttaaagttgttcaaatcaagatccaattcaagtaaaaaaaaaaaaaaaaaagctgaaatcaagacttcaaatgttctagtcttcaaattctcaatcaatgttttattgaaacttcaagactcaaatctccaaaggttgcctctatccaagcaagagttttcactttccttggttatagttgttcaaatcaaaatccaaatcaagtaatagaaaaaaaaaggctcaaatcaagtcttcaaatctccaacactcaagtcaagttaggcttgaggctctagtatgaaaatatgaatattcaaaggcttctcaatttgggattagttttcttcaattcctcaattgacaactcttatggaggaagacacaggagatacactttttcttttccctgaaaaggcaatagagattgtaatcctttccaaattaaaaggaaatttttttccaatgttttcctagtgaaaaatgtgttaataacaagaatacatataatcatctttattgcaccgtagagttgtgacgcttaaggaagaattaatatatgttctactgatgcataaaagaacttgaagcggggaagtcaaaaaaggctttcatctaagtgagaatgatcatgcttggaaaaacttttggttgaagacaactgttattactttttctgtttattgtagcacaaatgcacattagcccatactccaacaatctagataagttactaggaaatcgattccttaaaatctgccttttatttctccttccagaattaatacacatacatgcaattaaaaattccatgacatttgtgacaatattaaaaattaaagggtgaaactaaaccaaacatactttatttttggtgtctggttatttttgttgtttttttgtatggttgctgccaattaggttgtccgccctgtagatttttgtgtgctctgtttgatttgatccccaggtgtaatagcaacccttgtaacaagttggggagaaatgagaaagaagaacgaagaaaagaggaaaagattgaatttatcacattcttgtctgctgtattagctatgtcacctgttaggagatagtttaagttgatgtcttacatatttgagatggctatttttgttcaggtagcaaaagtgactgctgaaaaaagtaagactat

SEQ ID NO: 12549 - DNA, 18008 bp, Vitis vinifera
  Intron number 2 from transcript GSVIVT01038453001 (locus G SVIVG01038453001) derived from phytozome v7.0 (chr-ID chr9 ; pos 12666603 to 12684610 reverse strand)
acggtacttaatatgccaaatcaagaagttttcttttgtttcagaaacactcaactacgtgctcataactccttgtcttcatttcgttggcacacaggaaattttccagctgactgtagcatcatttgagaacttgtctgatatgaggagtccttgttattccaaggccgtttcaattcttaagagtgttgcaacctacagatggtgcctggtgatgctggaccttgaatgtgaccgaacaattattgatatgttccaactttttctaaatgtcattaggtgagagctttaattatatatatatatatatgttgtttttcccagtttcagatttaaattgatttatgcataaaatggatttagtgaatgcaaaattggatccttcaattgatgctctctcttgattttaaggtctgaccacccagaagaagtattttcagccatggagactattatgactctggtcatggatgaaagtgaatatgtttcggttgagcttcttagtcccattctagctactgtgagaaaggataataaggcaataatcatcttttgcttgattttatttaattccttggttttcattttaattttataatatttattgacatggtttattgtttgttccagaatgtgtcacctatttgttggaggttgggagagaaagctataaccaactgtgcagccaagcttaggccatatctcatggaagtggtaaaatgcctgggaactcgtttgagtgattatgctccagctgttgctaccatttgccaaaatgaatctaacacccgacaatataatctcaatgtcagtggttcaagggcacatttggtgagtttctcatagttttttgtttcacttccagtgcacgaatttggcctaggttgcataccctagctccatcactaatagatttatgcttcccatagacttgtacatctatattaattctatcttctgtgaagaagccatgttcaacgagatggcttttgactactgttagtttattgactgctatataaaaggtttagtgggtgtaaagtactaccgcagaagacaacagattttaacaatgtgtatttactcattctcaattacattttctgaaataacttaaatttaacatctttgataggaaataaatttttttttgaacaggtggctaaagtgttctcagaagacgttgtctgtcctagagaagttggtccatctggggaagaatctttgaagtcaatgatctgtaatgatgcttctcagacgaaggacacttttatagactacaattcttttgatagattaaatcaacgttctactaggaagaaacttcttgtagaaactgctgacaaacctgtcaaaataacccagaaacggagttggaaaccttattttttggtgaatccagaggaaggctatgattattgttggattgggaggaggaaaagggctaatccaaggaaaataattacagaagcatcatcaatttgaacatatccccaaaacagttgtatcacttaaagtaattttgaggacaaagatactgaaaaatctagtactatggtatagtttgagaatgattgtgtattctattataattcttacaacataagtatttattacaacataagtatgattgtgtaaaataattacatcactttagaatgtaaaagatttttgtgagacattggttgattggaagaagaaagtttggtagccaatagacaaggtgtgagcactttaggactcctgctattataacgttattgctttctattttcttaccactttccttctattattgttctgtttttttcccttcactctattatttgtgtcaaaggggtcacatttagcaccattttcaagaaaattatggtaaacattgttcttgtttatagcatttttagtttataacgcttatgccaatagtacttagattagtttttcatttttttcttttgcaaaaaatcaattatgtttggatattggccaaataactacaatgacctagattttattgtagaacattatagaatttagtcttaataaaaactataaaaaatatattatagattttattgtaatgaccctgattttgttaaaggataatttaagagtgcttaattccataatgaggtttagtgtcttggttaactaaagcatttggttggttaattaaagaagttggttagtttgttaagttaagagaaagacggttaaagagtaagtgttgtttctaagcttttattggtcaaaagtaggttggttgcttagtaactagctagttgagctaagtgatagagatttcaacaggaggtaattattttacttagtcgtgacgggatctagctattgttttgtggtacaagtgaaaaggggttggtctaagtgtgagaaaccagagatgggaaggacactaagagagatttcaaggggaaaatctgaaaacaccttgaagttcagcctctattttgtgtataaaagttgaaatgtgaaggtggtgagggaagtttttgggatagaatttgaaaggcaatttaaaaggaaagtgaagagaaaagttaaaggttgaggttactcaagttgttggataggtagggaatttttttatttttttgaaaactatattttatacgtgattatttataaaaaaacttggatcaaaagtttggttaaatctagttttaaaaatgatttaataagtggtatggtgcatgcatatgtagaaattctaatggtgcaaatactataattattctatgaaatttattgctcttgtttgaagtataatttattttattgagatatgctctgttcttactagaagtaacttcttgatgtagctaagctacatagacacatgctgaatgcactaacacaacttctggaaaaaaaaaaacaaaggcattagtaagggtggtttgaaatgaaaggtaaaaagaaatagagggaatggtttgtgagtgagagtccttagaggaagaagggtagagtatcctacagtgaaagacctaaaaacatcccctaggaatatctatgcatggattaatgggggagtatggatgcatgtaccttgctgagagcctcaaatacttttaagttaataatttttataggtcatagaaatgaacttatcaagggaagtatatgatttgaaaattgttggtttgtatgattatacctgctattattgagttaaagttgatgttacattgaattgttgccttatggtgtacaagatgttttataaattttattgttaaagttgattccttttctactaagctatatctcattcttctctttaaaattactttcaaactaagttgcagagatttaagaaggaaatgaacatgtatgttatatggagaaaaatagatgttttcttgtttcaaagttgtttaatattaatagaaaaccaaacttatataactatatggcatataaatgacatgttagcgcacacacaggttgcacgacatatgtggcatgcaacccgtggtcgcaatggcatgaggcatggtgcaacctatcctttaccaatgttggcacgaggctggtcaaccttgttcatggaggtgagtcaatgggccatgagtgcaaagttatagcatgctattgtaactaaggaaggcctcaacatggcatggtgctactgtagtaatatggatgccttagatgggttcctaatgtgttacacaggtgcgtaatgccctgtgcatgggatagacaagccatgggcatgcaatgccatggcatgttgttacaccaagaagggtcttggacacgagcatggtgctgttacaacaatgaggaaggtatcaaatgcattataaaagtaaggcataagggtgcagtgccctgtgcacatggatgattagccatggttgcaatgctataacacatagttgcaaccaagagagacttaggcatggcatacgagaagccagaaaaacaatcagaccaatgtagagatgttggtgcatggctgacacagctaaggcatggaagggccatgcaaaaatctagttcattaagcaagaacaccaccaccttggtatcatgggcacttagacatggtataagggtgctctgtggatatcagtgtgtcgatgtgcactgatgcattagagagatggctgaacacatgggcatggtcaaggcaagatgattgacgtaggttggtggcatgcacacaaggtgtttaatgtgggctaactcacatgaaaaagggttgaagactagattggcaagagcttggctcggaagaagagaaccagacatgaccttaggctaattggatcaaagaaggatatgtgtggctgagtgacatgagatggttacaaaggcacttgttggcaaaaggtactttgtaaggataagacagggcttagcatgaaagggaacattattggatgcatgaaaagacacttttattaggaaggagtatccttagttgggtggttgtgacaagttgcataaccattagttaagctcctattttgaattcaaaggtttgaattcaaaattcaattgagaaggctcctctataaaagcctttgcattgtagagagagactaagagtgagtaatctagaaagaaagcaaactatgtcattgtctttggtttctctaattagacaaaattgtacaagtgttggtatacttaaaaagttttgtaatcttttagttttaaagtcaaatagaagttgggaaggttcatgtatctgctatgttgccttggttacatttgcattacttttgttttgggccttcagaaaggttggctaagatcggtgtcttagcattgcacactcaggaaaaaaattggtggctattttcaatggtgtgacaactaaaaccaagtacttcgacctactcaaagcctatgaatgggaaacaaaccataagtcctcaaagcccatattgaagaacaagtatggtctttgcttggagctataaaccacagacaacaaaaagaagagaggtcagaacctagctaataataatgtgtgaatgccttgaacttttataaacctccaaacgacatcacgtcacttgtcatcaatcattttcactagtataattcaggtgctccttcatgagtgagatcataaggataacaacattagatgcttgttacaatgataatcaaatcgaaggtacctacaacctcttaaacacattcttataattaaaaaaaaaaatccaaatcaagcaattatgttttttagttaaaaaattctcttatgttgatatgagaaaattacatattcatatgctcataacttgtcttcatcattcattagtatactagaatttttctagctgagtgttacatcatttaagatcccagttgatataagagtcactatcattctaagctaggtgatgctagacttttagtgagaccaaatgatcttttatatactccaacatttcgtaaatatcattagggtgagggctttaattatgattttcttatttccttgtgtatgtcacgaacatgatatgggagataatattgggcctacaaaattgaacttatatgttccattttgcaaatgttggtttattttgattgagagcttttttttgtatgattttaattaaaacgaaaaattaagttgattgtactacaactaggtgatgacaaatagatattaaaaacaatcacatgaaagcacatagtagatttgtctggtgatgaatcaaaatgatattttttgacaacaaatagatagattatgttcattagaaaataacatgatgctaatggaagttatagtattgaggtcccccttagttttgacttaattgaattatgaatgaatttatggtggatgctggtcaaagatgctccagtttaacaaatacaaaaaacatatctatataacaaacttgaactttttgcacatttatgcatatatatatatatatgctagttttataagtgttggaaagtatactttaagtttgggatttaactggagccaaacatgaatgatgataataataataaaaaacatttgaagattagacaactaagtcagcttgaaaccataataataagcatttaaagattatacaactaagcaagtttacaaacatacttcatttgacatatttcatttgcaaaccaaccaatgcaaaatgataatagttttatggtatgttaatacctttcttagcctaatgccctgttcttttaatggacatggtagcaaaataatagaaataataaaattttttctacctctaattattgtaataaataatcaacattataatattttatctttaaaatatttgaatatgaattttttcaaatctaatgattttttttttaatatttataaaattcaatttggtttttcaaaatatattttaatttttttttcatattttgccaaaaaacttaaaattaatcaaaatgtttaaaatatgtaaaattatcttaactttaattgttcaataacatcaattatcaagaaaatggagacactaatttcgtttatggtagaaatattttaagaaacacttgaacaaaatttctatattgacaaaggtaaatgtgatgggataaaatgaaagaaataaaatcaagttattattattttttaaattttcttagaaaaacacaaaatatctcttaagaatcaaatataattagagctttaattttattttaccttttatgttttgctttataaggaatgaatctttataatgtgcctccaaataatgaaacttttggctattgtttcaaccaacctagtctcaaaatctcttaaaatcaaaaaccctaattttctatttggttcctatgaaaatcaaataaacgaaagataaattttcacaatctcaatcaatatgagtatcaccttctttcttaattgtttggccattaaaccatctcaatcgccctatcgctatatattcttctcaatctctcaatttcgctatctctaaattatccctcatgcttgtgaatccctcttcttctttttctttttcttcaacctttatgagcaatgtgtaggctctttggtgaagttgcacatatcctctacttggatgcgtctcttactaaggtactatccaatttttcttgagttttcaattttttttttagcttaagttgtgatttttttttagtatttgataaattactcttgatcatacaatataatatttacgagctttgaaaaattgtaagagtttaagtctttattggtgaattcattgcttttacattttgactagtggatgtaaattcttcagtttcattatggttttcgatatatgatattttggatgaataagaagccaaaaattaataaaagaaagaaaagataattttcataacatttgaaacccattggaactcataaaacacagctaacaaatgttcgattaagtctacttcctaatcttgcaggtacatttggagaaattgacaccacattagctcaaatggtgaaaattaagttccattttgttttttatataaaaaatctattcacttaggaactccatgcatatttaatttcaatatttttaatggctatcatattttttaaagtgtttttttttctttgtggtcaaaacccttcaatatgtagactaccaacatgagataattatggattatagtagtgattagaggttcataacaaaatttctctaatcttatgcccattttaataatttatgctcatgtagagagtacaaaatattatttgattcacaatttcttataatttgaagtaccactatcacaagaatgtgataattgtattctaggacattattgtaactaaactagaagcacttaaatgatagaaattcagtttaagaacacagtcaaactctagcctcatttaatcttattttttatttttaatttctttttgctttatttattttgtttacatggttattagtgcatatatatttttcaataattcgcacaacaattcttattgaagctagagaatttccttagaatataattcaagaggtgacgataaaaaaggttgttctacttaacaactctaaagcttgctagagtgttacaaaaggatgccctcgtttcaagggaggtgaaagaaatgtgcaagcacattcaattatggaagcttggaatcattctcatttcctatgcaagagcaacatcctcaatggtttggacaacatagtacataatgtgtatggtcatgtaaatactacaaaggaactatgagagtttcttgaggaaaaagcataagacaaaggatgttggtttaagaatttcatagtaaaaaaagtttaggattacaaaatgattggctctaagatagtcatgagtgaagtccaagagtaacaaagcattatgcaaggaatacatgtagaaaagaagtattgagtgacttttttttttttttttcaaaattatagcttgaacagagatacaactccatatatatgagttatggaaaggataaagacctttttataatttagtggggtatttagttagaatagttgtctctaaccctatgggggttaatgatgaaaattagatatccaatagaaaggactttgaatctattagtgattatgcattgatatgaaaagagaggtgatatcctagaagttcttaaaacaaaggtaaattactagatcctccatgagatctaaatttttaacattagacaaactaggtctagaagatgcacaatgactttgtaatttccaagagggcatataatgctagctaaaacctatgctcaacatcaacatatattgtgataatcaatctgttcttgaaagagcacaatatcacatgaacaatggtaaatctcaacatttgttaaaaacacaatactatgagatagttactttcaaatgaaacgcttgtggatccacttaggtttattaagagatcaagttaactactcatcaaggggatgagataaagcctatgactgaaaatttttcataatactaaaccaactagcttactagagatagcaagatttaggcataaagggacaacttaggtatgaataaattaaagcactagagatattatctctcatacatattcctatgatgaaatagctttatctacactatgagttaggctaagatttgatgataaagagttctatttgaaaaaccatgtggagtatgatatgcttgcttttaaatgatattgttttggggttgagattctctaaaacgctcgttaaaacttggagttgttcaaggctaaaatatacataattatcataataaatgatgtctgagaagtagctatgtgaatactattatcatggtttaaatataaaagtttaaaagttcaagacatcacactatttgatgattttctagtaaatccaataatatttcactaaagaaattccaaagccacaagctacctatatcctaatgcaacttctatctaaagaatactttctcaagtgtttacatgtcatttgcatatgataagtaaatttccttttatgtgagggattgttggaaaaaatggttttttaaataatgataaaaggataactttgaactaaaatttccttgaaaattttaagatgggaccaaattggaatgcattcatctccataagtagctgaatgtaatatattgatatgctaaaaccatttatgggtgcttgagaaatgagctcaaaatgacttatatattcatggaaaatgttgtggaagaaagtatcccacatatgaaggtcactagctagaagaggattataagcattttgtaagcttaaaagaaacatggacttgaacttgggctcaaatacacgtgggcctaactatatggttatggatttatgcttgacttagacccacatgcctataggtttaattgaaatgcccatcaacatgaagtgttatcttttctgtaaggcacatgccagacacatctacatctataaaaagggaacccctccatgatattgcgccattctaacaatcatctatctctccttcttttccaagtcattcccatgtgtggtattccattccaaccaagtgtagtgttgttccatttcaagttattcctaagtgtgatattccattttatttgaaatgtgagttgcaagtgtgtagtttcaaagtatctaaacttttgtatagagtacaaaacattgtttgattcacaatttttttttttttttttttttttttttttttttttttgtgatttgaagtgttactatcataagaaagtgaccattggatcttagagatgattagacacactaaactgcaagccacaccttagcatggcttatttatcttaagatttaacattttttttccaatctcatttaataataattaatttttatcttttatcttttgaaaaattaaaattttaatgggaaaagtctatttttcttattataattatttttaaaactccttaattatttaaagtattttttgtcatcatctatctatctatctatctatctatatatatatatatatgaatagattgcatgataagatgaatataaaaaagaatcatatatagattcttagtgtttttgagataaaactaatgatcgtagttagaagaagttgagttattccaatttttgaaatgtttaaagaggaaccacatatcatattaatatatgtataaattcataacaagatattttagtatcattggttaagtttaaatgttcttcctttcaataatttttgtggcagtcatttatcttaattctattaatatattaaattagaaatctttatgattctagttaagctaaattttcatatttctgcttataatttaggtttggttttttatgaaatgcaagtgcaatggtatgagtggagtcggaaaaaggtatatatcttacatatttatttaatattttattagtttttgtttattgatttatagaagttgggttttcataatgttatgttttctaatataggtttgcttttattgaattgaaaatgcaacaacatgaagctagtggggaaaaggtacaaatattagatatttatttttattattcatttatttattgttgaaagctgagtaatggcaagatgtttggtaatactaaaatagacaatgccaaaggttactcttcttacttcacaaaatattttaaaattgtactttgaaattttatttttatcataaataaaataacatattgttagtaattgttttagttacataattcaaaattgtaaacattcatacattattttattaaaatgaactagtttgaattgtatcattgaaaattttttatccaaaatttaattggattttcataatttttttttataatttcttttatttttacaaataatcattttctttttagtttcaaaattcataatattatattaagtagctttttgtaacttttatttttcataattcagccattcatcaaaatcatcacatacatgaaacctctctatcttttacgatattaagttttgacacattttttcttttaggaatctttctatctctacaattattaactgtatcatttttattttattttttgttttttttttttttgtgagttcatgaggcttgttctatcaattgatttataaggaatacatgtgtaagtactcaatagtagatgaaacccaatattctatataaatttgaaaaaccgaaagtccaataggggttaatgggtgatttaaaaattttcaataaaaatttatatgttatacccaattcttttaccttacaagattttaaggataatctattcaatcaattgcaggcaattcaaatagaatatcaaatataaaagatatagaaaatgagacacaagatgtttatgtggaaaacctcacactaattatggagataaaaaaaaaaaccacgagatctaagatccactaatctaaatctactatttgaaatcaagttacccagatttacctgaccacttttccttaaagacttgctctctagtacctacaacttgattcacgtccatgatgcagtaaccttttattacttcccggtagatccttcaaccaccatgaagggataaaggtcttgaacccaagattcaaagaacaatccttgaatgagagatcgagaatagtgtaacactttaggctttttctcaaggagatcctttccaaggaataaaatgtttctaaaaacaatctcaatgtgatctctacacaatttctccaatctctttgccctttaggggttattagggaggtctttatagacaaaagcccgaagagtcttgattttggatggtttctcgattgaaattgtgtgaaaatctctgtagaaattgcatgactgcttgagccaactcatggactgcttgtgcgcctcgagcacttgagtgatcatcagtgcttgagcgatccaggctgcttaagcactctaggctgcttgagcggtcctactctctttcaaaaaccaaatttaaattgttttaagttaaaaaaaaaaaaaaaaaaaaaactaatccttttaatacctcaattacatagtctaatctgctacaagtcaaaccactttaaacatacttgtgacttgtttaatcatatatattttgtacctaactctctacctcttctatatttaactctattattaaaaattttaaaaggttaatgttggaaatcaagccagcatcctctgtttacttccctaattagtgtaatgtacagcctttattataattgatttaggagtaattctagcaaggtagtttattcactttccatgtaagagtagtttattcacttcccatgtaagagtttattcactttccatgtaagggaaattccattccggaattgtctcatatccgtaggctatttatttatgctttcattcattgtaaagtaagggatcacagaatgaattgaggtgttcctccatattttgttttcaaattcttcatatttttcttcaaattcttcatggtatcagagcaggtttaatcctgtctcatcgtcttcatctttagtcagtttttttactcaattctattcttctaatttatgcctaaatacggtccagcctttggaatggctaccaactcatcatcctctacttctgatatcatcatctcatcgtcttcatcctctcatcagatggagatgcttcagaaactactgtctcctcttttgtcagtacagtcacaaactggctcatcttccaaccaggtcattggttccggaaccttggctcacaaaggtaattttttgagtgccttcactgctggtaagaaacgtaaaaaaccttggatagtggactcaggagcatctgatcatatgacgggagatgcgacaatttttgatacatatagctcatgtccaaataatttaacagtccgaatagcagatggttcactatcaaaggttgccggaacaggttcagttgtgctatcaagggatcttactctcaactctgttctccttgttcctaacttggactgtaatctattgtcaattagtaaactcactaaggaaaagaggtgtattactaatttttcctccactcactgtgaatttcaggatttggattcggggaagacgattggcaatgctgaggaatgctctggactctacatccttaaggagtgccacgatccacaagaacaacctcaaatgacagttggtagtaattctttttcggtttcatgtcaaaataacgatagtgcaattaggttgtggcactatcgcttaggtcatccaaatgttatgtatctcaagcatttatttccttcattatttaataaaaatccaaaatcctttgagtgtgaaatctgtcaattatcaaagcaagtccggtctcattttcccattcaaccttataaagagtctagtccattctcaatgattcatagcgatatctggggtccgtcaagaataaaaaatgtaactggtactaggtggtttgtctcattcatagatgatcacactagattaacttgggtattcctcatgaaagaaaaatctgaaacgagtcaaattttcaaaaattttaaaaatatgatttagacccaattctagtcaaaaatacaaattctaaagtctgataatgctaaggattatttcaactccattctaggagaatttctagcacaagaagggatagttcacttaagttcatgtgttaataccccacaacaaaacggaatcgctgaaaggaaaaataggcatttgttagaggtggctagatcactaatgttctccatgaatgttccaaaattattctgggggcaagctgtccttacgacagcctacctcatcaataggatgccgtctagggtactaaaattccaaacaccttgtcaaacactcctaaaatcctttccgactactcgtctcatctccaccgtcccacccaaaattttcgggtgctctgtctttgttcatatcaatcaacaacatagaagtaaacttgatcctaggtcactcaagtgcatctttcttgggtattcttcaaatcaaaaagggtataagtgttactctccggtcacaagaaaattctacaattcaatggatgtcaccttttttgaaacccagccttactatcccaaaaacgatattcagggggagaattcaactcaggaatatcaattttgggatcttgagtcattcagtgagtcacccatcaccactgaaaatcacattcctccagagtcatttaatcaacccgagtccattgttgacttgtgggataaggagcacatccaagaggaaacggaggaaagagcactttctcaacaaacccatgaggcagaaccgggtcctaatccaagcaaacttccaggtaacaacgctcctgatggtactgttgattctgagttagaaaatgatattcttaatatgcccatagcttggaggaaaggagttagatcatgcactcagcatcccattggaaattttatttcttatgataagctatcacatacgtttcgtgcattcacttctagcatcatagagatacaagttcctcagaatattcaggaagctttcaagtatcctaagtggaaggcggcagtcgatgaggaagttcgggcgctggaaaagaatggtacgtgggaaattactgacctcccaagaggtaagaaaccaattgggtgtaagtggattttcacagtaaagtacaaggcagatggtaatgtggacaggtataaggctcggttggttgccaaaggattcacccaatcttatggcattgactgtcaagaaacttttgctccagttgccaagctcaatactgttcgtgtacttttatccttggcagctaatctcgattggtcgcttcaccaacttgatgtgaagaatgccttcctcaatggtgacttagaggaagaagtttacatggacattcctgctggacttgagacgacatcaaatttcaacaaggtttgcagactccgaaaatccttgtatggtctcaaacaatctcccagggcctggtttgaacggttcactaaggtagtgaaagggtacggattcgttcaatgtcaatccgatcacacattatttgtgaaacacttcccagaagggaaactggcaattatcattgtatatgtggacgacataattttgacaggtgatcatgaagagaaaattgacttacttaaaaaattattgacaaaggaatttgagatcaaggatcttggaaacctcaagtactttctcggaatggagattgctaggtcaaagaaaggtatagcagtctcacaacgcaaatacgttctggacttattgaatgaaacaggaatgctaggatgcaagccggcagaaacacctatggatacaactgtcaaactggaagaaagtgatggaagtgcgccagttgataaaggaagatatcaacgtcttgtggggaaactcatctatctttctcatacaaggccagacatcggcttctccgttagtgtggtaagtcaattcatgaataatccaatcgaaaaacacatgactgctgtgatcagaatattgagatacctcaagatgacaccgggaaagggtctcttctttcaaagaacaacaaataaagagattgagattttttcagatgcagattgggcaagttcagtgactgatcggagatcaacttcaggctattgttcatttgtctgggggaacttggttacatggcgaagcaagaaacagtcagtggtagcccgtagcagtgctgaggcagaatttcgtgctatggcacaaggtatctgcgagggaatctggttgaacaggctgttagaagaattacgggttccattgaagcatcccatggtgttatactgcgacaatcaagttgccatcagtatcgctaagaatccggttcatcatgatcgaactaagcacgtggagatagatcgacactttatcaaggaaaagattgaagaaggagttttcaaagtcagctacactccgacaaactgtcaaatggctgacattctcacaaaagctcttgctcgagttaacttcgaagatctgacagaaaaacttggaatgatcaacatctacaacgcggcttgagggggagtgttggaaatcaagccagcatcctctgtttacttccctaattagtgtaatgtacagcctttattataattgatttaggagtaattctagcaaggtagtttattcactttccatgtaagagtagtttattcacttcccatgtaagagtttattcactttccatgtaagggaaattccattccggaattgtctcatatccgtaggctatttatttatgctttcattcattgtaaagtaagggatcacagaatgaattgaggtgttcctccatattttgttttcaaattcttcatatttttcttcaaattcttcagttaaaaaaaatattaaattgtattaagaaaaagaagtttctgcggacattggatgtaaaagaaacaagaatgcgaaaacaaaaagggtaggcatgtaaattcaggaaaccataaaaggccagcccacagtctattcataacagcactggcagagtaaagccacgtagaggcacactggcaagtgagaacagcaatgccgaacttcaaatttctgaattaaagagaaatttataaattgggcagaatccgaaagctagggttctctctataagagattttgtttgcattatcttcgatatcttctaggctttagatttgtatagagatggcttctgcaagtaatgggtttgaagcaaagctaagagatgttgggaataggcttctgcaccctccatcttctgctgataaactcttgcctcttcttgaagtaactctcttgctttatatatccatatatatatgtgggtggtacaatcaacttttgtgtgtggcatggtgtttttaatctttctttgttgatctataaagtgatcgtttcatatgcgttttcattttccatcaaatgcctattaagtggatcctgtttttatcctactgaattcgttgatatttttttcttttcttctgttgaattaattgcctattagatcgtttcatatgggtatgctatctgtgggataatgattctatctttatgggtaatccttttccaatgacttgactgttttctgcttattagttgtgttgagtgtaacaataagtttttgtgaattgattcatcctcttctttcaatgtctttcagaaggctgagtcttatttggcaaaggtggaacaacaaccatgtatgtcaacaaagattgcactttcacctctcatggaagcattggtcacagatcaaatcttgaagcatggaaattgtgttgtcaaagtgtcagctgttgcctgcataagtgagatcacaaggataacggcaccagatgctccttacaatgataatcaaatgacggtacttaatatgccagacaagaagcttttttttttttgtttcatcaacactcaactacatgctcataacttttcatttcattggcacacaggaaattttccagttgactgtagcatcatttgagaa

SEQ ID NO: 12550 - DNA, 8140 bp, Vitis vinifera
  Intron number 1 from transcript GSVIVT01036907001 (locus G SVIVG01036907001) derived from phytozome v7.0 (chr-ID chr2 ; pos 17856058 to 17864197)
atatctgtgtttgaacacacaaaaaaaaaaaacaagattcttccacatccctttcccatccccttaaagttgaaaagtaatactgagaaagttgaaatcatggagctcctcacatgacccttgcatgtgtaaagataccatcaacaattcaaggggcttattatcatctcaaaactgccatgatctttcattttcaacctctccaatctcatagaagaaaagggtcaaactcaaatccaccaagcatatcaagaaacgaagcaatttagtgatgatagcaagaaaaagcctactatgaactcattttcagctagacaattttggggttaagcaccggtttgcccatcagtaataaaggcaaagatcagttaatactggaatggtatgctaatacaaggacaagcacatacagagctctggtaaggcactataaatgcgcctctgcagaaaataaatatgagacaatgcattacatgcagggcatgccaatggtggtccaagggagacagatcccatcaaatttatctcacaacactgtagatgaaattcattccccttttcgggtttcttttcaaacagttcaaagcagacaaagatggataggagctcactctcttgatcatccaagtcgaggctgagctctctttcccatgtgcaacatgcgagtcttctcctcctcatcatcatcatcatcttctttgtgatattttggcctgcataaacccgaaaaaccctaatgcattccagtctatcaagcaaactaatttatatgccttattttctgatttgatactttgttaagacagaatgcataagtactttttttttaatccgggttttcaaaacccgaaaacattgggagattaggtcatttgtagatgactcaggcagaaaattgagtcaaagaacagacccacattgctccaatgagcctgagcgcatctgatcacaacttcgaaggtatgtgattcgcccattgagcttcctccatggaagcgaccacggtaccatagcatacaccacatggactggaccaatgagaggcttccacgtcaccaaaacgtggagcacttttgtttcgcgatccaagatgtttactgacgtggcagtcatccattggctgcctcgatttacgaccccattgaaatccgagttgacacggatccaatgactcttgaactccgagtccagctgagcaggggaccgagttgaaacataattccatttcagagctttaataaagacatagaaaaatcaggccattctcagaacttgaaaaggatgttgaaaaatcattccatttttaacacttgaaacaaacggttgaaaaatgattccattctcagaaagaatctgtagagaatcatcattccaccttcaacatttcgaaaaatcaccatcctcagggaaaaaaaaaattcaggaaaatatgtttgataaaaaaaaaaaaatcagatcttttagttatttttactattttcacttgttttttattttaaaaaataattatacaaacatataaaaggattaaaaataaaatattagatcaaaattatttttaaaacatattttaaaatattaaaaataagttaaaaaattggtttccaagtagacttttattttacaaaacttcaagggcatggtaattatttttgaaaacgattctaaaaaatatttattgagaacaaattttgaaaattgttctctaatttttatagaacaaaagtttgtttaaaaacttaaaatatttttaatttatttttaatttatttttaaatatgttttaaaaataatttttatatctaatgttttatttttaatcatttcacatatttgtataattattttttaaaacaatccttagaaaaaaataaaaataatatttaattattaaaagatgttttatgaaaacaccatatttttcatttttaagaacaaaaaacaaaaaatattttttaattatcaaacttgttttttgttccgaaaaacagaaaactattctaaaaaacagttctgactcattgttttcaaaacaaattttcaatatatatatatatatatatatatagaagttaagagaaatttttttgagaataggatccaaacataccattaataacttattttattttcaacatagataggaacagtggcagtcacaccaacataatggtaaaacagcaaagaattgaaaaggatatcaaattcaaaagtccaatgacatcccttctctcattaccaactactaaaaataaaaagggaaaattatgttttcaactctgcaaaggcttgataattatgtttatactatacatagagtcttattgctttatactttaatctaatttgtttatattttagtattattatttttatttatttatatctttatttaatgatccaaatttcatcatacattttggtgtcctagatctcgacccatgtaatagggatggattcaataacttaatatttcgaaaccattaatctaataatgatatatatatatatatattcatttcctatttatatattcctctatcttatttatttatatttttgtatttaaattttatttatttatatttttattgaaaagattgaaattaaccatctagacttagattcaaaagttataagtagcttattattttccagatgataaaaatgatttatcttatcttttagatagatgagatatcttatcttttagatggatgagattgagatttgtggtatgtaaaatgggagtcacatcaacataatggtaaaacaatgaggaatctaaaaaggacatcaaattcaaaagcccactgacatcccttgtctcccattaccaatcactaaaagtaaaaagggaaaattatgttttcaatcttgtgtaggcttgataattaaggtaaggtcctctaaccacccatagatgatagacttgataaataaggtaaggtcctccaaccacccatagatgataaggatatgagatagtaattgacaaaaatacccacttgaattatttttgtctttattctaccactcctcacatgtcactattattttttatttaaatttttttggatttttcattattttttaaaactttttataaataattgaaaaatcaatattattttttatttttaaattgtaaataaaaaattatattaatgattcaaagactattttgaaaaatacttttttaaaaaatattaatttaaataaataaaaattatcttttacatttatttttatcttttacattttagaagtaaataatttaatgattaaaataatgtttaaaataaatatattcactattttaatttcttttatactaaaaagtattttaaagttttttttttactattataaaataaaaagtttaatttttttttaaattttcttccttctttattttaataactttttgaatatgacttttagtaagaaattatatgaaatgttacaaatttgtttattaaggatttctttaatgatttgaattaattgaaaatttattaaaataagaaaaagaatttcaaatatatataaatactataacatattttttcacataaattttggtcataagaatttcaaaaagttggagaataagtcagataggtttcaaatatatatatatataaatacataaagacaaatttaattgacaataaaggaaatcccttagataatgttttagattttttttaaaataaaaataaaaatataaaatctcatctaataatatatcttaatattataccatttaaattcattatattcataatataaatgataataaataaaataaatcatttaccattgaaaataaataaataatcttaactaggtagtatgattgaaaataaaatcattataaaatctaaccaataatgaaaatatcaattttgacaaatatatcgataactcaattttataaatatatcgataaatattttgacacaaaatatagttgagacaaaattttggagaattttttttttaaaaatgatataaaaaataataatcaacattttaaaattgtcttattgatatattcaacaataatatcacgtatatgagtaaaaaatatgaattttataagtatacattaattattaaactacattaaatacccacttgatgcctctttgatagatgagattgagattggtggtctctttgatagaaacaatgggagtcacatcaacataatagtaaaatagtgaagaatctgaaaaggacatcaaatttaaaagtccaatggacatcccttgtctcccattatcaaccactaaaaataaaaagggaatattatgttttcaatctcgtatagacttgataattaaggtaaggttctccaaccacccatagatgataaggatatgagataataattgacaaaaatacccacttgactcatttttttctttattctaccactcttcacatgccactattcttttttatttaaccatttttggatttttcattattttttaaaactcttttataaataattgaaaaattgatattattttttatttttaaattataaataaacaaaaattatattaatgtttggaaaatactttctaaaaaaatattaatttaaataaataaaaattatcttttacatttatttttatcttttacattttagaagtaaataatttaattattaaaacactgtttaaaataaatatattcactattttaatttcttttatactaaaaagtattttaaagttttttttttactattataaaataaaaagtttaattttttttaaatcttcttccttctttattttaatatttttttgaacatgacttttaataataagttatatgaaatgttacaaatttgtttactaaagattttttttaatgatttgaattaattgaaaatttattaaaataagaaaaagaaaaagaaagaaagacgatggatgaagagtttttattttaagtactcaattaaaatgttttcatatgacttaattttagaagtgaattatatcaatacttggtagagattgaatttttcttatataaaagggttgaaaggtatatttacttattttaaatgaaaacaagtagttaaaaattatatagattatatttgagtttggttttaaaatatttttctagtttttatttttatttttttatttttaaaaataatttttattttttatattgtctctttttgaaaatacgtttaattaaaaaatgaaaactatttttaaaaataaaaattgaaaaccttgtttaacactattttttttatatgaaaataaaaaaataaatttatttattcatttattatgtcactgtacaattgtattacactaactgtataagggaaatgtactaagtgtacaaggctaccatttgtgaaagattataatcgattatgagtcattcctttatttttcttgtcatttatgtattgtacacatatgtcatgcattttatttaattctcgcatgaaaattcatatacttttcccaataatgatatttggggaaaatttttttgaccttaaatcatccaccatcttctcaactaaaccattggaaatatggttaacactcctatatggacacataacttaagaggaatatgaaatttgtatcattatacaagggtattacactaactgtacaagggaaatgtactaattgtacaaaggtacaatattaccctttgtgaatgattttaattgattctaaaccacttttttattttccttgtcacccaaggattgtacacatatgtcatgcactttatttaactatcacatgaaaatttcaatattttccccaataatgatatttggggaaaaaaatttgatcctaagttattcaccattttctcaaccaaaccattgaaaaaatgattaatacacctacatggacaaacttatgagagacatgaattttgtgtcattgtacaaggatattacattaattgtacatgggaaatgtgctaagtgtacaagggtgtacaaggcttctaataggttttgtacgatttttaaacaacttgagtttgacattaagaggattattgatagatttttttttttttaaccaaactatgtcattaagacattccctgcaaaaattaacacataggaaataaaattaaaatcaattatgtttgaattgctcattataagtaaactaaatgaaatatatatttttactattgtgcctttataaacataatttcattgttatcaatagagatttaaaaaaatcatatttaaatggaattaaaaataaaaaaaaaattatttttataacaattttatttttttaaatcattaatttaaattatgaaattagttttaaaattaaaaatatttgttgtaattatagttttgaagattgcatgatttttatcttattactttgaaaaaatttctttaaaaagaaagtatttattttaatggttttaaatatttaaatctttattaaaaaaatatttaggattagtgtggagagcaattaggtaattttggaatgaagaaattttgaatattttgaagactttaattcggccaattactctatttacactttcaaaattattggaagatcggcaaattaatcttagaaatattgtcttcttgattaatattatatatatatatatatataatatgcatgtgagtgtttacattattttcgaaataataaacaccatgtgtctaatttgcaagttataaaaaaataataataatattttatgaggtatttaaaaagtatttattatatgttctataaatttgaaaaaaataatatttgataatatctaatttacaagttagaacaaacaaataatactaaaattttatgaggtgtttaaaaattatttaatatatatgagaaataatataagtttgaaaaaagaataatatttgatgaggtatttaaaacttattcacttcaaaaatgcatttggcaataataattttttaaccatatttcatattcaatttgatgaagaaaaatgattatggttccactattaaataggtaagagaagggtaaaagagtcaaagagagaatgagaaaggtgaggtgattggttagttttttcgtttaatagttaagggtattttaggaattttttaaagacaatatccttcctctcaatttctactctttcattgggttttgagtttaattattagtgatatgaggaccttacctcaattacccaatttagttgggctgaaaacacaactctcccacataaaaatgtgtatttccatacatacatgtctaaaataataataataataacctaaatttagaaattttaaaatttaaaactaaatttataaaatctaaaatttaaatttaacatataattaattaattaattaagatttgtaattaggattttatgtaggtttgtattttatgattttttttttctttcaaatgtatagatggaaataccatgtagcatccaaacttgaaccattgatagcttaagacttgttttaaaattttaaaaattattatacaatattttgtaaaataaatgtttgtttaagaatctaaaatatttttggtatattttttttacatttttaaacatattttaaaaataatttttctatgtaatgttttatttttaattattctttatatctatataattatattttaaagtaacttttagaaataaggaaaaacaattaaaaaaatattatctaaaaataccatatttttatttttaagattaggagttgctttcaaattttttgattgtcaaaattttttttaatagaaaactgtttttgaaaacaattaccaaatatcatgtaattttttaattcaaaaaataaatttaacaaatttttaacaaaaaaaatcaataatttattctaaaaagtattactttttaaaaagtcagacacccagatgggttagaaccttttgagagaagagtgaataggctcgtttcagctcgcgtactcggttatgcggagggctttttatagtgctcaggagggagtcactatagtgctaagttgacacttgactttcaccgcaatgatgacaatcattacggtttaggacggctggcaggtgcttgtatattactacccatt

SEQ ID NO: 12551 - DNA, 10246 bp, Vitis vinifera
  Intron number 6 from transcript GSVIVT01016246001 (locus G SVIVG01016246001) derived from phytozome v7.0 (chr-ID chr1 3; pos 5952889 to 5963134)
tcttttgtttcaaggtcagtttacatccttttgtacattctgttgactttgttttgccatagctgaagttattctgttcatgttgctttagaaactcaaacctgctagattatatattagttgaacgatcatcgagttccttaaaattagatgtaaccttccctatgcaagtaagaattcaagttgttccttcaaagactgatacagttaatgtgcttttagatttgctgaaagtaggaaacataattttaatttgcataccatattcttatactggtccctgtcatagttttattttcttacccaaaaatagactgttttatgttgtgaacgttttccattagatatttgttattaagacctctgtccttattctcttcagtcccattctcatatatgaggttgggaatattgaatcttatgatattggttggaattattgatgttggtacactttttattctttattctttattcttttttaaacctatttcaaataaaaatatttttacattgatttgttgggagggacagttcaggccttctcagttttcacaatgtcattatatgtctcactccttggtagtacctgcaaatttggagtaataatttacttgtagtgatacagactagctagcccttagcatgtttttcttagagcttgaagatcaaccaagaaaggctttctggttatcttcgaaggtcctgttctgccatctagtgtgatgctgacatcagcacttttacgggctactttcatcatgtaaatgcaggggcagtgctttctcttgtttgtatagctctgtgcacaaaagctacttttaacaaaattttcaaccctatttctattttctattttctatttttgatgtatagtttttagatttgtttaagaagttttggcaaaagctggagattgcttgatttagttagggactggaattcttactgaaactcgtgttgaccttttaaggtgctgcttacctaattaccatgctatttttggtttttcaacctccttttttctgagctggtgattgctaataacgtgtgtaagatttccgaggttcaaaatttactggaacttttgactgttagttcctttgattgggctgatgctctaatacgaggaaattctctactaaaaccgtcaagcagctcattttatggttgtatttattgtgtggggtacttaggaagtgttgaatatattattgtgagcttgtttgcatgggaatgtctatcaacaattatacgaggcttttcctcaagggagaaattgcagattgtagataactgcatttagctaaatggtttagttatatataatggcatagtctgcaaagttgtacattgaaggttactgaaattttgaatttaatattttggttggttaacttaatgaagcttttgtaggatcaatgtgaaaatatgtttttcttttttttactttttgtttttttcttggggttgagtgggtgggttggggtttgattagcacaaaatatgaatgtgatgagggtgaatctccaagatctagccaagaagaatgaaagggagtaaagaaattccatgttactctatcaagggtatttagataaaatttcagttttattaggttcataattaattagtagttggtatttgagtttaatttaaaatttgataacttttctttattgaaaatttctttttaaaagaagtttttatgtttctaaactttctatttttgattttttttttagtttctatttgagttcttggaatctagaaatattctttattagaatacttattactagacgtttctataaagttaagttcctaattctaaaaagacggtttctattttttaaattctttttttataagatttaatagttttggaaagggaataatagtcctaataagataccacatagattaaatttctatttttatgattttattcaatttgtatgattttttaaaacctatgagggagactaattgatgtaaaaacaatattaatgattgatgacgaataatattaagtttttccatactgcaccacatccttgcttctttttgggcttcttgcaccacatcttttaagggcattccccttatgtggttcaactagatttgttaaaggtgtgtagctccaacggtgtgggttagcagggagaggttttttgtaattactaaatagcttttttgcttttgatattcattttgtttagctttcatttgtgggaggattcctcatccttctattgtatttcttaatttctatttcaatataattcattgttgtctcctataaaaagaaaaaaaaatcaagtttttccatactttgcaatttttaatggtaagactctattacttttcttctagatgagacttaaggtttcttgtctttcttttgtattttattttactttttttcttcttgttataattttattcttgttcccctccttaaatcttaaaagccctaatgtagcttatttgattgtagacaatcatcttagggttgacttacatcaattttggtattcaagccaaagtttttggcttaaggatgtatattacttgaggagtggaacaagtcatacaaccatgatcgaaaatttgaaagttataattctttgatgtgaccatttgtgaccaaaccaaatgcaaataataggaggatcgacattggagtagtacttccaaacttttgttgtttgctaagggggactatacaatatgattaaggacagaggtagtaatttcaagataacttcacaagaacttgttaaaaagtttattttaaagatggataagcatccaaatcaaatattattttagaagtatttttgtttatttgttagtctgcaggtcattataagtagtatatatttttgtaagaaaaattttcattttatttgttttattataagcatattaaaatattttattacaccattttaaactaaaaaatatagtaaagaaaataaaaaaagggtaataaataaatgcaatataataataaagttgggtataatgtgtataaaatatatacatacatatatatatatatatattataaaaagttagtaatattattctttataataatatttcatataacatgacatgtgtattagataaaattttaattatatttcttttcactgtttttaatatcaatgaaaactcaaaaccaaacaagatttcactatttttcattcttgaaaacaatttcattttgttcaatgaaacacattttcaagaaaagaaaaaactagcaaataaaaactgtttttagaaaatgaaaatagaaaatgataacttaaaagaaatttccaaagcaaatacaaccttaattactttattaaagtattgaggtaattatattgtttttttaggttctctagagtcatcattagatagtaatcaatatttaagtttaatttagaatttaggaagttcttttattggaaatttcttcttaaaagaagtttctatattctaaactttctattttctaaaagattgtcttcccccccaccccccctaaagtttctatttgaggctttaaaacttagaagtgttatttatcaaatactctttttcacaagaagtttctattaagttaagtttctaattctagaagtgttttaaaaggctatgagggtgagactctatgacttagccttggggcaattgaggcttaagcttcaccttgttgaggcttagaactttgagactagccttaagattgttgaggcctaagcctcaaatatccaaaaggttttttgcctttgtgggcttttgatatatattttataagaggcttaagcctcaatactcaatgaatttttatgggtcctgccatatatgcttttgtgggcttttgatataaattttatgagttttgtattaggttgacttggttaaaccttctacaaaataagtcttagttgacttccaatcaaccttttaaatgaaattgaaaaagagagattgagaagaaagaataggggaattgttgatcatcttagtggttgatgtcatttatgatcattatcttattattgataaataagaaaaaataccattgcaatagctggacaaagaaaaagaatgagtggatattaatatcgatggggaggataatataacaattagatatgattatatttcttggaagatcctacaagcgatagtgatgctaatgttgaaaattattttatgaaatcatgagaaagagctaaatttaataagagagaaaaatgaagtaaattagaaactattaacaatgacaaataattaattttatcattatgaagtgttttttttattattcatttttcttgtgacttcaaggggttttttttttgtattttttttattatttatttgtttaaattgaggcttacacttcattttgccttgaggcttttgccttgtctcatttgggtaaaagcctcaaaactgccttaagcctttttgtggaataatgtaattaggaaagattataactatatatttttgtaattaagaagaggattaggacaatcttgtaatcgaggggatttgatagaattaggttaggaaagtttctacttttggtactaggaatacttgtataaatgtgggtatgtgcagattgaaatcaaggaagcaatttattctttttacccttcaagtcttctttttctacatggtattagagcttccaaactcgtaaatctggaaatcaagaggattttttttttctttggccttcattgtcgagttgaaagtttagtgttgaccttcattatcgattaaagggtttcttttgcttgaacacagagatcccatcattgcctccgcctcatcgttgtgaacacaagcttcctttagtgtcaccatcctcgtctttgtcttgcccattgtcgtgccactgagattgcatcgccacaatgacaccattgcaaaagcgaaacctagttcaaccaagtgtatcccttttgtaaactcattgcaaaacatagattgcaccctcgacttagcactagtacacccgtcttcttctgcatcattgatctctcgctcaagttatgtgagcctctgctggcaacgacaaccctcctagtgctgtcaaaaacaacaaagcatcgtgtcctccacgagttcactacaattatccttcactgccaacaagattgagtcgagttccaacctccacaggccatcgtcatctctgctggcaatgacaaccctcctagtgctgtcaaaaacaacaaaggatcgtgtcctccacgagttcactacaattatccttcactgccaacaagattgagtcgagttccaacctccacagaccaccgtcatcttagattgttgcaactaggttcccatacgtgtgttttttagcttgagtgtttaggccttaagccttaacgccttttatagttccttttttcttttcttttttttttttcaacaaaagagaaaaaaaaggaaaagaaaaaaggaaaaggccaaaaaaaaaaaaggataaaaaaattgtaacaagaaaaaaaaaatgtctgaggtataaaaaactatcgttgttaccactcaatatgaaataatgataaccacttacaatggaaggcagtaggaagataatggacaagcacacttgtcttttgttcaaccaattgaagaaagatccataaaaaaggtagattcaattaagaggagattgaaaaattaagaactttgttgagaactcttaaaaaaccttcaagtacctcctcattggcactttcaggtaagtttccaatttccattgaattacctttgtcaattcataggttatagattctggtgccataaatcacatgacttattcatcacaccaatttcacaactataacccttgtccaagcaataggaaaatagctacagcagatggtttattaaccatcgtcataggtgtaggagatatctaagttagtcctatactcacacttagaaatgtgctttatttctaaaagttgcctactaatcttgtctctatacaaaagcttacaaaagatttgagttgtaatatgattttttaccatactggttacgtattttaggaccagaatttgggaaagatgattaaacttgttaaggaacaaaacatgctatactactttgagacaccaagcaaatcatctgtatctcttctttcagagcatcgtattttttaataaagaaaaaatttagcttcatcattgtagggttgaacatttgtcatttagaaactcttaaaatcttgtttccttctctttttaggaacttagacgttgagcgttttcattgtgaggtatgtgaactagctaaacacaagagttcaaccttttcaatcagtaataaaataagttcaaagcctttccatttaattcatagtgatgtttggggtcattcccctatcccaaatatatttggggcacgttggcttgtgtctttcattgatgattgtactagggtctcttgaacaaatctgatgtgagttttgtactcccaaatttccataacatgacaaaaaatcagtttggtgtcactatcaaaaggtttcggtctgacactgcctgagattatttcattcaagtcctaacttcatactttcatcatgaaggtataattcatgagtaatcgtatgtaaataccccacaacaaaatgaagttcctgagaggaaaaatggtcacctacttgatacggtacatgcttttttgttccaaaaacatgtgcctaaatctaaatagggggaagccgtactaacacatatctcataattctattaccttttagagttttaggtttcaaaagtcctatgaaaatactcttatcatttatcctaacatgagaactataaaacatctcattcctaagatatttgggtgtgtgtcctttgtacatgtttacagtctaaacaggggaaaattggacttaagaacaatcagatgtatttttgtgggatatttgtcaactagaaagggatataagtgttaccatccaccatccaaattttttttttttgtcttagctgatgttacttttaataaaagtgaattttattatcccactccttatctataagggaagaattccattgaggaagataagattcaagattcctgtttcattgatcccttctcattgaccctattaaaccttctagagtgtttgatctagtatttgtacctctcattgaccctattgaccctcctaaagtgtctgatccagtatttgtaccctcctttaaacctgagtcatccattgaacctacttttgaaaatcgaattggcaaagtgtgctcaaggaagaaagctgcaatccctcgacttatacaagtccaagaatatgaactgacttctggaaatgaggtaacgggttctcatcttcccttacaaaccgtgtcagaactttaggttgaaaaacccataaaccaaaacctctctattgccattaggaaggaaatgaaggaatgcactaaacgtcctttgtatccactttcccatgttatgtcattcaaaaagttgtctttatcccataagagttttcttataagtttgaacaatgttcatattcccaccactctatctgaggctttgtctaatgaaaattgaaaacaagccatgaatgcaaaaatggaggccctttataaaaataaaacttgggagttagtagatttgtctgtaggaaaaaggccattgtgatgtaagtgggtctatattgttaagtatatagtagatggaacattagagaggtacaagacgagattgatggctaaaggatatactcagacatatgatgtggattatctagagacatttgctctggttgccaagatgaacatagtccgaattttttatcattgacaacaaattataattgggatctacaatagtttgatgtcaaaaatgcatttctaaatggagatctggaaaaagagatttatatgggaggctctcctggatttggaagtaacttagccactaaaaaatctctatacgggttgaaacaatctctaagggtgtggtttggaaggtttgctaaagtaatgaaaaacataagatacaaagaaagttagggagattatatgttgttcatcaaacattcagcttaagggggaattacaactcttttggtatatataaataacattattgtgataggaaatgatgaaaagagaaacacactttgaggcgatgcttgaccaaggggtttgagatttgagattaaagagttaggaatgttgaaatatttcttaggaattgaagttgtacattctaagtagggaatttttatttcttagtagaaatatgtaacaaacctcctcaaggaaacaaggaagttgacatgtaaaccaataagcacatcaatagatcttaatcataagctttgagaggttgagaaagatgttgcggtagataaagagatgtatcaatgtctagtaagaagactcatttatatcttttacacaagactggatatagcatctgttgtgagtgtgattagtcaattcatgcacagttcaaaagaggttcatttgcaagctgctaaccaagtgccacagtaccttaaggggtctctaggaaagggcatcctatttaaacgaaacttaggattagtacttgaagtatacacaaatgcagattatattggatttgtggttgatagaagatcaatcaccgggtattacacctttcttggtgagaatctagtaacatggagaagtaaaaaacaaagtttggtagcaaggtctagtatagaaacaaaattttgtacaatgtcccaaggagtttgtgaactactatggatgaagattattttggaatatttgaagattaaatgggatgacccaatgaaactttactacaacaataaatttgcaatcaatattgcacataatttagtgcaacatgatcgaacgaagcacatagagatagacattttattaaggagaaactagataataggttgatctgtactctttatgtatctattaatcgtcaacttagatatatactcaccaaaggtttaagcagtacaacatttcaagcaagtgtatctaagatgagaatggaaaacatctattcactagcttgagagggagtgcagaagaatgtaattaggaaatattatagttgtatatttttgtaattaaaaagacgattaggacaatcccataatcaaggagatttgatagaatgaggttaggaaagtttctattttttgtactaggaatacttgtataaatatgttggtatgtacatattgaaatcaaggaagaaatttattcttcttgctttccaattcttcttcttccacacttttaaaacattgaattctagaaagaaaatttctatgataatatgaaaattaataattgatgatgaataatattaagtttttgcatacttttcaattttcaatggtgagactttattactctctttcagttgagattgctaataggtcttagtgaaattctaaggtttcctatttttcttctttatctttttatttttttcctcatattttattttgctttttccttgctattataattttactctcgttcccctcctcaaatcctaaaagattgaagccctagcccattttatttgattgtcctacatcaagatgacaatatagcatatatcattcctgttaaggattatatcattctttttctctggcaatttagctctcaaactcagtgtctattgattttctggaactacatcctgcttggtcctgattatgaggatgatcagctaaaatgagatgagttgggctcagtacatattatctgaaagtgggctgttccctttcatgcatttcattaatttataatttatgcaacattttgcatttattgttggggactgagaaccatattagagggctgaacaggttgattcgatgcttttatgcttgatggcctaagaaaatagtttggtgattgcatttggaatacatttgataattttagaaaacttctacataatctaattgcatatttagcttttgagttgtagtcttttgaatacttcaggttttttggtggatctgtatgtgtttttgcattttcatgcattgatacttctatgcctatgtggattttctttgcttaatgtccatgagtgatcagtgggcatctaatgtttaattatttctcaagttcaatatgctggaattgttttgatgccagagtgccacggtccttaataccaggggctcggagtt

SEQ ID NO: 12552 - DNA, 5729 bp, Vitis vinifera
  Intron number 1 from transcript GSVIVT01014602001 (locus G SVIVG01014602001) derived from phytozome v7.0 (chr-ID chr1 9; pos 5489242 to 5494970 reverse strand)
atcaggtactgggtttcccaacattcaaaactgttaaatatggtgtaattttatttatttatttatttagaaaataaaacatttttaatttttagttggttcctaaacatcatacgttgtttcatgatgggaaattgtgatttctgtgcgtttggagagtgtaaaacgttctaatattctgaatttattcagtccatttcgtagtttgtgtaacaccaatttgttgctggcatgattgatgcctgcgacgtggtataattttaattgcaatttcagagatattgaggattctagagtaccagttgattcatttgtaaatttatggataaatctgtaatttgttgctcccacgaattgtgaatctgacacacttttgagtgggattagggcgtttttgaagatttagttgtgatgccgaattgaaatgtttatcagaaacttgatatattattgtctgtctgatggttttatagagatttgttggaggaaaagcaattgaattgtttaatcaggaacctatcaaaaaaattgaattgtttaattaggagtaaacatgttcagtaagattaggtatgtcatgaagacagttctgagttggggggtggagaattgtaagtggcaagccaccccaattttagaaattttaactgtggatttctttcatgcaagattgagaacatgaaagtacaatgctcgcatgttgtttaatgaaaaataaggggcatggaaatttcagttatgtgattgtaatcatctcatgcaaagttgtaaaaatgtttttaaatgattggttgtgagatctttagaaggaaattacatttatgatagtgctcatttgtggtttgtggattggaatccttaacgggaaattaaattaatgaaacagctcatgtttggattatagcaatacatttttgcatgtctgatttgagttaatattcttctttagtgatccttcatgtgtggaaaattaatattcttctttattgctcctaaccaggaaatctataaataatggttggattttgtatgttacatgggttaaagggatattgtgctataaaggtctaagtcacctgaattttaagaatgaatattttgcatgcacaattttttataggaaaactgaaaatgtgaaaattttatcaagaaaatacattttcaatcaagttccattatcggaaaatacgatcatttgatttgatcaagccaatctaagtgggtacagcaggttggagggctactgttgcaaataatgaaaagataatattttggctaaggtggtaatgcatgttatggttattaatttcagcttgtgatccttctttggccttattattgggaggaacataatccactccacgtgccatatcagcaatatggtggagttgttaaggatctactttattagatctcttagagggacctaccccagtttggcgtttctcagcagtttggttgtgttattaatggttcactctattatatttgtaagggactcatcatgtggcgtgatcgagcaatccgacaatttggagttgtcagttgttgggttgagtgaggtggatttgtaggagtcgccatgtggtttgaccaaaaataatttaagattggcggctatcagctttatactcttagattttgagaagacttctcatggttaaagattggttttagctgtttgttgaaatatggctggccaaccatatatttgtaatatgacttaacacgtgtctggtcctgcaaaatgaagaatttgtgccttctcagcagcagtttggattaagttgtaaatgacccattatatatattgtatttgtaagaggatttatcacgtgctttgattccatgattggacaatatggggtcctcttttgataggtggacaaaaaatatatagaaagcaatgtctaacaaaaataggctgcatccatggtgtataggaagcagggattgaaaaatcggaaaatgtcgccgatatttcgaagaaatatcggatatcggacggtgccgaaacgataatcgtcaccgattatcgatcgacggaaaaatcgacaaaaaatcggcaaaatcgccgatatatcggataaatattggcgaaataccgatttatcggaaaatttcccgatattttcctaccagtccagcccgcgcacaggatacaaaatctggctcaaaaatcgtggatttagggttcgtgaaatttaaatccaatgtcacaacaacaaagagacccttaaaacagatccagaaaacacaaggagcaaaagaaaagcaaattttttggttttctttgggggttttgaatggattttctcggaaatcaaacgagaatgaattttcccggaaatcaaatgggggatggattttcttgggaatcaaacgggggttgcaaaaaaaataatgtcaacgtgattagattagtacctgcgaggattgagagtggcagaggaagataggtctttttaggaagaggaactctcttggctggagggcagcttcagcggctggagggcagcttcagaaaaggggaaaggggaattctctcggctggagggcaacttcagaagtgggtggcccttttaatttttagatttagtagaggtaaaaaaaaaaaacaaatcatgagagcaattttcctctacccatataaataattataaattattgaattttattttgattattaaataaattaatattaataaaaaaaagttgttactatatgtttttaataaaattttaaaaattaaatctcaaataaaatatttatataaattaatttaatttttatttaaaatataataaaacatgttttaataaaaatattttaaatttttttaaataaacattatcttcagcaaattgggtcatcttcatctaacaatataatgaaatcacatcgatctcttccttagtataaggactattgtaatatcatatatattatatttatgtataaattgtttttattcaataaaatcaaatattttttaattcatttctaactctatatactttcaaaattcatatatattatttttaaaattcaaatatcgaatctaccaatatatctttgtttaaaatatcttcttaattatatatatgtcaattacacttacaagataactttaaaatgtgtatttttacttattttatcattttttaaagttttttcaagcatttctattaattttaaataattttcactttatcgatatttgtgaaaaaatatccaccgatatttctccgatatttccgatatatccgtaaaatcgaagtaccgatatatccgtaaaaaccgatatttcaatccttgataggaagtatgtaaggagcactggaagtcaaaaggacaaaggaaaccaaaccacagtagggacaaaattatggggttattagatgtttggtccagtagtttaagttcttttttgtaaaaggattttcagtgcattttgatccataataagaaattttagagattatcagttttttaattaaatattaaagatctacagtgttggaattgtacaagaaaataagatacactttttctatctagcaaattgatgattggttgatattcagcataggctacatattgattaagctttaacattttcagttcgttacattaagttaaagaatttaactttgctagattattgtgtcagtgtttctcatcaatgcagttggtttttaatttcaaagttttttcccctttagtttatttcgaaggattgtggttgacattgctccttgttcaggtttcttactggatttaatcctcatgtcatcattataatcattctaatcttaatcagcgacaacatgatcattactataattatctattttattaccataaatatttggcaaaatatttttgtcaagtctaatgatttcagttttggatgagtgctttgtaatgtgtaattctatcatcttcattatgaaaccataattatcaaacacatgacaattcgtaccacgcatgacaattcgtaccacaatatccaatctgtattctgattatttcaaggtcagatccttggatgctatcttgctgctccctctgcatggtgcactattttaattagattgtgaagtgtaattattcacctttaaagtctcaaccttgcttgttgctgttggccttttgtgcacttttcaagcttgctatgcttaatctttgaatatgttgctgctttattcttgtaatatgagtagggtttaaagaaagcaaacataaaaatgccaacagatcttgacttgagttagattgtataacttcatgaattgggctagcttgtatatagacgattgtgctacattaaatgtaggctttgtaaactggctgagcttgaagtaaggagagggagattgtttttttgttttctcttttcctttatgcttgcctgttatggtgcttttatgtacattgtgtataccttgtggcacctttttctggtgctttctattatcaaaaaaagaaaaaaatgcagatgttgatttgagtgagaaggcataatgttggatactttcttgtaacatttgatgcatcttgggcctttcgaaggtgcaaaatggagcaactctgtgacagtgcttctaagatattgtttaacagatgtaaatctgaattgtggttttatatgcactatttggttcatgttttgaaagatttgatgcagatagactaaaagtgatatatgcgtaaatatgagtatgattttcagatgatcattaaatgtgtgaagttgttctaaattgaggattatgggcttggatctacttgtcatttttgaagtgatctgtgtagaggttgtttgtatcattattgataagtggaaattttgtgatgcattgttaatcataaaccaaatctaaattcttgggaaataagagatgttccttagaccgcttcattataatttgaaactatttgaagtggttcttgtgatcgtcataatgtgaagtgaacttagaatcaagtaaaagagttccataattaatgcacacgcctcctccatatgcaccctgtttatggttgtgatagatgcaacatccctcgtgtcacctttacatgccataagtaaaggaggtgttaaggaagctatttcttaacaccttttgctaaaaaaatctatttctgattttaaggaaactaaaagtatctggtttgggaactgatttatatcaacctacattgagacaatctattgattacctagaatttttccctttcattgctctttgtgtcattttattgatttcttttgacttggttattttgtcctgggtgtgtaataaagttggacaattttatactttctgtttgctgcatgcttaagtcaagattcagacttacatatattatttttctgttgtgacaaacttatcaaaaacagatttagctggaatgacaagtgataaatttgttgactgtggtccttgtttcacagtttttattggatttatgctacttcctttctctagttgattaagtacatgtttaataatatttttcttatttgaagtgcttcaattttaaagctgggagtgaaggtgatgcatttcatattttcaattagacaatggactactttctcatgctaattactaattcatgttggatagattctttttcatttagagttcttctgttttaaagctgatagtggtggttattactttttttgtattttcttttatgaaataaaggtgca

SEQ ID NO: 12553 - DNA, 1462 bp, Vitis vinifera
  Intron number 5 from transcript GSVIVT01009920001 (locus G SVIVG01009920001) derived from phytozome v7.0 (chr-ID chr1 8; pos 12386660 to 12388121)
ttcaagagttaactactttggctcagcatacttctgtaagtttagttttgtattggtaatatttttttgcatttcttgttatgtgtgctacatatggtattattaatattttgggaaatgatacttcatttgtttggaaggaaatcatattaaattttggtttaaaaaagcacagttgatttctttctgaaatgatattcgttctatatcatgtctattttatgtgcctgattcatttgaatgaacttgtgtgattgaaaaaatactttgatcattagattcaaagtttgattatgttattgtggtcactgaatagtttaaagatttagattctatgatcatcgatcaacttatgggattattccaagcccatgtggtatttagttatctccacctctaattttgagcacttgactatatcctaaattttgatccctttttttctttgtaaaattctttgtccctctttgccttcatttggttttaccatcttacccttcttgtagataagatatgggcacttctgagcctggctggatattgatctcaggtccagatgctttctttcactttttgctatatcacttctgcctctttagtttgggttattaggctattgttgacatgaaaggcatatccaccatatgtctagcactggtttcaacacttataagcctctatatctcctgacaatctgactcagattttgtgaatcttatctgtgtgatatgagaattaaaaataagcttattattatctttctagatttataaataatggtcaataaatattttttgcattatggcaatgtgttttgagttgaataatagaggccttgctatgcttctgttgcatagtcttttccatgtaaatacagttgttatggttatttaatgtaagtcttccctgttaatatgtttatggtatcgaacatgcaggtacatgaatggattttgtagacacattcacaaactcaagcaaacatagcactgtttcatatcggtctttgttttaggcaattgatttgtcctgcactccatctctgtgtgtgcatgtctctaaggctttatttgattgtgtattcaccttctttcttccataggggaaagctgacccgtgtttattttgcttttgaaatgactttaattccacatgtgctaaccaaatgtatataaaagtgtaatttggtgggataatcttttagttttttgcttccctggatgattttttattttttatttttgggtttcttgatttaatagaatcatggaatgatgatttgaattagatgcattcccaaaatttttgctcttctgcagagaacctgttattctgtttttttataagtatacttgactaatgctgcaaggttcattttgccttcatctcttatgccttagtaagggttagttatgttctactttgagatgctaattccttctgcatttataggaattatatc

SEQ ID NO: 12554 - DNA, 7498 bp, Vitis vinifera
  Intron number 2 from transcript GSVIVT01030838001 (locus G SVIVG01030838001) derived from phytozome v7.0 (chr-ID chr1 4; pos 17330090 to 17337587)
ctcgtcttggtggctcttcagcttttattggaaaggtatcatttcaaatatagtcatttgatttgcttgttgttcgatatgtacaataacacaaggaagcaacatattttgtttcactttcaagagatacatattaattgttcatttcaaacatgttgagttttgttttgttttccccacaggttgtttcttcctttgtttttccattttttatctgtttcaattaccttttggtattctttttaagacttaagcttgatgacttcatcttaagctggcacttttgtaactgccatttcgttcatgactgctcatgattattccaatgttgtaatttgtcatttttggagattcccaacaacctcattaattccatcctttgtgctgctagtacttagcgaactgaacattagagtatctcattcaccgaaagtgggtccaagagggaattccatcacctaactttattgtgtatgattctttctagatttcatatccatccatattgaactgctatgcttgacatttgtgccacacttagcactggatttgcacttgcatgctcaacaagattaaatctaagctaatctactagctttttgtgtatatatatatatatatgcatatctgaaatgttcataatgctacatcctacagtctctattggcatgtacaaaaaagctcctagcatgatcacatgctctatcaatttcactttatttggtagattaccaactaaaaaacactggttcaaaatgtaaggttatgtttggttctaagaaaatgctaaggaaaggaagaaaaatgataaagaagtatgaagaaaatgctaagggcatgattggcaaagtttccaaaaatagtctcataaaacaattctcaattgtttttagaaacaaaattttatttgggaactcaactgtagaaaatagttttcttagtttattctctgtgaagtactaaacactcacatacaatgaaaaaatttcaaagtattctccatattttcaattatttatggaatcctctaaaaaattaatatcttaaatttgttcttaaaaacaacctatttccataacaaattttcaaaaaatttgtcaaacatattttataagttagaaagctatttctattctaaagaaccaaaaactgttttcaaggacatgtccaagaacaattttcaacagtttccaaatatgtcccaaaagtgtttttttccttattttcatttaagaaaaaaggtgggcaaagtttgggaaagtgcgttcctcataaatgtaaattttttttccctcaacttttccatggacaactaaacaaaagaaaaattttataatttttccttgcttttttctttctttccctaaaattgcacaagaaccaatcatgggctacttatatgccttcttctttctttccctaaaattgcccaagaaccaaacatgggctacttatatgtctaatcaaacttcattttgagcttgtgtattcttcaggttcttgagatgctattacttggatgctagaatctggtactaaaaatcttctatctgatgttgggatgttcaaagttttgactactggtttcttccactatgtttaatggagttctttttattctttgtaatgctttatatgtcttcttagttatatgttataattagtgctaatagacaagggcccttgagctttctgcaatatcactgatctctcttgtggttttctgtatataaattactggctgcccctgcacaaccaactccccaatttaggggtttgaaaaagtaactggatatcccttataaatgttaataataattaattaattcagggagagaagcagtcttctcaaccactcaatatgtccaaattaatatggaggataggtgaacaatgatatttcatttcctcagagaatttcagagctatttcagatatcttgattgaggccattcatattctgagaaaaccactccactggtcccttaaaggtattacactttggagcattttgaattttcaagtttcaactatgatgagttcctatttcaacattttgtttatatagcagggatttaccacaactattattcttacatcaatgttttaccttgacaatttctttcatttttcttgctggaaacctgaaatggcatttcatactcttgatcctctactatcgtgcaaaatagggtagcaattctgaagtcagcctaggtggattgttttgagacaggaaagtgagcttccagtcctcagtcccggtcgagagaaatcaatccagctgagacggggaatggctacccccaccctgttgcatgtaaagcgaccacctgctaacagaatgtctactaaatttcacttctcaataaaatcagaaagatctcttatcaccaaatttatctgacctctcttcctcttttgaaatgagaaatgaaccactttaaaatctcttgattccctcagaagcaccaaggctcctcctaacatcctctagttgcagctaattcctcccaaagatctgacctttttggaacctacaacagggccatacacttcaatagaaaaccatctaaaaccatattcacaaattttggacttctaggaaattgaaaaatccccacaagctgtccccttgcatttaaggctcaccacactaaaagctaccaattcctaagcttctaacaagctcggaagtcatagcatccatcttggagtcctgtcaggcacacccgatccaccctctgctcacaaagaaaggatttaataatcccccattaatccacctcattaatccccctttcattcattgtgatcattttcaaatcattgatcaacctttgcaatggactaatggataatgcccttttatcttgaccctagcacttcctttcctccatcatggttaatcgagcaagctaattcaattcttgtgattaaatccaaaatctccttttcaaacccctccacaaacacaaacatccctaacctaaccctttgcaaaatatcaaaacatttttattagtcctaatagaagcatcagttttgtcctctgaataagtgctagtgtcctccattcagagacatctgagtctaagattgattttgggactacattgtttgtgttgctaggagtctccagattcaaatttgactcaccccacacagtggttgctagagaaggatccaccgaccctccctttgcaaagagggcctcccccacatataccatctcataaggagtgttgcagactccattagagaaatccacaaccctgttgtctttgattatcatatttaagggtctagatccatccttatccaaacaagagtagggaccaatccactactcaccagtcaccagaaacaaaggatctttctccctcacccatctgtcccattgagttgccaatcaccctgagaaagaagaatgaggagcagaggaagaggaggatctagatcatttgtggagacaatgaaaatttgagatgcttaccatagaagctttggcaaagtcattagcatgaactacaacagtattgagcttaatttccttatttttttgatatcccatatcagagaggaaaaagttcatagcgctatatatgtatgagctccttttaaccttgaaaacacgttttaaagatgtgagggcccgttgggcccaaaacggacaatatctacataattgggagtaagtcatcattacaaattgtatcgtagttaatccccaaccttggtgtggggatttgtttggccccacaatcccatggaacacaacgagaatgttgtgtttgcatggggaggagggtttgtgatatcccatattggataggggaaaaagttctttgcgctgtatatgtatagactcttcttaacattgtagacacattttatggccgtgagggccctctgggcccaaaataaacaatatctacatagttgggagcaagtcattactctcttagttgcaaagtcttttatgaatgttctttatcccatttcattatcagttatgcatgtaagggtctgcttttgtgatttgatcattgacattgtggtaattggtagcctcaactagtttgttgtgttgtataaacctgattgtgtatgtgctgttcatagggtgtttcttgttacttaactcttactcatcccaactacgaggattaaccatgcaaatcattttatactagtccactttatagaggatatacattttgttaaatcataccatgtttctcaatccacatcctttttttgggctttggtcttccttttactaccttaggcttgaaaactatatttctctttactcaaggtatttgttcctttgcgtatgatcaaacaaccttaacatcttttggtaaaaaaccatgaacaacgttatacaacttttggtaaaaatccattttatatgactcattgtcatcttgaaattaattgttactatcatgaactaatcataaattcatcatctttgaatctatcatttgtcctacattctttacaatgcttcttaggtcattttagtcatttcattcaagtgatataaaggcataaaacatttgtagagcacaaaaatactcttgatttcttctttaagagagaagacgcccttcccttagtcccttgtttcaaagaaattaagggaggggtagaatatcaacagttcatttgatggtccaaagacaaacaaaagctaaaagcaatggcatttcaaagatcttttgggggaaaatgcaaacttcccttatgatacccaaatccttcaatttcaactaacatacttgtgttgtcatgacatgacaaggtatgggatctttgtcagatactcctattttactttgggtgtggctgtttgattttttttattgatacccttttattttttttcaactttcttagtaataattacattgaagaaaaaaggtagttagctaaaatgtgaatttttgtgagaagattttgggatacaaggaaaaaaaagggattagagggaaaagataggagcttttaaaaatgatatctttacttccaatttatttttacttaacttttcttgcattctatcatatcccagtactcgtgcccatatttttgaatcctttttagtcgagtccccatatcctaaaatttgagttatgaaggttcaaacatctacacatacccgtatctaacactcgtacgcgaatccatgcaacataggatttctcctattttacttggtgaatctcatgtatgttgcaaagtaagaataatttgcatataatttattctttgaagggatgaattagtttcaatgattgaaaaatgggtacatggtagaaaatgtgttgaccttggagagactgtagtgtactacctcctaattggagagatgatttgtcttggtcgttgggacgagtttcccatggtgaatgcactagtatgtatggttacacattagacaagacctacattgaatcataatgtaaggctatcaagttatcataattcactaagctactatatcacatggactctcaaccttaaaaggatattgaacttatgctgaaatcaacaggtgactttgatctatgggtgagattctaaagtgattatatattccctatagattggatcactattgatgaaggctggtgacaacaggaatttttaatagaggcaacatgatatttcatgggatggagatagtgtgtccctttaggtgatctaaaagacacgtgatcataaaatctatgactatagtaatttctttaatggaatttgatatatgttctttagaattagagtatgtcagttgatcacataataagaaaatctataacttaaggattgaataggtaatcttgatggggttgatagtactaccctagttcatggtgactcattttattagagggatttgagtttctagttcataagtgtgcatatggacgttttgttacaagcgcaaggttgcactagatcttatgaattgtttttttgaatcgggctaattaattaattagagctcaatagggctaattaattaattgggacccaactgcactaaattaggtgacctaagtctaatttgggctcaagtcacttaagcccacaaggggccttatagaaacctccttaggggtttagggtttagactttttcctgtcatcctctagagagaaaccctagccaccctgatggaagagagaagcccactcttctcttgtgctagaaacaatgaagggagagagatcaagtgaaagactcttaggtagacaaaatctatgacaactaccgcggtttcgacatcttcattggatgggatttgatgtgggaacatccggatcacaggtttgagtttctatctttggatctaatatgtattttggtttttgaaaccattcttttttgttgcattagatatgaagggccctagggatagatggcatgcaccttatgagatccagggctagggaacggagtaatttggggttcctattggatattggtcaaataatgatatgagataggaacaacaaaaacaacaaaatgctcccaccaacaatttttgttttgtcattgtcattgttgtcatcatcatccaagcttgaacgtgtacattgaaatctgcatgtggccacttcatgcaaaaatgctggaaggtaggtccattatccagcagttattatgcaataaaaaataaatgctagaggaccatttcaccaagcccgaatttgtaagttcaagtctgtgtgtggccacttcataaaaaaaatactcaaagttaagtccattatccaaccccctggaaccctgggtgtggggacctgcagtggatgatgctttattttgtaaaatgcaaagataaacttctatgttggtcaaggggaagcaggcagtgtacaactgattatggagcaggctcatcatagtaaaatattagttcgctgtcatccctatcaattttaggttggattctatcattagaaatgttcaaattactgtagtctgcagcagtgcacatttgttgtaattactttttacttcctctaatcccatagaagctgcagagctgatttcaggagtttcaagagtttataatgaaaatattgtgtgagcctttagattcaccagttcaaaccatctcatgttagtcaccattgctaatgatgattggaatgactccattaaccactatatgctgaacaattggcagcttattgctcataatatatactacatccaattcattgggtaacgtgtctttcaagctgtaaattgttgactgagcacttggttaataattggtatatgggaattattttcttcaaactagtaaatttccatctctgtttcaaattcaataatccagaaatttgtatcatgccattccatcttttcatcaacactttggaatttcttattatgtaaaaatcaaaattctgtatccttgttacttccctcagattttttcatgtttttattcaacatacacaggttggtgaag

SEQ ID NO: 12555 - DNA, 6562 bp, Vitis vinifera
  Intron number 5 from transcript GSVIVT01016495001 (locus G SVIVG01016495001) derived from phytozome v7.0 (chr-ID chr1 3; pos 3411427 to 3417988)
tgacaaaggtgattattaatctaaaattaaaactcaatctcctgttcaatatctttacagtcatacatttccttttgtcgctctggtgttctttttttgccttgaatgttaccagttatctttccaatgtaattcagactctagtaattttataaggtttcgcaatctggttacctggataattggagtattctcatcctattttatgtgatgaagaaactaattctcttaaaatagtcagaacagtggtatactgctccaacttgagggattatgctatgagggaaattggaagagaatgaaaggtatgacctttcatggctgcagaactaaggtgccacaaatgagcataaaagcctccactaaacaaagtaccaagagaatgaacttgatccagatcatacctggagaccaggcaaaaaagaaccattcaaaagaatcatggagcagcttgggtaaagatgcatttgaggaaatcccgtaatagttggagggtcaagtaccacttgaaacagggaatccaaaaataatatacagcaggtaaagctacacctggtaaaggcaccaatgtagcaagtcaaggtgttgtcacttcttgaaaaagaaaccccaaaaataggaaaggcaagttagacttaggttaacattggaaaaagaaagtaaaaatagcaagcaatagattggccatagatatcgcctaaaaaagcatctcaaaataaaaaaagaatttaggttcaaagcctcccaaaatagcatgtaataggccctacatacagtattaatagcagaaaaagggatcaattcttcacacttcattcaaaatttctgcttaaaagttctttcctcttcaattggcaccatctgtgggaaatcctagtccttttttgcctggttaaaacatgaattctatatctgtgctgcagcatcttcatatgatgaatctgcactagaggatgtggaaatagcacaagcttccatccaaaactagctctcgcaattgtggcatcgattagatcagcaacaactggagaaccaacaccaaattgagaatatcttgtcatcgtgaaccaacaggcggaattacttgagtgaatagtagctcattacaacctaggatctacctatcctaggactaccaaggtaagccagcctaatcagaaggaagagtttagcaagatctatgacagccatgatccatcaattactttggggaaccgggatataagtatgggatgtgttggaggcttaaatcaagatgccaaaaaattggaatggaagtacaaagagttggcagtagaggtcaagtatttgaaactacattcgttggaatctaatgatgaggggaaaattggacaaggttgtttaggtcacccttggttcctcatctccttaaagaagaacttccccttcattaaatagtactggaattcaatccttatggtggtgtgggagatcctacaaaacaactttatcatttccagcaaatattgtttctagtagatgacaagaagggacttctatgcggagtcttcctattcagtctttagaatgctgccttgatatgatttcaccaactacccacacaatgtacacatggattggcacaactgtgttatgtctttgtgaggcagtatttttgtaacatccaacctcgaaaaaatgtcaacattttcttcaacatcaaacaagctccaagaaaacccattcaaaattttgtgcattgattcatcatcaaaatgtttcaggtagaaagtagtgacaaagaacgaccatggtggcattcaaaaaaggtttcctccctgaaagaacaaaaataaaaaacacaaagcgaatgatttacgtcgttcagcttaaagcctatatccatgggtgaagatgaaaaagaactttcattattattgagggagattataaccctacagttctcaaatcccaaagtcctaattacgcccaaaaagcgattctctctctcaatcaaaatctctttctatatatgtttgtaattagaagattccatataggtaactagttgtataattgtcattatgcgctttgtgtaggcaaactccttggtttgcctatgcctgattgaaagctgttgttgtaggcaaactcaactaatggtagacatctttctcaattatcaccaaagtcaagtacataagctcataacatttcctccttgatacaaatgactctctttgactgtccattagtttatggatggaaggatgtgctataatctagatgtgtccccaaggcactttgtaggctagtccaaattgtgaggaaaaacgtgggttttgatcgaatactatggacattggtacacccctatgatgatcttagtaatcccaagatgaaatccatattgatattctcccatttccacttaggaattgagaggggctgtagtaaacctattggtctttgatgctttgctctaatctattggcacacaagacatcgcgagacacaagtggctatgtctttcttcattcccatccaccaaaaatgctctcataagtctcgatacatctttgtcccactaggttgtatcgtgtaatgagaatgataagcctcctgaaattagcattatcaccacaatgtgcctcctttaatataagcaccaactagggatcgctatgctgagttgcttgaatgcgaactatcaataccagttatgctagcatgttggctaatatagtgcccaattcttttgtctctatgtgtgacatttgacaacccttaagtgtgatatgtgactctctttaagtgtgacatgtggcacttctaatacatgcccaaattcgttacacttatattaatagtgtagttaatgtaattctttctactttatttgtgtagtcttaatgttatttaaattttttaattattttaaattattagggatttaattattctactaggattttaattgctctaaattttagatataaatatatgaaaagaaatgaaaattttatttcatttgaattcaagttgttatagctcaaattcctaagattcaaacaaactcaaaaattttccatgttactttgctcccacaaggccacacccttgaggggcctttaaataatgtagtgtctccaaggaaatttagtagtctcatccattagactcttctttacaaagatctcttcattaatgtttattatactaagtgcatgagcaacaaaagcatcattaacatacctctgaggtggtttaatttgcctcctcattttgtccctaaccaaactatattattgaacttcaccttttctctcacatcaaagttgttttttgtatcaaatttctccttttgaagactcaacattgtagactcattaaaagtcacatccctattgattagaaatttggagaattttgaatttgagtaccacaacatttaccctttcactctatttgtatatcccaaaaatatgcacttctttatcctttgttccaacttactttcattcacatgaacataagctggataatgaaaaattcttaaatttgtataactagagggcgaactagaccatacctcttcaggagtcctacaattaatgaaaattaaaagaaatctattgataagataacaagttgaatttaccacttcaacctagaattccttcaacaaccttgcacttgaaagcaagtatcgtgctctttctaaaagagttctatttatctgtttgacaacaccattttgctatgaagtatgcttaattgtgttgtgtcttataacaccttcatttttgcaaaactcattgaattctttcccatagaattccatgttattgtcaattcttaagtgtttgatttgatttcttgtctgcttctcaatcatagctttccattgcttgaattttccaaaatcatcattctttatatttcaaaatgtatacccatacctttctagtgtaatcattaatgaaagttaagatatatcttccaccactatgtgatacaacctgagaagggcattaaagatccaaatggatgtaatctaaagtacctttagtcctatgaacaatcacactgaatttaactatgaattgtttccttgaccacataatgctcacaaaaatccaattctcccattttttgtccaccaagcaagcctcatttgttcaagattgtcaaccttttctcattcatatgcccaagctgcatatcctacaatctggtagtctctgaaattgattgaggttgaaattgcagttgcacctatactcctactaccctataatatataaagaccattaattttctttcttttcatcgcaataagggcaccctttgaaattctccttactccacctctagctttatatgtgtttccattggagtcgaatgtccccaaagaaatcaaatttttcttcaattctagaacgtgccttaatccagttaatatccttcaatgtcatcatgcatcttaattaaaattgtctatctcaacaaaccttacatgctacattatttcctatgagaatcatccataagttggtaggtactaaactaatccttattagaagacatgataggcaccttgaataaaaaattcactcactacctaagttactaatagtaactgaaaggacatctgcaatgtctaaattttcttctgcaattgaagtatcaccaaaattagaagctttctctttgttacaatagaaacacttgttgtttccccttgacttcaatttagatctagatcgacttttttagccactatttttctttcttgtttttcttttagctaccaaacctttacctaagttttcctctctattctcaaacaccctcttcttcaactcctttgagttcaaggttgctctaacatcctctatggagaaagtatctctaccatatatcatggtatccataaagtgctcataaaaattcggtagggagcacatcaaaattatggtttagtcttcatcatcaattctaacatcaattcctcaagtccatgatagttttattaaactcatcaaggtggtccttaatggatgtatcttcttttatctggaaagtgaacaactattacttcagatacaagcgatttgtaagagacttcgtcatatatggacttttcaacttcaactataacttagtagtcgtatcctcttctacaacttcatgaagtacctcattacccaagtgcaatagagtggcaccgtgtgctttctccatgagttcatcattttcttcattagacatcgttgttggttgagcttctctacctttcagtgctttggacaacccttgttgaactaacaaaacttgcatcttaaatgcaccataacctgaactcatttcttccatcaaacttcttaacctcaaactttgtcattgttccaagtctaattacttgtactctaatatcagtttgttgtgaaaaaccacaacaaagattaataataggaagaagaaaataagagaatgaaaacaaaaaatacataaagtacacaatgattcatgtaattcatcctaaagcctacatccatgggtaaagacaaagaaaaacttctattattgttgaaggagattacaattctagaactctcaaaccccaaagtcccaattacacccgatggaccatatcacatgaaaaggatactcattgtttttagaagttcctccaatatccttttccatgaatgctacaagaagatgaagcacatccaacatgacctagccccaacttaagctgttctttctaggtttaatggggagccctcttacacagtaggtcagattaatttggaggtagacattgcagcaatatgcacatttactcagttccttatagaaaggtccacctcagcttataatgtgatcttagggagaccatggatacacttgatgtggccatgatctccacctatcaacaaaaaatcaagaaatcgccaaagtgatcaaggtccttggagatcaaatgattgggtgtcagtgtcacaaaatggtattgcagaccccttttagaagctttcatgctccagaaaactcctccttaccctgcagtaagttcggtaagggacctcctcccaaatagcaattatagaaagtttcctctcatgaaaactcatagaagatacctatggcgaaggaaccaaactgagctgtatgcattggagggaaagctaaactgagaactagcatagacactatcatcagggcaaatttgcagaaagtcttctctcacgactaaggaagaacatagatgtctttgcttggggcatcaggatatgcggggtgtagtccgagtgtgatcaaccaccaactcaacattgatctcaactacttatatgtaagacagaaactacatcaattcacaccctttaacattttggatcatcaagaaagaggtgaacatccaaaacaaaaattactgtatctgaaaaggacccccacacctcacccttgtcattttttgtcaacatggttacactgggtgacattgaagagtcctgatatcacagtttataacacaggtttccatgatgctcttacatgtgctgcctcttcctgcaggcaaatttgagca

SEQ ID NO: 12556 - DNA, 8016 bp, Vitis vinifera
  Intron number 10 from transcript GSVIVT01020087001 (locus GSVIVG01020087001) derived from phytozome v7.0 (chr-ID chr 1; pos 10478180 to 10486195 reverse strand)
aagttctattggatcttgaagcaagcaaataccaggtctttgatttgttttttgtgtgtgtgtatgtgtgtatatatatcactgtttctttcctttcaacttattatatggtcatgattagttttatacttctcctagtaatgtttgttttttccccttaagtttcctttttttttttttttctttttctttttattgctagaaactcctgcattaacaaatacagtggcttactttgtgcccttgaggcatggctcaagtgggaaagggatggggagggtttgtgggaggttctaggtttaggtcccaatgggtacaaaaatttacctatcaatatatagtggcttactttgtgttgatgtcaaagtcctattttgtgctcctttcataggcttgcccatttgtgcatagttctattgagatatgttgaatttcttaatgaattgcctataacatgctgccttgtggcatgaactaaagccatgattctccatttatatgaagcctcacgttttgcatttccattgtgagctctgcataagtattttctaatttacctttttgtgcgaagatgaaagtgatgcttaaaatggtttgcttattccttaggtagataatagccccaagcatctagattccacaaccatgatgtatgccaaggaagttacacttacctacctctagatggaaagatatttgttgaaaactctataaagtgttcatcctcattcgtgaggaggaatgtcctttctatgttttttatggaggaagacccccttggaaagtgatttggaagtggctgtgttaagattgttgtctcttttgttcttttttctgatggtgaaggtttccttattcattatagatatagatccccctccttgaatagtaaaggaaaaggcttctctttagcttatatttcaaacaaagatggctcctaaaatcaccttgctccacgattaaccttgattatatccatatcttcttgaagatgtcccatccctccctccctcccttgactcctcagacatagtatcccaatgttatattatgatataaaagtcaagaatagggctggaggctcctatgtagacttagtcatctcagtgagggggagtggacccttttatcacctagtatttggaatttgcttgaggacttggtttgggaagcttgaaacagatgtgtgttggacccatttcagatatattgggaaaaggggcccattgtgcatgggaaatgcatctcaccaccaatgtgtaatgtgctatggcaaagaggccccttaaatcaaaagttctaaggggcttacaattggttggatcttgcttcctattatgcttgggtttatttggtagactaaaaggcctctattagttaggtcttgctagttgggttttctttgtaggcttttgtataatgaaccagagatcatttagaggtaggaattttctcaatcttgaagatctcctaagcctatcatgcctttggatcttctttaaaagctctaacccccattaagattactaccatctctttgtgtactccatttcttccctcagcttgcttgacctcctttctataaacaatgtaatggtcgttattctttaacttgcaaagctcttccttcaagcaaaccacgctcactctttgcaatctgtatagggacctaattacttttcttttcacgttgtcattaacccctctaaaaattcgggacagtatccacaacttcaatgattaactaaaaccaactcccaatcgttctttccacccttcctaccccttccaacttcatgctaattgattgagcattccaacttctttaattctctttcaagctttgacaagcaaactttccttttcctaaaagcgttagactaacactttgtctctttcctcaccttcaatttccttaagagattcaaaatctttgcctcgtaacctacagtcagcatgcccaaaaacttgctaaaatttgccaaataactttcagcccaatcctctgggtgagagccatcctcattgctcctctcactatcctcaatttctcccaaaaaaagttctctgtgtgttgtcaccaactaacccagccgaaccttccaacttgacctcattgccatccacccaaaccattttaatcaggttaacatccaaacaaagaccccctcttctggaaccctaggttccgtgaacctcctccaatccaacaaaaccacagaagcacccaaagaagaagaagaggcacccaaaccccccaaaggaaatatcggaaagggagaaatacctaggaatctttcggcttcctccattagggcatcattagagagcaaagagcaaagggacacccctccacacgatgaagcaagcatcaccaattcatcgtcttccccacatattctctccttcatactcaaatcaccaaccctacggctttggttcattgccttagctacttcgcttgttacaagggaagaaaaagtagtaggagcacccatcggttcctttaaaacaggcgagagctaccttaagctcctctccggcccaaaacaagggcttcttaaagattgcccctcacaactcttggactgggcagaaatagaaggcccaatagagccctcatttgaatcacaatcaacccacttcctaagggcctgttcacctctatttgggctaaaccctcaatcactcagcctaacccacttcctaaactcctctttgcaacaccagctgcatcactattcctgcacaagcctgcagatctgtcagacaccccattagagcatgctgtcccctccctcacaggaaccttccccttccaacctcgagaagtctcattccaaccacaagcagccacctcacccacaacttttttacttttcatagagtcaatttcagactcctttagggcgcgtgaactcccatcaccctcatcccttacctctcgccagttaccttttgggaccactcacgacgtccataaggggacttcccaccaaagctgctctgcaaagcaaaccaccccaacaccacttgtagagagctaggaagccttctcccaacagattttacaagaactctggcccattgtttgttgtgactatgggcaatatcttcatccacagtcacgaagctgccacacctatctcctaacatttggaaaagctccatgctccacaagtgcaacagaagacctaaaagcctcacccaaacttctatggcatgaaactcatttcgaaagcacccctcttgagggtctcgcttccttaaagacaaactcttgttttcaaacaatctcaaccccttgttaagcattgaatctgcctccaaggaatctttaaagacaaatgaaataagagcacccccaagcaaaaaattaagacactcctcttctcatttgtcagttctaaaagacccacttctttaaaacacccaggtcaagcactagatctccaaggtccctgttttaggtttatgaaattttcactgactttaaccctgtttgttactccctatcctcatcttgtgatgggcagatccccattttcagtcaaagaagtttgaggttcttgagctccttcaaaggtggtttttatttatttattattattattattattattattattattattcattcttgggaggtgatttgggaaaaattatggaattggaccagttaaagaaaagagatagggctatagctaattggtgttgcttgtgcaagaacgataccaatcatatcctatttcattatggtgtagctcctattctttggcacctattattcttgctctttaacgtgttaagatggtgtggtccttttcttttttttcttttttttaatattttgggttgtggggaggatttggtttaaaatgtgaagaaaagctcgaggttagcctcattatatttgttctagactatttggtagaagttgaaatcaaagaatttttgaagatgtggagaagtgatccaaatgttaaaggattcttttttttttttttttttttcatacagtattttctttggtccagattctgtgtgggagcaggatgttcatttgtgcttgattttgtgggttggtggggcctcagtgtgtttccttttcttgtttctcacccttgattaacctttatatacttcctgtgttcttggattctacccactttttgattggcattttaataaattgttcatctgcctataaaaaaggttgttgacccgtactgtgggtgggaaatggcctaaaactggctcgagcttggcttacaccttgctagggatggacctcaccaccatacaaggcttgagccttacccaacctcagtgcacacatatgctagcctaatcttggcctgcaccatagcctatttcaacttggggactaaacaatgtcaacttgcaagctaacctaacccttgcttgtaggctacctaacctcagctcagaagctagcctaacactaactcataggatagtggctagcccaatcataaccccaactttaaaaataagcttaaactagcttgaagcctctttatattttattctttctcttataggtgggaggatttgaacaatcaaaatgagtgtgtgcttcttattttctaagtggagggaaaagtgatttcattttcatgcctacttaaaatgcagcctcggggcctaggttcaagcctttattttggtaagtgatttaacttgaaggcactctagggttgtccaagtccaatgctagccaaactcaactcacctcccacccctagccccaactaagtttgtgggtttccttaaattttattttgggaaatgtttgaaaaactatttccatgccaattcaagtttggatatgaagaagtttgaatccttgattttgacttgagtttgatgctgctttttcttctttttttttttttttcatatagcatgtcatttatctaaacatttgaatctaagtagccttggcaatttggggatttgtgaatcccccataatattgcaattttcctaggaaatcaatgtaaaccataaaacaaggaattggaagctcttggcaagaatcttgtaaatatttgtataaaattcaatagtatattgaaaaaagaaaagctaatggggataagccttttagggtttattcacaaggtgagatcaatagtattttggtaatatttgtatatagattatatactgtcaaattttgtagtagttaattctagtcctatttagagtttagaaagggaggattcagttgtttggaagggtgggggaaatggaaattttggggttaaggaagcttataacttgctgattgctcccaacgattttgccttcccgaaaaagtgcatttgggtgaataaagtcccaaccaaagttgccttttttgcttgggaggccatgtgggggaagattcttaccctagataggcttcaaaaacaggggtggtagctccctaattgctgttttttatgtggttgtgaagaggaaactgtaaatcatattcttttacactgtatagtggtcagagtcctttgggagatcgtccttgccttatttggtattcagtgggtgttcccagaaatagtcaaagaggtgttaattagttagaggggcccttttgtttgtttgtttttttttttttctgattgccatagccttctgtccgtgttcccttctttaaatccttaaagagtggagccttagctcaccttgttcattatagagtcctcctagggttgtcctacatcaaaagaaggaaagtcagccaggtaggggtttgtaaattgtcatatatagaattttgaattattttgaaatgatccagtatgaattcagatttaattgtatgaactgattagttataaaatcaaaatattgttgtggaatgaaaaagttatagtccttacacgtggaaacctgttctgtaattttggtttcgatcctctcctgagtcctatatggaacaatttcgatagcctcagtccaccaaatcattattcttcagaattacatactttagtctctgatccaagcccaaggatttgtaaagcctgaacttgaattgtttggtgcagttaagtattgattgaaacttcaaagaagtcattaagggaaaatggagaatctttgggcagcatgttgtggtaacaattgtagatgtagttggagatagaagagttgggaaaactcatgacctctctctctctctctctctctctctcatgcgcacttgttatagcctgcccttgaggtgagagcttggtcattatcttgttcaggcctctatttacttatctctcttttcagccctgtccaatctatcggccctattgatttctctccagaaaaattcatatggcaatctaaagccccatccaaggtcaaggcctttgtatggctagtggccaacaagaagatcaataccaatgacttgctacaaacaagaagactttacaagcccttaatcttgatcattatactctatgtacgaggagtggtgaattgattgatcatctcattttacggtgtttgatgaccttggcgctttggctaggcttgattggagtcatcctaggagcacaagtaatgcgatgatcatttcctttagaggtttggggagtacaagtagaggcaaaattctttggaaaattcaattcctcactctaatttggatagtatgttaagaaagaaatgtaaggattttttaggataagtgaagaagtacatagtcaatagaggacttaatgtatttttattgttcttcttgggcctcaacagtttcagctttcaaaagcactcctcttaatgttatttagctcaattggaatttggagtgtatatagaaagtgtttaaataacaaatcttagagcaaaatttcagtctcttttgtagatgtattgatgccctaaaagagtagagctacatttcctttgtatagttttacatggtacaatattgaggtatttgtctagatggtatattggagaaaacctattcatatgttcttttggttagagtttgtatatttgggaaggattcctcatccttcacatgtaattttgaatcattatatatgaatattttgtttctagcaaaaaaaaaaagaattgtaagtgtggttgagaccttggctatgtttggccagctgcttattgaaatctgttggctgaaccgatgatattttggctttcaatctgttcttaaagatgtctccaacttctacttgttctgaatgtgagacaacacattgtcattaatatgattgaatttaggatgttttatttctgtgtcagtctacccatgcattcacttacattcattccttgtctttgaaggaggaaaggcctcaacattcaaaatattttctttttcccaaactgaagtgaagtatttgatagaagttcaactattatggaagaattgttatgaattgctcatctatttaaggttataatatgaaatactagctttttaaaagtaacgaattgaggtctgggaaacgtgttctgttaactgtagaaatatttttatatattttttggttatttaaatatattttttggttatctaaatttaatctttctatcataaactggatgtatcttgcatgaaaaaataaataaataaataaaatatttactaacatgtttgctaggaaaaaaatgattttggatataaacaatttcaaagtaaacaatgaataaataatttttttctgatcaagagatcttgacacataattttgtctcaacagctcttaaatataaaatactcatctagaattttttgccttgtttctcaattaatatccaactggccctgaacatgtgtcaattgttgtgctattaagctctctgaatatgttaatctctactgtttaatttctcaagaacttggcctattttgaactctagagttgcccttatggacatggatgcaacttatttatgttagcttctcttcaaaacattattttttggagtatctaattctggttactgtatgatgtccag

SEQ ID NO: 12557 - DNA, 7904 bp, Vitis vinifera
  Intron number 1 from transcript GSVIVT01038194001 (locus G SVIVG01038194001) derived from phytozome v7.0 (chr-ID chr5 ; pos 24253900 to 24261803)
tcattaaatgtagaaatgaccataccgatgaaataaattatgttaccctattttctcttttgtataccttctaatctcaccttacaccacccataatcggtattagacttcaagacataagctgtaaccattttgcataatcgttctagtgcatgaagcaatttcaactagcaagatcttcatatggtatattcaaggtatcaaaaaaaaaaaggaaaagaaaaagcaacgatagaaattcttaaaactttgcaaatgtgttttaaagtcataataatatttgtgtatgaacttttgttaatcttataggttatgtgctttttaaaatttttattttttatttttttagtttatggacaataatcaactaatgaccgtttttttttttttgtttttttattttataaagtaaggttcattttcggttttgaaaataacaaaataattgggggggaaaaaggaaaaggaattttattttattttattctttgtttgaaaattaaattgtggggttattagggtcaaaccttgttttaccttttttatttttatttttgtggtggggaaattaaataagatgagttaaaatgtttgctgatgaaaccgacaaaatggtgtatttttaaaagtgttaaacaaaaccaatctaatttatctctatttttaagtaatattttttatttaattgaaaattttaaaaatagcttaaatatctaaaatttactttctatttaaatgcagacttccacttttaccatcaaaagagcaaaaactaaaagcaatcccaaacagcccctaaggtgccatgtttgcatgtgttgtttcaaacatgcacttcaattctttcaaggcgagagaggtgagatgccaatgcacaacacctcaaaaggagaagtgtttttcatgatgaaaaacactttcaaaaagcatgtttttgtcttctaaataccattcaaatgagcctcaaaagaagaaaaaaaagtgggtaacctgaaaaacaccaattttacaaagctaaagtgggctctaaagatattctaaaatataaaaaacacaaaacaaaaaagtaggacccccttctagtcttataatactttagagcccttcctctattaattattatttaaaaaaaatatgtatgaaattaaatttcaaattgactcaaaccaaacggtcaatctacacttcaaaatgggtatgcaaatccatttttttggacccattatgcttgagtatagctttcaaagattttgacaagatgaaaaaaagttaaaaacctggttgtttttttgctctccatttgtttttgttttttttttcttttccaattttgggattttgaattgagatgaaaatggaaaatttagcccgcagtccaatttttttcatactttttttttatttacttaattttatcctagcgatttatgtatgattcaatccatttatgatccttttaactcatataaatttactaaattgatatgtttgaaaattttaaaaaattaaaatactttttttattataaatatcatataattaaaaaaattaaataaactaagcaaaagtttatgtatttcattttaactattaaaaatgttttataattaaaagtattaaataaaaataatgaactgagtgcaaaattaaaattttaatttactttgtacattagtaccatattataattaaaattatacaaattgattaattaaaataattaaaaggtattttaaaataagatatttatagatttaaaatttataaatgtgttaatcgattttataggctaaaattatattaattgatttaatatgtttggaattatattttcgtgtcatgttgagtttctatttagtaaataagttgtgtttatattaagttatcataacacgaatgttaagtatatatttgagttgagtaaatttttattatttcttactttaatacactacgtttgactatcacccataatttaaagagaatatcatcgtatgtttgcatagaaaaatgataaaataagaaaacgatctcaatcaaatcatttgagaaaagtacaaaaaaatgagaccaaaatacgaacaaatgaaacctaaataaaaataaaatatgattatttatagagttagactcctatatgtatcaaccatttgtagaatttgataactatgtgtattgaaaaatatgttcaatcaaatcatatcaaatataactctcaagtctcaaaactttgttctatgataccatcctttttatactttaatttcatttattatatatatatatatataataaatgaaattaaagtataaaaaggatggtataatatatatgcatacttatcatccacccatttcaaattgaaatttcaataacttggatggtgtttgtttttttgattttttgctgaaaataatttagttttaaaatttaggttgtttatttttttattttttcataatttactataaactttttattaaatagaaagaatcaaaatatgtagctttttttaaatagaaaaaaataacatattgatttttttattttttaatacttaataaaaataaaatattataaaaacaaataatttaatatttaatattattaagtattaaaattttatttaaaattaagtaaaaaaacaaacacaccttgcacttttcctttttgtacgatagaaaacaagggagaagaacccaatttcttatgggtaataatggggtgggagaagggggagaatggactgtatgagggcggtgcggtgcagagaacccgtgaatctcgcagcagagaataggccaagaagagaaagtgactccgctcagttatagagggctgtgccctatacattttcaccctttttactcatttatcctcatctttttccctacttttactatctgatttcccccatttcatggtacaaaaagtaaggtttctatcctccttcccacacttacttttgtgtcttttcctagattttaacttatttttctttgtaaatgtcttctactaagggtggaagataccaaaaacatgaaaaatatgatcaaggtaatatgaataaagtatcaaaaatggtatcgaggcacgaaaaatgtaatgtaataatgaaggagatatgatatcaaaatgatggagttagtttgatgatattttcaaataacggtttttgacaattgttcttaaaaacagttaataatagtaatttttaagcatgatttggtttttatggacaatgaaatgaaaactttcatgatagcaagaagattgaaaaaaaaaatactatcaagtatggtatcttacttcggttaagggaagacatatatccactgatcgaaaaattaaatgaaattaaaagatttgtaaattagatatacttcaaggtgcctaaatgtaaaaaatcttgtagtaggtgtcattagaagatacattatttttcacaattatattagcatgacaaattttgaaagtaaaaataggaaacgtcacgcaaaccctaaaacacttttgtgtttttctctcttatcgatctaaatcatctatatgaattccgacatatattgcatgactagtattgagtatgataattcaattatttttatgaatttttttttgacttgcttttcacatcattttgtgataggtcaaccattgatcactaaattttcaaattttgaattttcaacatggtactattcaatcacatatggttgctttagcctttaggtgggtcactcttgagaatctaattgtaggttcataattgattgatgactcttcaccatacacccattgaaatttcttatggttaaatcaattggtttaatactataaactccttaagacttcaaataacaagccattgtcaatggtgtacctaatttttatcttgttacattagggaaaggttgctttgcttgatggctcaacacttcacaccaaacaatttgcctatggttttgtcttcaaaaatttctaaaataaaataatcataattaataacataaatatgttaatttatcaatattttaatctacaatagttttttttttaaaaaagagaggataatttttatttatttttataaataagattttatttgtgaattaaaatataaaaaatttctccacccattcccataaaattagtatatttttttaatatgaaagttttcaaaatattcttcatatttttaattatttatccaaacattgtattgaaaaacacttgaaactatcttaaactatttttaaaaataaactttcaaaaaaatactttaaaattttgccaaatatatatatttttaatttagaaaataaatttcgttctaaataatggaaaaccgtttttaaaaacaattctcaaataaagatcaaaacctgaaattagaagagactttgtctatagaagccggataaaattttgactaaatttaaaataaataaataaatagattatcaaagactatatatttggcattaaacaacattttttattaaaagaggtaaaggaagtgataatattgcttaaataatgttttgctttcaaattatggaccgttccacaatagtttcatttacaatttctatattttgacaaattccataattattttattaactttctatactaaattttcatagtgattaaaaatatagatttttttttgttcttccaattgagtctccatttaatggttgtagcattaaaaaatataatcactaaaagaagtgtgttaaaattaggtgtgaccatgaagaaattaaatgagattctctaataaagatttgtgcattgatggcaaaaatttactcaaaatgtctttttccaaaattaaaattaaatcataaatggggtccatatgccattccaaacattccctgtgagttatactcataccaaacttggttgaatccattaatacttgctgcatttttatattactttactcgaacgtcccaatgccaaagtcaaaatattctacatgttaaacatattttaatgttcatgtaatttaaaatttaagcacttgttcatattgaacccaaacaataacctctatatatttgtataatttttaaatattttaataataataataataattttttattattattatcttataatagttcaaaactcaaatcaaatttaaggtttaagccatgtttttaaagtataatcttaatattaccagtctttctatgtgtctttctatgggtgttaagagtatgacattcatatcatactcaaattatgcgaactaaaacttttatgtatttgtataatttttaaatattttaataatttattattattatgataacgtggctaacctttttttttaaaaaaaaaaagaaaaaaaacttgaaaagtattctcatttaaataaattttcataatgttcaaattattttttaaaagcatgactttcttcgttttaacatttcgtttaacaaaatctaagcgagtgatatcattttcaacatctcataaaaatcaaagctaaagttgaaatgattctcgtaaacttatgtcataaaaagtataaatcactaaaataagttaagatcacgtaataaaatgactaaaaataacaaaaaaagaccatcatgcatgcatgttgcaaacgacatgacttttggtacaatgaaatggtggaaaaaaacaaaatgtatgaaatgatataacttaagtttcaagttttattacttagtaaggtctcaattcaagattgtattaattagaacgacaacggaagttaactcaaattcaatatttccctaaaatcatactaaattggtatgcttgcttgtgtacaaattattcttggaactttctatcaaaggaaaaaagaaaagtccaaagtcatctatgtaccatttctatttctaccattatggacgatattgccgttgtgactttattatttgtggggtttcgcataaaacttgtaataaatgtcttctatgaaaccatgaagatggaaccaaagattttgaccatgttctattttttcttagatataaaaacctataaattcaaaattttattattatataattttatttttacatttagttgtcaccttatttataatctcattcattgtaattttagaaagtatttttaacctaaacagatgcttttgaaaaaaattaggagcttgtttgagaatggttattttagaatatttttttgccctctataacaaaaaatatgtttggcaataaaaatttgttttctattttcgatttttgagagaatatcttttaattattttcatttgttttgtgagaattgttttaataaataattatataaacatataaaatgattaaaaataaaatattagatataaaatttattttaaaaatattaaaaatattttaagttttcaaatagacttttgttcaatagaaatcaaaaacaattttaaaaaactaatttttagaattgttttcgaaaacagttactaaatatagtttgattatttgaaaaaattttaaaattatttttaaaaatataaaaaatcacacatagttttgaaaaaaaatacttataatgctttttaggaaaacatttaataaataatatttctaaaaacacttataaataaaacacttttattaaaaacagaataaaaatattaccaaatacatttttaattgttactctattttctaatttcatttagattataataacaaatgtttatgcataatttttgaattaattttattaattttttttagatttcgattaaatacatttgattttattaatttaagattattttcaaatatacccatgagagtaataagtgaaaatgccaaaggaaaaatgaaattccaaaggaatgggattatatgtatttacaaaaaattaagagaaaaatattatgatgcatgaaaacaaaaggtaagggaggaatgaaaacatacttttctatgcaaaacgacaagaagaaaaaaaataaaaataattgggcattaaaagtagataccaaaatctattgcacagtgtcgattagggcgccacaacgcgctcccatggggcgtgagactaaaaaaaaccccatgaatctccaagccaaaagttcaatcagtggctttcagagattttgagtgatgacaagccaaaatcaccacttttcaacacagtgaagatgtgaaaaataccctttctttaattcttttctctcttattagattttgtttcatttttattctttcatcttcatggccacatcaccactgcaagagtacaagtaaataatggaaacagctcatctttacctgtggatgcaagaataaatttctttttccaaatcccaatggccagaaaaaatgcctgtctgtgttgtctgtcagaagtttttttttgacttgttttggactgatgcccttccgtcttcctccctttcatcctctccgtactccacacatcgccaagactccatcatcaatcccatctttttcacctcactttcctgaagcagtgatagtgtaatggttgggttaatggtttgttgctgttggaggtgtgaactaccattccatttggtctcagcctcaactaccctgtggctgtaatgtagtgtcactgcgataacattctgtttgggttttgggtttgggatttgatctggtcttcaactaactcaaagctcaataattctctttggtgttgagtgacaatcaaaggagagtttcagtggttgctatgtctctcttgcttacacttcagacaactcaagacacttgaagttgcttgaaaacactggagtcgaacacagttctaccatgcctacaatttttttctttgtttttctgttttgtttgtcaaccgatttacgtccagctgccgcggctgactatcacctgcagacgcggcgg

SEQ ID NO: 12558 - DNA, 3397 bp, Vitis vinifera
  Intron number 21 from transcript GSVIVT01011680001 (locus GSVIVG01011680001) derived from phytozome v7.0 (chr-ID chr 1; pos 5267520 to 5270916)
ggctgctcaagacaacacctcaacagccattggtatgcttctgtatttggttgttattcactagcatgcttcactttgtttctgtgccttagattcagtatttatcccaacttttctaattgattcttttgcaaattcatagtctctactgattcttttacatgctttatacaatatttttcactctttgagaaaatgttctgcatagtgcccccaaaaacttttagttggtttcaaaggttaaaatggcttgttgaccttgaataacttctgatcataatcccatgatgaacatggatatttgttggaagcagaaataaatcatatttatcttgtcaaaagcatagctaagtagtctgctacgattatattcacagagctgtcctatgatcttgaggccaatgcatcaattgcatcatctctagtcccaccaaaaaagaaagtgcatcctctgtctaaattgttggtttttccttttgaatgctactgaaatcttgtaaagggtaaaaaggaagaaatagaaaactgtcagtaacaagtgtgaaatagttgacatttatgtggcttatgaaccttaaaatttaattctcctcactcctcaggtatctaaaatcttaattccatgatttaaaactgaagaattcttatttctactcattttattttgtattatgataaagcatatgacaatttaaattggaacccaattgaactgaaaatttttgtaaggaaaaacaaaaattgaaaccatggaaaaacagataaccattagaaatgcaaaacatttaatgcaatacatgtaactgattatttgctatgtaactactatcctaacataaataagaaactgtgcccttgaggcctggctcaagtggtaaagggacgggaagggtttgtgggaggttcaggttcaagtcccaatggggacaaaaatttacctatcaaaacaaaaacaaaaaaacataaataagaaactatccattttaatgttgatactttaatcaattttttatgattgaggaaaaaaaaaaaaagaaaacctcttgtagttggaactagcttataatgctctaaatagcatattccctttgtaccatgttctgtgataaggagcatacagtaacaattttcattcaatatgccaaacctagaacaaatatgcaatgattttcattcaatacgccaaacctagaacaaatactaatgtttcaggttacgttaaccttatgtacaactaataaaaccctaaactttatgaatagtattgtcatgaaatgatttgattgatgtacttgaaggatcgtttaattaatgaatgaacattatattctagtgctagaagcaattttagaactctgtgtctgtatgtgtatttgggtgtgtatgaacttttttgttcccactatagccttctgttgctgcacaaagataaaatgttcagataaacagtagtgcttacatggcttggatcagcttaaactttggaattgcattctactctgtttggggactggttctggtttgaagattgatatggacaagagcatgctaattttggtcggtcctatggataatgtttcttctttattagcagctcttggttgtgggatccctagtttgcctacctcttatctcgatctacccatgggagtggcttctaagacagttggttgaggatcatgttcaaaaagggattacccttgggagtgtcttcttgtcccttcttgcgccagatttggtttatatttggagaaattctgcattgctttctttggccgattctgaaggggagtgagtttcatcttattgattggaatgtggtatgcctttccaagaggaacaacggaggggtgtttgggaattagaatgttgaatatcttaattagtccctgcctaggtaaatggttatgaaggtttacaactgagagagggacagtctttcatgagtgattgttgacatgtgtagggaagaggggatgatcctctgatttaatgagaggctcagagcctcatgtgaaggaggtgcagatgggcattaggaggccattaggaagggaattagggaggggctctcatgggaatgtgggtggccttccctagaagggggggatgggatgtttgagaattagaagactgaatatcttaaataaagcccaccttagtaaatgttcatgaagatttgctattgagaggatagagtctttcaagggtgactctaaacacatatagaggagttgatgatcctctaacttaggtgctcccatgggaaaaaggtacagaagggcattaagagggggtggatgattttctgaaattcatttttttttcctctaggtattgtgcagacagcgaggttttggtataatgtatggtgtgaagaactccctctttttttgtgccttcctgagttattttatatagccggacaaagtagtatcagaacttctcaaatgctgaagctttaggaacccaaatcttctgggagattttcagggagtgaattagagatggtggggaacttcatagaagcaattaattatgtgcaatcttgttgggaggggggatttgtatgtatacaaataagggggaatgtgtcagtgaaatcttgccaccacctgctaacttcacaaggaggagctattttccctgctaaataactattgaagcagatgctactttgagaagtggggaaccattccgaccttggactatctcaaggtgagaggatgaagtttggtgagcagttgctgtttgtgtaaatgaaatgacaaatcagtgaatcatcttttaaactcattgctgagttgcttgagagttgtggtctttggttttctctctgatatctccagtactcgcttgcttgttgaaaagagtaggcttttagttggtattgtaattttatcaagaaacctaggagaaaggtgggatccctgtccccctttttggctcggtgcatttggaaagaagagcagaaaaggatcacttgcttcagtcttgcacaaagggtggttcttttacagaaaatgtgttccctggtggactttattagcaaaatagattgtaaattttgtttaagtctagtttttttccttttttcctgtttcctctatacggtgtcactttgacatagatcaggtgcacctcctatgaacatgtgttccatcccctgttgatgcttgcagttctttccttttatctatcagtgcaaaatttacacattgcatagagtcatttgtaggagatagttctggtaatttcttgtaaggtccaatgaagtctattgctgtggagtcaatcaagtttaaacagtttgctttttagattacattatcttgtctaaaactctgaccatgttgtataactggtgttttgccaggtaatatagttgccctccttc

SEQ ID NO: 12559 - DNA, 2433 bp, Vitis vinifera
  Intron number 7 from transcript GSVIVT01035479001 (locus G SVIVG01035479001) derived from phytozome v7.0 (chr-ID chr4 ; pos 1599572 to 1602004)
atcactgcttttatcaattgtgtgcatctggaagggtaatatttctatatataaaaatgttacttaaatttgtataaaagtgttaataactttgcccattgacatttctcatgattatatttcctatcttctgtataaccagtttttcttttgtgtcacacttgcttttgtttacttttacgttccccgtagcgtgggtgtacagggtgctttggccctgttaagcttccaatttaaccaaagagctcaagcttttaggtgatgggccaaaaatgtatatcaagaaccacaccaaattgatttgatttgggctataaatccccaacaccttgcctcatggatgaccttcctctgatcttacctgtgcactcaataaattaaggaaaataaacaagtggtgaggacggtattcatgaagtcttgtaaaacaaggctctggtaccaagttaagtttgtaattgacctaaaagcttaaactctttggtagtgggccaaaattaatctgctaaaataatgaatttaactagtgcgtctaaaatttgaggcaaagaaggttatgagttcaaccttaatttgtgtgaaatttagggctgtggtgaccaatgaacatgaaacctgatccaaattcaggaattgttaagcatatcataaagaacaacagtatttcatatcatacatgtcaaaatttgttttattgcaatgtatacatcctaggcccatggttcacaattggtaattcaaacttacaagtgggtaaaacataaattacatcccatcttcaaacagcttaatcacaccatgatataaatgcaaaagcctaaaaaaattctcaacatggaaaaattaatataaagtcaacatcacgtgtaaagttcaaatatcttcctcatctagtgtctttttgtctgcatatctttgttttacctcatcaattctctcacatataacaacatgaagttctccaccaagggagatcccatctatcaatgctcccggataatacaccactgtaagactatttttggactataacctaaggaaaaatctcataccttgtcttttaggactcgaatgccaaagtataggatcaactcgtgtcttttgagactacaatccaagggtaggaccaatcctgaatctgggattaaaactcaagggcaggatcaactcagtgcactcatatcaaagtgtcttcctctaaggccctgaggaccacaatacttcatatctaatataactagaaataatgtctatgactgctcaaaaatagctcctgacatactaactcatcttctagttatcatccattgaggttaaattctgggaatattgcattgtaaacatacccttagtcatctccatataactaaagctataatgactaagatcattccatctcctgaacaataactcatcatcacataagaacaactgttcatatgcagcaaagctatcatgacatattcaaatactttggaaggccaatgtattcatatctaagaaatctcaacaaatgatttagaaaaagaaactaaagtacgtagagattgagatactattcccttcttatgctctcacttctgtttgtggttcttctatgcacccttccctttcctttggcctataagataaacattttgccataaaatagttaccctgtgctgcttggtaggtgcttgctgtggattgtattaggttttcttattgaacagtgtttaaggtatcttataatattaccttgatgtgctaaggtgtcatgcatacgagatccagataataaagaaatctggtttgccatggctgttaatccattgttgctaaaatgacatattttctctcaagctttgttgtcttctggagttaaattctgaaacgatgcactgaaaagtttgataatttctagcattgtattttttagataattttaatttgataaaatttctcttccaaaatattgttgcttttttattggtagaagagaagaagcttattcttcgacttttaagtttatattatttattacaaaagtgaatagtaaatttactcagccttaatattttgttttgtaccagcagaatggttttctttatgtatttgaaaataagaaaatggaatatatatgcttcagggagttgggctctaggtgaagtattatttccatagatgcttttgtgttataaaaatttcagctttcttaaaggagcagtcattttatgcgttgcttaattattcagggcatagattttcagagaacttttgaggctgactacaattttgtctattcaatttctaatcttttttccctatgaatgtattgtagtgttcaaaattttctagaatagatgatcttcttagttttagttcttttatcatctttcatggacatttcaagcttatggatgtttcctttcattatgtcttcatctgtgaagg

SEQ ID NO: 12560 - DNA, 2431 bp, Vitis vinifera
  Intron number 1 from transcript GSVIVT01008900001 (locus G SVIVG01008900001) derived from phytozome v7.0 (chr-ID chr1 8; pos 3250525 to 3252955 reverse strand)
ctgagcagacccataacccccctcaacctctacaggtaatccatttgtggctgcttccgtttcttaaaatgttttggtgggtgtgctttaatttccgatcatgtttggccatttcatgtaaatctatgggttttttttttctgttttccacatggtctgtctagcatccattgttgaagttcttccaagaaaatggtctagaggaacaaacaagcggtaaggttcaaaaccaaggctttggtaccaagcgcatcaattgacccaaaagctttaacctactttacctaacaatgtatatcaatccaattagtttaacagctattggctctacaacccctctggtggttgattaacccacgttttggatatgaggacagacctcctttttcttttgatgttcttgtaatagagatttggttaaagttcagggctgttggttgcaggttgagtaggatcacgtttcttactgtgctttaagttttacttgaatgtgactcttcattaaagagacacatcccttaggaccatcatctacatcctcttatggtggatggtcatgtcaacattgcccatcactcttttaactccaacttggacatatttgtccatggtttcagaagcttctaactgtgctggtgccttctgcacaagcagagcattgttaggattctgtgttgttgctaatctgataatgcattgttgacaacattggttaccatgctgtattagtccacttgtactggttgccagtgtaccgtataatttcttgcttagttgtgcattgtgaacagcattggttaccacttacaatgctttgttattccagtcgtggtagcttattgttctgaaaatgtatttgaattttggtgtgtatccaatataaatatgcaatgagtcaagcattcttttgattacttgtgcccatactccatttgatttacataaaaaagttgagtttgtatacgtgtgaagcatcatcttctacaggttgtcttttgaacttccacaagatttagtgtaatatattgaaatattacttgcattttgttcctcatatcacacaaaatattgtccaattggcaggatgaatttctaagtagagggtggcttagtattagaggacttctttaggagttccatgcatcctaagtatgtttttatgtgcaattttgatggattttatcttttgttttcgagaaaatatattcctcttgttttgtggtccccattttccttttgtaggcctaatttcatattgaatgacatgtatgttctgcatcattgtttagaatttacattggcattgctttggaaggcttttgacatgttacttgaggcaaatcaatttttttgaacagcataggtgtcagtcccaacaatcatatagaaatgaatcaaatgattgtctgattttgacatcttccttgtttgaagcatcgtggctatggagcttcatgaaatattcattgttgataccttaaaaatatttatctttggttcagttcattttaaatacagcttcgtttattaatttgtatattttagttttgttgttcttaaaatctggccaagccaactggaccttggtttagctttgatgtttttgttacataggttggtttatttttgtcacttgaggttggattcagcttgggattttacttatgctgcaaatttgatgagcagtccttcatctgtgcttgtgttgggtaatagcaactttggttggctatgaaagatttagtgcatctaactgaaaagaaataagcaaatcaagttgcacttgtaaataaaaagcaacggagagcgtgtaattgccggtttctgaattaggcatgttcctgtgtctttatcttgggttagagattcggcaattcaaaagtaaatcacattgcgcttggaaataaaaaagcaacagagaacaagtaaatgcccatttctaattctggcttggacctctgatcttatcaaaagtaaatcaagttgcgcttggaaatagaaagcgacagagtgcattttgaatggcttggtcctgtgtcctgatctttggtttaaatggacactcaacaccactcctcgcccaaaggcttgtacctagaattattcttatttgtcaatgaacaatacatggtattttttctgtgttcataagtaattgtatgtttacatgtgttagtttgtgcaattttatgctcttttttctgtctcaaacctacaaaataaaaaacctaaatgctaccactttcttttgtttagtgacttcattatacaatattatgatgattgcgatcattgagtgtctgagtaaaggacataatttcagagaagccactccatgttcttatctgctgtttttcatttcccctttccctaatattctggcttttcattgttaggttgcaaagcgcttggagaaattcaaaacaacaat

SEQ ID NO: 12561 - DNA, 1297 bp, Vitis vinifera
  Intron number 5 from transcript GSVIVT01036188001 (locus G SVIVG01036188001) derived from phytozome v7.0 (chr-ID chr1 4; pos 9308267 to 9309563 reverse strand)
aaagggtcagtttatctctcagaatccttctctttttaattcttatgattttaattttccttttaacattgttatcaatcaaattattggaggaaaataaaaaaaatttagattgagctggttcttgtttctcttttttaattttcatttttcacctaaatttaacctaacggttaataatagagtttaatataattaaatatttaatttatttgtttttattcaggtttgaacggtggacgttgaatgtagtttgtatatattaaaatatttgtaaaattaattatgatatttcttcttactctaatttgaaaaaataatattcaaatatcctaaaatatttgaattattaatattataaaagttttataataattaattatataattattatgaaaatttgtattggaataataaaaataatttctaattatactttattagtaaaaaattgctagaaaattttctaagttagcacttctatacagtgtacatatctttgcataatagttttataattgaagtatatgtttgattattgaaattaattcactaacttttatatttttaatttgggaaagaatatcaaattctattttttgatttacaaaatttattgaattatttactctaatgaatatttagatgaatgtaaattatgttttgggttcttttttaattaagaaatatatattagaattagtggtagtttatttttattttgttgtgtgataaatgtatagaattttatggatttattttttattaatttattatctagataaaggaattttttatagacaaataaaaagtatttaagtagtatttttttatgataagtttttgtaatttataatgaattcattctcatccaaattacacgagattgtggtggtttaatttttttttaagacaattagataagaatcaatcaaaatatttaaggcttaaagtaatttgctttaacaattaaataaaaaaatgggaaaaaaaaaaccaaacagacgactcttttggaacatttcaaatgtatgagagttgtgttaaaatgaattccatggaaactgtgctatttcttgactgattttttccttacaaattcttatagttttagacaatgaaattcaacttgtttaagcatgtacattttcctccacccttctttaagatgtagtttattgtgttttcctacacatggattattttcttttttcagttagtcaaaatatataaataacaaaatggtgggatgaactctgcaggttgcatttcctagcttggattgcttatatatcga

SEQ ID NO: 12562 - DNA, 1777 bp, Vitis vinifera
  Intron number 10 from transcript GSVIVT01026124001 (locus GSVIVG01026124001) derived from phytozome v7.0 (chr-ID chr 18; pos 24256233 to 24258009)
tattgaagtcttcaaacacgccttggtcttcaacggtccgaccttgctccacgttcattaatacgaatccaattgaccaggtaaacgcttttggaatcaaatgttggtcttatcggagcttacttaatgagcattagccgttgatttcaattttattgtatgaatgtaagatcaggatttcactgtgtcttgtggaattgatgaagctagtcctaatgttggattggaaacttaacctatagccttaagcctcattctaaggccaataatttcactattataataatttttattaataaaaataagtgaagtttttattaattactctaaagctttaaatttaattacccttttgggtgattcaatgctttttcttatttataattttggataatttattaacttattaattattctaaaactttttttttatatatactttttactattactatggacccacatttttaaatatgtccccactcaatggcaagattcgttttttatttatgaacaaacaaatctcaaaaaagttctagtagctacttatttaatttttttcaaacattaaattatattttataaagtgtaattataataaattgagttaaaaaaatatttgaaatgatgatatgtaaaaaaattctccataatcataaaaaaataataatttatatgtgagtttcaacatgataaactcaaaaaaaaaaaaattctagaatattaaactattgatattctatgaaattgatttgtggagttattataataaaaattaaaagtttacagatcgtataagaaaataaaaacgtatttgaagtgcgaaaccaagataagaacatcactcacttgcatcatattggttccactactagcatatctaaaaatgaaaaacactaaaaaaaaaaaaacatagaaatgtataattcccaaatcccttatggtcaatgtaatctaaaaatcaagactattatattctatatagtttgtaatgcaaggtaaaatacgaacaaaagtatcgatgttttgactcctttgcacgtgggaattaagctattattaaaataaaagttttttttttcttttcttttattcattttgaagttttctttcagtttattttcttgggattaaaaaatgggtagcatcaaatgatctttcttcacattgactcgctgccaacgacccatgagtcgacaccatgaatgaacttgtaccttgccaactcagaactattaatgatcttaaagtcccaagctaactttaaactgtctccaacgtgaaagactttagtctttcctatggaatgacttggcctcctgagaaaaaaattattttcatggtaaattatacgatatcataccaaattttaatattagatttttttttttataatttgtatgattaaatttagattattgtataaacatattaaaagtgatatgaagttccaaaaaataaaaataaagtaataaataaataatctctagttgtgcctcataatatggctagggaaataaatcacctcaaatcaaatcaaagtaaagtagtttttgaatgatgaaagaaagacaaatatggtttttaagatttacatgaagcctaaaaaccttgtaaaataaagttcaatcattcctcagagacacacacaaagatggaaaacatgatttttcaacttgaattaagtttataaagtgacttgagtaaaggtatgacttaagagaagtatatggtttttatagacaaatagtctaaaaactgaattaaataaagccac

SEQ ID NO: 12563 - DNA, 2834 bp, Vitis vinifera
  Intron number 4 from transcript GSVIVT01031976001 (locus G SVIVG01031976001) derived from phytozome v7.0 (chr-ID chr3 ; pos 5851711 to 5854544 reverse strand)
gacctatcttcctctgccactctcaatcctcgcaggtactaatctaatcacgttgatattattttttttgcaacccccgtttgattcccaagaaaatccatcccccatttgatttccgggaaaattcattctcgtttgatttccgagaaaatccattcaaaacccccaaagaaaaccaaaaaaattgcttttcttttgctccctgtattttctggatctgttttaagggtctctttgttgttgtgccattggatttaaatttcacgaaccctaaatccacgatttttgagccagattttgtatcctgtgcgcgaaaatatcgggaaattttccgataaatcggtatttcgccgatatatcggcgattttgccgattttttgtcgatttttccgtcgatcatacaagtatctttgaatgttatctagttgttttgtgtattttaatttctaatctttctacttttccattagaaccaatattttaatcaaaaactcatatttttgcaaggataatatacaaacaaaattacatggaaattgtctatatttaaaataaaatattaatttccatgatatttcaatttttttattttaaacattgccctctcttagaatttattaaaacatgtatcttcacttttaaaattaaatgtcttattgtgaattgtgtggtaagagagaaacgctaggattttttaggataaggggagatcaaaaaggatattatgggatttacttcacttctactcctctctatgggcctcttgtagtgttgcttttagaggagttcctcttttgtgttatataactcaactggcttgtggtttgtgattcaaaagtttgagatagttgggggttatctttgtatatagttttggatacagtttcatggtagttgaatttagaatatcatgtacaatggttgggaagcttgttagcacgttgtttgatgataatgtgcttgaaatttgaatttggaagaatcagtcatgaagctggaaaaactgtactagatggtggcagttaacagacctagtgatgatgaaattcttagttcttattggttctgaactacacattactggattccattgacagcttaaatcggggctaggtgggatgggaatggcttttttataaccatgaatgtctgggtcagcttacgcgcacctcgactaatcccacgaggccctgaagttaacgaccgggtaaacctccagtggccctgaggggactcgaatttccaaaaccatgtagtcacttctttaggattttcttttttgttttatttttccttttaaaataaaataagtggcgactctgacttttccaaaactaatttttcattgttaaaaagcgagtctcgccaacaaataaggacgcacatgaagaatgcgagtccacaaatacccatttttcagtttccatagtttttctttcggcgccgtccgatatccgatatttcttcaaaatatcagcgacattttccgatttttcaatccctggtgtcaactatgttctctttcagtgatgttttctctgagacatttcgtcgaacaattattagtgataatagttttgattcaacaatttttttgagtgtcagtttacgttttttcttattttttatttttttgaaagatcacttgcaggttgattactggaggcattctgttatgtatttgtaggttttctacttgtgcataatttttccattgaatttgtagttgttgagctgatttgtgaatttttatggaaacaaggcaagagtattttggatatttgtatagttatgaaagaattatagcttattcatcttgtaatttaacattcaatctttattctaacttggccacatggtttatcaagttggttttcttgacaatgggattggtattcaagtaagattaggactcttgtgttggggtcgattttatgaaattgcatcaagatctccttgtctttgcttcttttggtgcaaaagttaatgtagggattttcagggcatttgatgttcatttggataatttcaatggcatattttagtgtcgcatttgtatggttttgaattgaaaaaaggtggtgttttaaataatttgcttttggttacattgtgttccccattagaaggtggaattcaggctacatacattgtttggtattaccatagggaagccttatctgggaaattacaacttattttcatgtatgaggttttcataacagtttaactagatgtggttcttctctgaagttgttaaatctgtgacaagcaagatgaactgggaattatccttattttgttggtaatattatctggtagttgtatgatcactacatttcagcatagaagatgccactgaaatccattctatgcttctggcttgattactaggaagaaggcaatccaaagaaacataatcctcttgtttgtttgtgcagttgctcctgtaataagaaaaatgttgttttttatatgtgaaaaattatcggatgcatggaatgaacatcaattgccataatcagaatgctgattgattgagtttattttgatcttgttgagaataatgtactctctattcactaaagaagccaactttgtttttcattggtcttaacttttcctttttaatggtaccatcttatgaatggaatcatggtttggggcttcaaggacttgcttggtagaggtttttatgccctgctttctaagtgaaatgagtgaggcagttggtgtactttgatgactctgccatcacttttagaggcattagcctaggtttaagtaaacccattggtttcttcacataaattcttcttctatattatcaggg

SEQ ID NO: 12564 - DNA, 2278 bp, Vitis vinifera
  Intron number 4 from transcript GSVIVT01013173001 (locus G SVIVG01013173001) derived from phytozome v7.0 (chr-ID chr2 ; pos 7154852 to 7157129 reverse strand)
aggtaagtcatgaattatctctcttcatgtttcttattgttgatttgctatgtctaggggctgatacatcttcagattcttttatttgaatacattagatcattagtcttgtatgtagattgtcatcgatgttcattgatggcatattcatactctatatcttgttaagctgttactacagatggaaatgtttaaagtaagttttaaggcattgtgctgggatgattaaagatatatccttaaattggtaatattttctttgcttttagtcagacatttggtgcacttagttactctactaattctataaaatattaatatgactaaacagctccatggagaagttgtactaccattttctctaatatgaagactgcagtacttgtgttgctactagggttggttaaacgccatgacttgacaaacctaacactaagagaccagccagcaccagattgctggtcccataacctaacttcccccctatggccacaattggtgactggaaactaatgccatgatcctattaattattgttggtagcagatcccaccatcttatttaacaccgatttctgtcaggaaaagggagaaactttagttgagttagcatggaccatagcatggtataagataattgtgatgccttcatttgatgagtgtaaagagcagcaatttgtaaaatttgggttaggggcaagtccctctagctccaactcaacagctatgttgtaaaagactattgaggcatataccttgaggctctcctatagatgaggctctgtgaattagccttaagggtatagccttagttggggtaattgaggcttaagcctcaagtctcaccctatcaagggccttaacgctagatcctccaatatacaaagggttctaatgggttgaaggctattgtgggctttaggtatatattttataaaaggcttacaccttaatcttcaattagttttagtggattctgtgcctttgtgggttttggtattgatataaatgttttgtcttaggttgaggcatgggttaaatcttttacaaaatgagggcctacttcactttcaattagccctttaaatgaaagaggaaaaagggagattgagaagaagaaataagggaatcgttggcttttgtagggttgagctcatatgtcactatcttcgttgatggataggggaaaacaccactataattgatggataaagaagaataatgggtggacattaataccgatgggaggataatacaacaattagatatgattatgattccttagaaaatcctacaagtgactcatgatgctattgaagattatttgatgaagccataatagagttgaatcttattgaccatgacaaataactatttttttattatgaattctatggttttcttattattcaattttcatgtgattttgctatcatgcttatgattttatttttttggataattttattatttatttatttgtttgtttaagttgaggcttacaccttgttccaccttgaggtctatgtgtcacctcatttgggtaaaatacctcaagactgcctttagccttttaaaacattgcttaatagattgtgggttgaccatatggactgcactaagtacaattctacaagataatgatgcagtaatagctactaaggtgtgaaacatgtttttcatgtccagagaagaaccaaatcaagatactctgcatcccaattacctaggctatgctatgcaaattgttgttttgccatttagttttgttggccagtatttgcaataaggtgttggccaggatgtccgttcaccatctttgatccttgttctctcatggttcctattaaaaagtctttgaggagatttaaaaaacccttcataatttggctactaatgagttgattggctaggtgctagttgagggctggtattgtatttccttttctttttgtgccctttggcacctcttgtataccccttgtatgcttttgggtcagcctcaaggtgcccttttctaatatatgctttttgtgtgtttgcctatcaaaaaaataatttggctactaatgataatttttaggtcatgaaaaaggtgatctaacctaagaaaaattgtgttatgttcttattgttattattgcctatttcaagaagatataaatggctccctctgttaatgtagatatgcatttagatcttattctcatgcacatcttgtggccaccaaattctctctatcctcatactttataactaaattttgcacttgtgtcagg

SEQ ID NO: 12565 - DNA, 8029 bp, Vitis vinifera
  Intron number 1 from transcript GSVIVT01025751001 (locus G SVIVG01025751001) derived from phytozome v7.0 (chr-ID chr8 ; pos 12222914 to 12230942 reverse strand)
acaaaaatatttcaatttattttcatttaaaaaaagtgatttatacaaattattaaaaaaaaaaaacgtaactttatttgcaaaagaaatcttaattaaaaagaaaaaaagatttaaatcatctgtttctaaaaaatacttttaatcacattttaattaaggaaaaagaattcatttaaaaaaaacattttttggacaattttattaaaaaataattttttggacaactttatttacaaaacaatatttggacaatttttattaaacaaagaaaattttggacaaatattatttaaaaacaaattttcaaactccattgaaaacaattttttggggtttttctaaatgcatttttctgaatttttataaataaataaaaaaaatttattttattaaaaataatattttaaaattgatattttatcaaaacacatttagtgacatcttcatttcatttaaacaaaatttctagtttgttcgatgttcaattctgtacaccctcaataagtatatacaaacgaatatttacaagaactaataaaaataaagccaaataaaagtggaaaataaacttacaacaagctccacgtgtcataaattcgtactcaaccaacaagattgcagatcggatccatgcaaaaataaaaatgtgtaagtattcaaaaatatgtagagtcgaaaataattattcaagcccaaattcaaacttcaaattaatctaataaatttcaccaattataaatgggtccaaattaacaaatataacccaataaaaatatctcacatatcatataccataatctaaaatttctaaattaataaccaaaatataaattcaattaatcaaacccaaaacacaataaattaaaataaatcttattatgcctaaatttgatatttcataatccaagtctaatttaatatgcatcataattatcccatgtccaaattaaataattctaatagaccaagctcatatcaaatattcaaatcattcaataaatctcacccatattgtgggcccaaaattcacatcaattaacaagcccacattaataatacacatgaccaaataaaataatatcttaagctcaatccaataagcccaaacaaataaccaattaccaataggccacatgaataatacatatggtcaaaggaaataacatttcaagccaaatctaataagctcaaacaaataacctataagcaataaacccaagttcaaataaaacaaacaatatgctattgatataatccaaatatcccaaattaatcaccaaatgcaatatgcccacaaatccaaattaacaaatttcaaattaatccaccaacaataaattaacccaaagtacatattaatctaataattcaaattttataaactacaaatgctattaaaatcaaatcaagaaagagaaagaaaagaaaaaaaatagtagtagtagtaataataataatagtaacaataaaaatggaaaatgagtgatatgggaaagtgagaggatgagagaaaaaggaaggaggtcgtcagtgaccttgccggcggtagtgaatggctttttggaaacaaaaataaaataaaataaagataaataaaaataaataaataaaatgggagaaaatggggatggagggggcgcgggaaaaggcacctacgtcacaccgttgatagtgtgagagtttaaggagggaaagagaaaataataataatagtaattaaataaataaatataaaaatggaagaaaggagctggaggatgggcagccaagtgtgccgatgggggagagaagagaaaagaaaaaaaaatcggagggatgaaatggggagatgggccggcagtgaataggagtccgtagtagggagttacagagatagagtgaacggaggggtaaagaaaaaaaaaattgggggttgaccccgtgagagtaagggggaaaaaactcctcccaaaaaaccaaagccccccataagccaaaaaaagaagaggaaagagcctagagagaaggaagagtcgaccaccttttcttggaaatggcgggaatgggagggaaaaaaatgaagggaaaccaattgggggagggcccgccaatctcgggaaatggagggagaaaaaaaatcaataaaaaaaggaaaaaagaaagatgaagggtggagagcgggagttttggacgtgggagagcatgggggtaggtgagggttggtggaggataggtgggtgaagagaaaagagaggaaagagaaagaaaaaataataataataataataatatatatatatataatataaataataataacaaaaaaaacaaaataataaaaattaagaattaaaggataagtgagccaaaaatatcacatgtaatcgggatttaaaatttgatgacaaaatttgacttaaaattaatgtaaaaataaaaatcaagacaaattttggggtcaacagtggctttaaggattcttcccctaaaagcacttggcttgtccgactttgcattgatatcattagcgcattacctagtccacgattcttcaaaatacgtatcctgcaatagcagaaattttttattcaagtttgtaaaatgaaagaaattttattttttcttatttaattgccataaaaataacaataagataaatttgtgccacaagtattttatttttatttaaaattgatagttaaaacaagaaaatataaggaataaacctgatgcaaatactaggaatattttgttagaaaggaaaataattttcaattttggatattagctttttaaatttttttccttttctttaattttttttcttatgtttttcatttcatatcttattattttaatataaatatttcaccaaaatatatgtttggattataaaagtgagtttgacaataattataagaagtatttttgagatttataatacttaaataatgaaatttttttagtgttacacttactaaaatcattactcgcattataagaatatgtttggtagtgattttaagaagtgttttttaatatttctaatactttaaaaataaaaaatttcataaaaactttcaaatattataaatggtagaaacgcttcttaaaatcaatataaaatgcactctaaagtatagttgaaaaaaaaaattatgacaaattttaaaaaatatgtttatgttgtaaatgaaaagtaatgaatgaccacattgatggccattatgaactccatttactcatctttaagatgagtaatgggagttcatattatgaagcctataaaaggcttcttacccccccatgtaaaagcatcctgagaaaaagaaagaaaaattcttcctctcattctctctctctctttttcattctctcaactctcttctctgatttcttctttcttattatatatcaaagtaagatatatttaatctctactactttgatttgtactgtatttgtccttgttttacaacacgttattagcacgaattgctctgaaggtaattctcgtatcttaaacttgaagttatttatatagaataaaattttgcatatttatattattgttgatttgttttgttacatattgttaaaagttataaacaaattatttgattttgtttataatcaaagttataccaatgctatcaagttattataactgattctaataatattgttttgtcatatatatgaagttattttacaatgtcgaatatcacaaaactcgaatttgtggcacttgacacttcaggaaagaactatctatcatggatccttgatactaaattacatcttgatgtaatggaccttggagctacgatcaaacaaggaaatcaagcatccctgcaggatcgcgcaaaagcattgattttccttcgtcatcatctccatgaaggtttttttttttatataaaaaaagagcttttgatgaaaaatcaccagtctcatccaactagatttgaatcattccctgaagtgaatgcaatatcgtcccaaactcgtggacgtggatgagaacgtgattatggttgtgaaagaaatcctcgatatcatggttcttatagtaataattctcagaaaatgaaagcctcattgcaccactagaagtggaacaatacgaaatggaacaatactgaggcaaaataagaaaatgggaagcatttacaagataaacctcctaagaatcataagaaatattgttatagatgtggtattaaggggtattggtcacgtacctgtcgtacgcccaaacatttggtcgacctttaccaagcatcaataaaagttaaaggaaaagagatagagatgaactttaccgatggtgatggattagacctaacctactatgacattgatttctttggaggtcccaatgaaaaaacagaccatttgataaatgatgaaaaaattaacattgattgatgttactttatatatataataatatattattatgtcttacatttacatctgatttactttgttatttacattatgccctgtttttttgttatatatgaaatccatgtgttatttggtctcaagatgaatgaggatgatgtatgtctcgcagactgtgcgaccacgcatacaattcttcgagataaaagatatttcctcgaattgacattaataaaagctaatgtaagtaccatatctggtattacaaacttagttgaaggctctggaagagcaaacataacgttgccaaatggaactagattccatataaatgacgcgttatattctagcaaatccagaagaaatttgctcagttttaaagatatccacagaaatggatatcatattgaaactatgaatgaagataatatagaatatctttacattacttccattatatctgaccagaaacttataatggaaaaactcccggctttcttctatgggttgtatcatacaactataaagtctattgaatcatatgttgtcgtgaaccagaagttcaacgacccaaaagtttttgtcctttggcatgacagactaggtcacccagggtcttcaatgatgcatcgaataatcgaacactcacatgggcatccactaaagaaccaaaagattctttcgcccaatgaatactcatgtgttgcctgctcacaagataaattgataatcagaccatcttttattaaagtcatatctaagtcaccaatctttttagaaagaatacatggggacatatgtgggcctatccatcaaccatgtggaccattttgttattttatgatcttaatagatgcttctactagatggtcacatgtttgtttcctttctacacgtaacgtagcctttgctatactccttgcacaaataatcagattacgagcacaatttctagattatccaattaagacaatacgtcttgataatgctggcgaatttacttctcaaacattcattgactattgcatgtcagtagggataaatattaaacatcttgttgctcatactcatacccagaatggtttagcagaatctttcatcgaacgtctccaattaatagctcgaccattactaatgataaccaaattacctacttccgcctggggtcatgctattatgcatgctgcagctttagttcgtattcgacctatagcttaccatgaatactctccttcacaacttgtgtttggaaaacaaccaaatatctctcacttacgaatctttggttgtgcagtatatgtaccaattgcacctacataacgcactaaatgggtccccaacgaagacttgagatttatgtaggttttgattctccatctatcataagatatcttaaacctttgacaagcgatgtttttacaacccgctttgcggattgtcattttaatgagagtgttttcccgtcattaaggggagaaaagttgattcctgaagaacgatgagaaattagttggaaaacgtctactatgacccatcttgatcctcgtacaaatcaatgtgaactagaagttcaaaggatcattcatttgcaaaatcttgcaaatcaattaccagatgcattcattgatacaaagaaagtgacaaagtcacatatcccggctgcaaatactctagcacggattgatgtccctgtaagacaattaacaaatgaatctaagatacgcctgaagtgtggtagacatgtcggctcaaaggatgtaactccccgaaagaggagaacccaagaaaaacttggcattctagaagaggccatcaaaatgactgatcagtttaaaattgataaatctatagccctagaagaggcacaaataagccttagtgaatacttgctaaaagaagggtatgtgaataaccctatatgcccatgcatcttcattaagaaatcagaaatcggatttgcaattattgcagtgtatgttgatgacttaaatcttgttggaactcctgaagagctcacaagaacaacaaattacttgaaaaaggaatttgagatgaaagatcttggaaaaacaaaattttgtcttggcctgcagatcgagcattttccaaatagagttttagtacatcaatcaacatacattaagaaagttttgaagcgtttttatatggataaagcgcatcttttaagttctccaatggttgtccgatcacttgatgtgaaaaatggacccatttcatccttgcgaaaaggatgaagagttacttggtcctgaagtaccatatcttagtgttattggtgtacttatgtatcttgccaattatacacgtccagacattgctttttatgtcaatttattagcaagatacagttctgctccaactcgaagacattggaatggtatcaaacatatattgcgttatcttcgcggaactactgatatgaatttattctattcaaaggaatcaaaacaacaattgcttggatatgcagatgcaggacatctttcagatccacataaaggtagatcacaaacagggtatgtgtttaattgcaatggtactgctatttcatggagatctgtcaaacaaacaatggtagccacatcatcaaatctttcagaaatactggcaattcatgaagcaagtcgtgaatgtatatgactaagatctatgatccagcatattcgggaatcatgtggactattctctatcaaaggtgacccgacaacattatttgaagataatgttgcatgcattgcacaaataacagggggttatattaaaggagatagaactaaacacatttcaccaaaattcttttatgcacatgaactccagaagagtggtaaaattgatgtgcaacaaatacgctcaagtgataatctagcagatttattcacaaaatcattgccaacctcaacattcaagaagttaatacacatgattggaatgcgtcaactcaaggatatcgacatgagagggagtatgcttgtaaaagggtgttaatgtattgtactcttttttccttcgtccaggttttgtcctactgggttttactggcaaggtttttaatgaggcagtcttaatataccaagaaaagaatattgtactctttttccttcgctaggtttttcctataaggttttttactagcaaggttttaatgaggcgtattcttttaatatggtggtcatccaagggggagtgttgtaaatgaaaagtaatgaatgaccacattgatggccattatgaactccatttactcatctttaagatgagtaatgggagttcatattatgaagcttataaaaggcttcttaccccacccccatgtaaaagcatcctgagaaaaagaaagaaaaattcttcctctcattctctctctctctttttcattctctcaactctcttctctgatttcttcttccttattatatatcaaagtaagatatatttaatctctactacttttatttgcattgtatttgtccttattttacaacagtttaatatttttttaaatgacgttattttttcccttttcggtatcctgaaataaatactctttgcagctgttctttattttatctctctgcctctctctataaacagtaaacataaactgagatcagaggca

SEQ ID NO: 12566 - DNA, 7256 bp, Vitis vinifera
  Intron number 3 from transcript GSVIVT01034488001 (locus G SVIVG01034488001) derived from phytozome v7.0 (chr-ID chr1 8; pos 20547536 to 20554791 reverse strand)
gttgaccgaagagtaagatttccttgcaaatttaattttaccatgctactgcaagttacggttcagttgcaagcctgtgtaggatatgagtgcatgcagttgctttcatatgggcttttgatttgtataagagactttcttgtggagtttgacattcaactcaaaactgttatcgggtgtgttgtggttggccgccatgaattagattatgtgggttctaatttggttgacaaatttgttgaaagctaagtgcaaactgagatgaaacgccttagtcgctatgattttgtaggtcttgttctagatagagataaatgataagaaaatcaaaaccaggatttccataactgatcatacatggttcatatataaggtttacagtttgtgtctatagattctatccttggaaagcatccccaaatttatatatggaaggaatgaaacttggaagtataagtctgtttaggatactgatctagcaagcttaaaaccgtatattggtaatgggtctgaattttcagttatgtagtattgattgccaaaaatcctttgatcttggaatcaattgaatattgagtagatctctggttagagaaaaagattgtaaagaaaatgaagaatgaagtataagaggttaaaaatgctttggatgcttgcaccatttgtattctgggtccgacttttcgagctcttcatttatcctttgcttctgcattcttctaaagtatttctatttgtcaggttccaagtctttttaatggtttggcttgcaaaaaaatttgagagaaagaagaaaaggggaaggaaagggtgatgggttttgcaaagatcaggtttttcttttgtgtactttgttatatgttcattctgtcctgtaattttttttttgctgaatttaggacgatggatgttgttttaagtattgtaatgagaatgtgccttaaggtggtttttttttttttttttctttttaaaattttaaaatattttattttaataatattgaaaatagttgtgtactttctttacatttcaattatcagacagctcatttgataatccataggagctagatttgtcttagttgaccgtccatctttcttgctcaaagttgctatggtcgtggaaatccctatttctttggtaacgatcaagtgggcaattacatcgagttggaatgatttctctttctttggtaggtaatttggaacatttgtagtatttgtttctagtttcctatagttcaatccaagaatttttgctgctttatacgatgtttaaaggaccaatctcttgacatccttgcacctctccaattttaatgctccatttggatcttgcaaagaatgaggtaacggaaatgaatggttgaaatagcttgagaaggaaattcattttaagtaatttttagaattttcttttgctctgtattcattctccttgcgttggcatttttgtaccaccccatatttgatgctagagcttttgtatgccttcatgtgattctctcaacttgtcttaattttggatttcctaatcaataaaactcaaacaatgtttacaatatttcacttgagttcttacttctttgtagtcttatcctcatccttctagaggcttcaccaactgaagctacccagagtccgttgtcattccccttagtcatcccaaccaaggattaaaatatccagatatatcgccaatatatctgcgatatatccaatatccgtgaataccaatacaaaattcgggaagatatatccatcaaccgatatttccagatgttttaccgattttttattttttcgtgtttcaaccaatatttcaccaatattttcgaatattttaccgatatttcactgcttttttgatttatttattattaaataagtaaattataattattttatttttatatttgacttaatttattaccaaaaatataaaaacataattttcttaataggtcttttttatataatctatatatttattaaatataataaatataaatactaaaaaaattatacatatattattatttatttgatatcattgaatagatttaaattaaaatggatcataattttaatattaaatatattttaaaattagacttattatcataataatattgtaaagtaatctataatgcaacttaataataaatttacatttataaaatttatattttttatcgatgtaaaggatattattatcaaatatgacaaattatatatataactataaaatatctatttttacttcttatataattttttagaatttttttttaatattttcagaatttttattaatttttacgttaccgatattttgtatcaaaatatttgctgatatatctccgatatattcaatatatccataaaattgaagtacggatatatccgtgatcaccaatattttcatctttgatcccaacataatcacttcaactactctccttttctttctttgttatgttttgtctgtttgtttgtttgtttctttttcccctcttttctcatgtacatgggtttctaaataggtatcattttgtacgataaaatgagttgattgcttagcttgttgttgaattttaccttcaacttgataattatacattgatcagaaagtattctagaggcaccacttaatccaacatactttgattctattctatgaacaatggcatcatttaatctgtctttttctgacaagttgattgaaatcgtgaaaatggttgcaatatatgcttgttcacccaaaatcttggctatttataggccccacttcaagtccttttgaaactaccctagacaatttctattttgggcctacttaattaggattttgattctagcttagttctctttggttatttgttaccctttttagttctactctgatcaaatcattcaaatttttgctgtgagcaaatagcatgaatcatctgacttctcaatctctatggatgatggacttatacataaacatgacaaaaatagttgatgctagcaataatgcattatttgaagtcaaaacattatacatgtcaggcgtgtgatatttagaatgaaaatggtgcatatttacgagtataaataagcaattgaaaactaattaaattattatcaaataatgaataaaccattctttttgaggatcaaaacactcataataagaagcttaaaaaagagcaccattaggtggtaggatcaaattggtgtttgtaattcctttttcatctttttttatttataattatttattaattattattattattattttattttattgaatgacttacacaaaacattagcctcatgttcatctctatgtcaaatggcaccagtagcttcttgtccctctttcacccctcttatcttcatagtctatgcactcttatctcttattgtaagaactccagctctactcttagttttcccttggtctccattgatggcagcaacagtggagcacatggttgcagaaagttctcacctccatctctcctactatggctgcaaccatggcagtgatctactcaacattttcccttaatgtctaaaaatgtggtggtataagccatagtgcaaagcttgaatgctttcttggttgccatttagctgcaattctgtttgctggatctcttgctctcatacattctgttgctaaaggattttttattattatttatttatttatttagacactctttctttggtatagattttgtttgggagtgggctgctcatctgtgctacttttttattttttattttttggggtctgactagtgtgatttcttttcctattttatatttccctttgctctctttgtatatgtccaacgtacttcgggttttcccactctttgattggcatttttcaattaaagaaatgctcatttgcctgtaaaaaaatttcttaaaatatcatcctacaatgaattgagtatatatattgcggatgcttttgtagattgagatattgctgagatagttgtgacattcccctgataaactaacataaagaaatttcagttgacattcacattgtatccaccaaaatattgaaatactgttgatgtttagtcatgcttttggttttccggtccttgatcagccatttagagtttgcagacttgaataaccatcctaggcttggctggcgaaagcctaggagctttgaatgtgtactccaatagagtcagattatacagctttattaccattgtttgcttgaactttgctcgcttgaatgagagagttcttcgaggctttgaatattaatctggaaaaaatttatatcttcattcaagttatgttaatttcgttatttgtatttgagtttatgttaaatatgaactatttaaaaccttattactcttaatggaaaaaattgattgctggaaatgtcttcctcttctttgggtttcatatcccaagtagcaatattcttttagtaaaaaaaacttatgacatgtggcaacatttgattcattgctcatttcttctttcacataacatgagacttgtggtattattcacttgaggagcaccctccttttgagggtctcctttactacaactccaaattgatagatgtatttatgggttgaactggaggaacaactaatttgttaggattgataataactattttattttcagttgttgaacttaaagaccaaaagacaaaaaaaaacaaaaacaaattatattcattaaaattggtaaaagtgaaatacacgctttgttgaccttcatatatatgatgtcttagagcttagaagaggtcaattaattttcaccatgaacacaagtttgaggagcttagaacagatcaattaatttccaccatgaacataagtttgagcgtgaatttgaagttttaaagtcaatggaagtttagcattgtaatctagagcttgatagacaactatgtgggctttagagctataattcaatagagctttactatggttttgaaactttagtttgacatagcattctgtctttttcaagttgttttagcatcagtttagagcttctcctaattatcaagtttgattagtcatctccaaatttgtcctttatagaataagcatctaggatccttaatacttattccttaatttgaaaatttttgtagagataaatatcaatttaagtaacttatcaaataaccctttattggagcaattgtcttccctttttctgtggatcccatatgcaaagtgatgatactctgtagaaatttttggcacatggtagcaattatggcttgttctgaccttttataagaccaccatgcccatttcattgaacaggtctgctctgtgcccccattcccacttcattgaatgtgttctctgtgcccccttcacagcttcctgaatctccatcttggtcaactattcttttgatgccatggtccacctaatgaactccctgcatccccttgtcaactgcctcagctatcttctctcttggtcccttcctcttcaacccctttagtctcaaacaacttcagctatgggtcttcaatccttcgttttctttcagtgctccattctggttatatcccattgtagttttctccagtttagctcctggtattgctgcacaaattgggaatgggaccctcagacttttaactcaaacccaggtctggttgtactccattgaagttaactcattgctttcctctagacatgggccctcatccatctgcaatctaactcaaacccagccttatgcacactgccattagctccaacatctccaatctcttctggtgatgcttgggttaccatgtatgggtataaaccctctcataaaaatcagacattggataaatccacatctagaaccttagacctcccattcctgtgcaagagagtctgctagttgatttgtcagttgggggtgccagggctacttccacttctcccttttctttagggatagcctctgtttgccaacggtttaatgtgtgcaaagccaacacttttttgtttctactgggatttgagcttacttctttttgccctcaggttcgatcctgaatctttccaccataacgagacatccttttacaaaatctcattctggtgcaatggttactgatccaactctttgcagcacctcttctttatggctttaggctctagcttactcaaagcccctaccacatgtggagtagtgttgcatatgttgcccaaatgtcttcttctcctacactccttttggctagctttgttctgcatctcctggttgaccacttgcactagccttccctttgacttgttaatggcatcaacctcaattatttcaaattgattgaaaaacttttatacaaacattgtcctctccttgtcaatgtcagctctaaccctaagaatacagcagaacctgaatccagaaagcttttctggggatgcatcagagatctgtgactagaaccatatttgtcatatcattaaattccttctcattttcagttttgtttagcatgtcatatttcctattctgcataactattatatcttgtgttttttgacaaataggcaggatagctcttcgactccttaatttgtaatgggctttcgaaaccactgttagttagctaggccttttaagctatgaaatgtgaataggtttgcttatcatttttatctctgcagttgtaacaacattgttgaggcagaaaactacatggaaattaggatttagttctcttttgaagcaattaagcttgtgttctacctgtaccatggaacttttctctttcttctcttttagtagttcatatgtgcagcttatatgtatatataatgaaatttactgttacttgtcaaaaatggaagcagattcaatagtaagttctgagattgaacgaatagataaacctaaagtcatttctgggaggccatatggttcaatgtcttgggatgagattcaaaatgaagcatgacattcaagtttttaaaaatggataaaataaaggtcaattaatccaggagttctgaaaaagagaaaaggttcccaaaccaattattgatttataatatgagttttagccggatttgacttccatttttgtgtagcatttactattaattcttcatttaaagcatttgttcattattttcaagagctttgtagttgtcagaaagtacatattaacatgtatgaatcacatgttaacacgtttgatcacatggattttattttgacagggtattt

SEQ ID NO: 12567 - DNA, 2483 bp, Vitis vinifera
  Intron number 5 from transcript GSVIVT01012605001 (locus G SVIVG01012605001) derived from phytozome v7.0 (chr-ID chr1 6; pos 4551396 to 4553878)
ctcctgatcctgtggtgtgagttttatgatttcaacaaccacttaggttttgtcaacttaaatgacaacttatttaatatctgaagtaaagctcctatgttgatatagagtatattcagtggaataaatgcagatgtacttaaaggactgcaggttctaagtatgacaaacaataggtaaatgggttatgcatgcgcatgggtaactgatagatcttattacaatattcaacatattccctatacaatctctaataatttctataatacccatatattcttaaaaatggtagcaaccatggaagttcaagttataacttacccagtgagaagtaaacattctaaaaaagggagttctctttcggcttcttgaacaagtggcaatccaaaatcatgattgaatagaattcacataaattctttggtctagaaaaccatagatatgttgagctcaaattctatcctacatactaacatagccccttaattgtcttgcattccttatatcacccaaataatagttgcaaaagcacagttccacaaatgcctacctatcttttcctaccaaagccctccaaagatagtcatgaagttgaatatcttttggagctgccaaatgcatcctaattgaagaaaacaacctttcttaaatctcaaaggaagtttagtagtgaaatgaatagattgacctagaactatcaactttgaaggaagtagcaaaaaatgttagttaaatgctgacacgaagggatctagactatgaattatgagaggttggagtaagttgtggtgtgcctaggtttaagaaagaaggcttgtatagtgtaacttagggctacaaattgaattagaaaattgatgcaaatgaatatccaactaaaatctagtcaagaaaggaatgaaagaaaataaagaaatcttaaattattctatcaagactatttaggtaattctggagattagattctttcttattataattatttagtagttttaaaattctccttaaaagaagcttctaaattaatattttttcttatagtttgtatttgattcttttgaatttagaagtcttctttatttgttttaattttttgatttgaaacaaaagatgtatttattatggttaaatagaaacatgagaaagatgagtagtcctccccaaaattatgaaaactggatcaaaatatgattgaactcctccaccgtacaaggaatttatacaaaatttaataaagtaaagtaagtttatgaagcaactcttatcacaagaagtttataaagtttttagtttttttttttttttttgcaaatttattttcttttaatcttttggaaaatatttaatagttttaggaaaggaattaaaatgtcaatatattactgcataagttatgtttacaatttattcaatttttagggatttcttaagtttataaataacgttaaatgatgtaaaatgagatgaatgatttattattattattattgctattattattgactccattatttttcttctatgtgagactcctagaaggccttaatgaggctttaaaggtttcctttttttttttctttttttcttattttcttataatttgtttttactttccttgattgacatacattttatttcttgctccgcctatcaaaaaaaaaaaaagttcttgctcctcttcttaaatcctaaaagatcgcatccctaacccacctatttgatggtggacaatcatcttagggttttcctacatcctcaacagcaattgtagggctactaagttatggtagtagctatttgaagggaaatggttattgatagtgaaagattaaagaatgtgtttgcagttgcaaaaaccaaaaggaaaaagggaaaatagaaaggaaaaaataacaaattggaataagaaagaaaaaacttctagaatcactcaagctgtcttccagtatcattcctttctatatcttctctccatccactattctgttgttatattaattcttctctctttctctcccactaactctttcacagtatgtgtgcaacatgtgataagtagcagtagttaaattatagtttgcttcttattggagttaagaattagtaggaaagcaaaacaataataaattgcaaaagagtcgtctttagctctttattttgtgtaagatacggttttcacttttcatgtaaggagagagcattttttttgtttttgtttttgtttttttttctttttttgttttagcttaccttttaacgcatattgtatacattgtgtgtattcggtgcatcatttcttaggtgctattaatatattttctaatgttcccttttaaaaaagaactcttttctttctctttctccttattgttctcttttgattggtaaggattgttgaacattttgactttcaactaagatcacaaccttgaatttttttctttgcagatcaacacttgtaactcattctattgtgatcaatt

SEQ ID NO: 12568 - DNA, 11695 bp, Vitis vinifera
  Intron number 1 from transcript GSVIVT01022738001 (locus G SVIVG01022738001) derived from phytozome v7.0 (chr-ID chr2 ; pos 15850534 to 15862228 reverse strand)
ttggcagtcaacctgaagcaattttctattttcaggtataacaattgtatgctaccaagggctatgactatggctgcttggttgcatctaacttttctctcattctagatatgtataggaatgaattatgcgtagaaattgctgttactgaatatgatcttttatcgatgtcatgtcttcagttttttttccctcaaattttattggaaattatgactttttgtttgtttatgaaaacaatggtttatacagccaccaagttctctcattttatattcttagtgttgtcattttacttgattattattcatattgagggctctttcttagagaaggttggccatgtggacgttgagatgcccaagcttttgagggaagagcagagtgggtttaagagagagtttgtcaggaggtacgatgataatcttatgagggttgtcccaagtgagagtaccttgataattttaaaagaattttgaggttggacttaagattaaccctatccactatctaccatttgagccttcatttaagggtgtttgagtgggagcaaactgggctaaagtctttgagccaatggtatgcttgatgatggtaaccaactgtccctattgggtaaagcgcactcaatgagacatttgtctgtggatagtgatgagcccttttcctcttaatctagtcagagctgcttcaccattgtctagtttcttccctccttggctagcctccgtttgtagttagtaaattagatatatgaaccattctatgtacttagtggtgggagagttgaacccaccattaaggtgtacatgtccaatatttgtcttcttgagccatactcttaacctagagcaagtgtgacaaatctgaaatgttgtatgtagactttatcaagggaagtataggatatgactttttctttgggtatggagggttgtaatcgagggtgccctcttgatgggctgagtaatcaggttgggaacccatcacaaccccattggggagagtgctaatttaggtgaccacttgcttcaagtggtgcataaaggcttccaatgaaggtacctttttgatgcgagggtatgcaaataaattttgttaccttaaatggaaatattaaaacaaccaccatcttgaagggatagtggagaagcaatcactaaaggtgctctctgatgagatgaaatagtggatgcccctcctcataaccctcttggatggggtgtgttataaggagagtcatagccttcacatgttggttaatgaggtgccaagttaagacaagaaatggacgatagttgaaccttccacctttgtcatggtgcaccacccaccttggaaataaacttgaccccatgttcttaagtgtgtgtttatgggtcaacaaagaaagggtatagaaaatattttgtcccttgattcacattttttgaaaacaccccatattttagtaatgatctttaggggggagatttcaaatgaagatcatttacagaataccactgcaactccagtgcccaactcaccctgacaatccaaccacagaactaagacccacagacacttgaaaatagcccttcgccaatgccaaccctaccatccgaaacaaccagccctgtaccagccgaaactaccatttctaatcccaccaaatctgcggttgctccatcattatcggcactaaaaccttggacagaattgtgcgtgtatacatggcggcagagttgtgagcaagtacaatttccttcaatccctgcatgtcaagacttggaaccggaaatgggttctttctttcctttaggtatacaaaagtcttctaaaaatttagatgttccaattgcacttagaaaaggtgttcactcgtgcactctacatccgatttctaactttgtgtcatgtgacaagttatctatcttgcattccatgtttattgctaacctttcaaatatagcaattcctaagaatatataggaagcgatggcagttccagagtggagaaaggcagtagaagaagaaatggaagccttgagaaagaatggtagatggaaaacaattgatctgctgaaaggagaaatggcagtaggatggaagtgggtgttcatcgtcaaatacaattcagatggctccattgaacggagcaaagcgagattagttgccaagggtttcacccaaacctatgacattgactatcaagagacttttgccctagttgagaagctaaatttaattcaggttctttcactagttgcaaatattgattggccactcatgcaacttgacataaagaatgcatttcttaatggtgaccttgaggaagaagtgtacatggatgcaccatcgggttttgaagaaaatttttagagcaataaggtgtgtcagctactaaagtctttatatggtcttaagcaattcccgagagcatggtttgagggacttacaaggtttattaaaaatcacagcttccactaaggacaaatggacagcactttgcttttcaaacataatgagaatggaaaaatcaccattcttattgcgtatgttgacaatattattcttacagaagaggcccttaatgagatggagaaattaaaaagcactttggcacaagaattcaagataaaagatcttggaaacttaatgttctttcttggtatgggaattgtaagatcaaaaaaaggtatttctatttcgcaaaggaaatacacccttgatcttctagagtagactaaatgcttggaagcaagccaactaggacaccgatggctgcaaacttgaaactcaaacgcgcaaaaggagaattggttgatagagggagttattagtgttgaaataatgccaaagttaggactttaatttaggaataaaaaaggagagatcatttaggatatttccttatgatttagtttcctaattttaggagagaattaagctagattgattttttcttattcagtcatttgtgtatatatatgtgtatggtgtgtaccgattaatatcaataaaggagttcagaaattcttcatggtatcagagccagttttctgaaaccctaatcccttctggccacctcttattcaggccatcactcattccggccaaatctctctggccatatctcaatccgatcatctctctctctctctctctctcattccggtcatcagtccctgttctcagagccaagggagaaaacgctttccggacagtcgaatcgtcgtcagaaaacactcaccgcgggcaacttttccggcgaactttccagcgacggtttttttctacaccacaaggagcgcctggaggagatctccaatttgtcccaaagcaccggaactagaaacccatccacgcgccgcccacgcgcgtttttccggccgacgactgcatctcacgcgccggcgcgtgagggcacgtgagccactttccggcgacgcgcttcctcctccaggctcgcctgacgccgaccagccacccttcctacctgtttgtgcaatccgagccctgcacgtacctcttttggggttcttttgcttccgcgggccctctgatcagattttccggcgtcctccggctattttttctcaactccagtccctgcacgtgccttgaaaagtgttcttctacctttccggtccatgacaaaatacggaatggcatcatcacaagtatccagcgtcacgtcaccagaatcagggggcagatctgaaattccaaaccttggtggcaatgattcctctcctattctcatcacaggacacaaattaaatggccataactatttacagtggtcacaatctgtgttgctgttcatttgcggtaaaggaaaggatgagtacctcactggagaagcagtcatgccagaaactacagaaccgggtttcaggaagtggaagattgaaaacagcatgatcatgtcatggcttatcaattccatgaacaatgacataggcgaaaatttcttgttgtttgggactgcaaaggacatatgggatgcagccaaagaaacttactcaagttctgaaaatacttcagaactatttcaggttgaatcagctctacatgacttccgccaaggagagcagtcagttactcagtattacaacacattcacaaggtattggcagcaacttgacttatttgagactcactcatggaaatgttcggatgatgcagcaacatacaggcaaattgtggaacaaaagagactgttcaagttcttcctaggactaaacagggaattggatgatgttagaggccgaatcatgggcattaaacccctgccaagtctcagggaggctttttcagaggttaggcgtgaagaaagtagaaagaaagtgatgatgggatcaaaagagcaacctgccccaacattggatgcctctgcccttgctactcgatcatttaatagtagtggtggagatcgtcagaaacgggataggccttggtgtgattattgtaagaaaccaggccattataaggagacttgctggaagcttcatggcaaacctgctgattggaaaccaaagccacggtttgacagagatggcagagcacacgtggctgccaactctgagagcacatctgttcccgagccgagtccattcaacaaagagcagatggagatgctatagaaattattaagccaagttggcagtggcagtactaccggtgtagccttcactgctaatcgaggaggaatgaggccgtggatagtagacacaggtgcttctgatcacatgacaggagatgctgccattcttcaaaattacaagccaagtaatggtcattcatccgtccatattgctgatggttcaaagtcaaaaattgccgggacaggttctataaaacttactaaagacttatatcttgactctgtcctccatgttccaaacttggattgtaatcttttgtccattagcaaattggctcatgatctccaatgtgttactaaattctatccaaacttgtgtgtttttcaggacttgaaatcggggaagatgattggcagtgctgaactgtgttccgggctctacctcctttcatgtggccaattctcaaaccaagtctctcaagcaagttgcgtacagtctcagagtatgtcagagtctttcaattctgtgtcaaattctaaggtcaataaagatagtgagattataatgttacactatcgccttggtcatcctagctttgtttaccttgcaaaattgtttcccagattatttatcaataaaaatccagcatcttatcactgtgaaatttgtcagtttgcaaagcatactcgaacaatatatcctcaaatcccatacaaaccttcgactgttttctctctaatacatagtgatgtgtggggtccctcccggataaaaaatatttctggcactcgatggtttgtgacattcgttgatgatcatactcgggtaacatgggttttccttatgaaagaaaagtcagaggtcgggcacatttttcaaaccttcaatcttatggttcaaaatcaattcaattccaaaatacaagtcctcaagtcagataatgcaaaggaatactttactagtagtctcagtacttatcttcaaaatcatggcattatccacataagttcttgcgttgacaccccacaacaaaatggggtggccgaacgcaagaatagacatctcttggaggttacccggtgccttatgttttcctctaatgttccaaactatttctggggggaagctattctcacagctacctatttgattaaccgtatgccatccagagtgcttacctttcaatccccacgtcaacttttcttaaaacagtttcctcacacccatgccgcctcttctgatttaccactcaaagtatttggttgtacggcattcgttcatgtgtattctcaaaatcgtagcaaatttgctcctcgagcaaataagtgcatttttctagggtattctccaacccaaaaagggtacaaatgctattctccaaccaacaaaagattttacaccaccatggacgtctctttctttgaacatgtcttcttctatcccaaatctcatgttcagggggagagcatgaatgaacatcacgtttgggagtcttttcttgagggtgtaccttcttttcactcagagtcaccaaatccttctcaattcgcgcccactgagttgtccacacccatgccgccatcagttcagccagcccagcacacaaatgttccttctcccgtgaccatccagtctcccatgcctattcaacctatagccccacaacttgctaatgagaacttacaagtttacatcaggaggaggaaaagacaggaattagagcacggatcacagtcaacatgtggccaatatattgactccaattcaagtcttcctgaagagaacataggtgaggatagggctggagaggtgttaattcccagcattgatgattctactttgccaattgcattgaggaagggtgttaggagatgtacagatcatccaattgggaattatgttacgtatgaagggttatcaccatcttatagagcatttgctacttctcttgatgatactcaggttcccaacacaatacaagaggcattaaaaatttcagaatggaagaaggcagtacaagatgagattgatgcacttgagaagaatgggacgtggactatcacagatttgccggttgggaaaaggcctgtggggtgcaagtggattttcaccataaaatacaaagcagatggatcagtcgaaagattcaaggctcgtttggtagctagagggtttacacaatcctatgggatagactatcaggagacttttgctcctgttgcaaaactgaacactattaggatccttctctcattggctgtcaatcaagattggtgcttgcaacaactggacataaaaaatgcgtttctaaatggggacctagaagaggaagtctacatggaaataccacctggtttcgaagaaagtatggcaaagaatcaggtttgcaaactccaaaaatcattgtacggccttaaacaatctcctcgagcctggtttgatagattcacaaaagcagtcttgaagctgggctacaaacaaggtcaggctgatcatactctatttgtcaagaagtctcatgccaggaaattggccatattgatagtctatgtcgatgatattattctatctggaaatgatatgggggagttacagaatttgaagaagtatttgtcagaagagtttgaagttaaagaccttggaaatttgaaatatttccttggtatggaagtggctagatcaaggaagggaatcgtagtctctcaaagaaaatacatactcgatcttcttaaggagaccggtatgcttggatgcaaaccaattgaaactcctatggatagtcagaagaaacttggtatcgagaaagaaagtacaccggtagacagggggagatatcagcggcttgtcgggcgcttgatttatctctcacacactcggccagatattggctttgcagtgagtgctgtaagtcaattcatgcacagccccactgaggaacacatggaagcagtctacaggattcttagatatttaaaaatgacaccagggaaaggcctattcttcagaaagacagagaaccgtgacactgaagtatactcagatgcggattgggcaggaaacatcattgacaggcggtccacttccggatattgttcttttgtctggggaaatcttgttacctggaggagtaagaagcaatcagttgtagccagaagtagtgcagaagctgagtacagagctcttgcacagggaatctgtgaagggatttggataaaaagggttcttagtgaactgggacaaacgagttcatctccaattctgatgatgtgtgataatcaggcagctataagcatagcaaagaaccccgtgcatcatgacaggaccaagcatgttgagattgacagacactttatcacagagaaggtgactagtgagacggtcaaattaaactatgttcctaccaagcaccaaaccgcagacatcctcatcaaagctttacctaggcctaacttcgaagacttaacttgcaagctgggattatatgatatatattctccagcttgagggggagtgttgaaataatgccaaagttaggactttaatttaggaataaaaaaggagagatcatttaggatatttccttatgatttagtttcctaattttaggagagaattaagctagattgattttttcttattcagtcatttgtgtatatatatgtgtatggtgtgtaccgattaatatcaataaaggagttcagaaattcttcaattagcaactagtgggaaggttcatatgcctatcacatatgagaccagacattgcctttgtcgtgagcttggtgagtcaatttatgcactcattgtaagaagaacaccttgaatctatttacagaattctaagatattcaaagggaactctaggaaaaggattgttttttggaagaaatgaaaagattaagtgtagaagccttcattgatgcaaattggggtggtttagttactgatagaagatctactactagctattgtacatttgtttgggaaaatttggtaacttggaaaaaacaagaaataatcggttatcacaagtagtgcaaaagcgaagtttcaatccattgctcaagggacttgtgaattattatggttaaaattgatgttagatgaattgaaaattccatttaatggttctgtgaaattattttgttactacaaggctacaataaatattgctcataatctagttcaacatgagaaacctaaacatgtggaagtcaatcgtcatttcattaagggaaaaatcgaggagaagatcatttgcataacctatgtcaaccactcaacaagttaccaatgtgtttactaaaagtctgcctaggttgatttttgaagacctttgttccaattggggcatgttggatattttcttactagcttaagggggagtgtggaaaatcaaatttggagataatctcggattttctctgtttgaataatctagcttatgtttaattattttaggagattatcttgttttattttaaagtttatttagtttcaattagtaggtaagttgacctatgtatcacacactaggttaaacattccttttgcagtaagcatggttagtcaactcatgcatgctctaaacgtagatcacatgaatgcaatgatgaggatcttgagataccttaagattagtccatgaaaaggacttctctttgcaaaaaaagaaaaaaaaaatcatttagggattgaagcatacacatactttgactaggcaagtttagtaactgatagaagatccacctctaactatttcacctttgttggaggtaaggtaacctagtaatttagaggagcaagaaacaacctatagtggcaaagtcaagtgccagagcagaatttacatcaatgacattagggatttgtgaacaatatgtttaagtctctaatgaaggagctttagttgtccaatatcaactcaatggaattctattatgataacaagggcacaatcaacattgctcacaatcctattcagcatgatagaacaaagcatgtggagatagtagacacttcattaaagagaaactagagagttgccaaatttttatgccatatgtctcttcaaaaaactaattgataaatgttcttacaagggtttaccaagacgacaatttcaagaattgattagcaagtcgggctgatgaatatttacaactcggcttgagggggagtgttgaagatcataaatttggttctatcaagctgttttacagctaaatggaaacaaatatgatcattgatcgatttcttccttaaatagaatcagtcaatttatttgtataaattgatttgatttcctttccctgtgtattatgaaaataatcctaggattgtttctttcttttttgtatagctataatgtagccttgactgttggattttttgcttttaaatagagaaaaagttattttttcaattccatcatggtacaaaagcctagtttggtgggaggtcgagtgttcaaacctcaccaatacatgtttattaacccaatgtgttagttctacatgtaagcccaaaaatggaggctacacgtgatgaagggtgttaagagtgtataatatacattgtgggcccaaatcctacaagctcaagctttttagaaaattggttgttcaacatagatcttttgcatatgacaaggaccagctcaactttggctatgcttccagtacatggaaccacactattttgagtcctgcacatattcttgttactgccaatgcatgggttagaattttgagtgtcaacacatgttggttaattccaaatcagaaaaactgtagccggagttaaattaatggtatttcaatcctgtccatttctccaaagcttaaccaatttcttttcagttcttgggcacattaaagattctgtagtaattgtttcaagccatcttaggaggggcaagtggcttagagttgttagtgttgttttttggaagtaaagaggtgttctgaaaggttttagatcaatttttaggcaaaacgaatttggtcaaaattgaaattgtttcagggcaaaagactaacctatgaaaataagagttagctacccttgagagtgatccaaacaaaatccaataagttcagacttgttttgtttggctgcttttacatgcatggcttatggcttacaatgtaaaaccattcttagcaaattaaagacaaaaccctgttagaaaacaacaaaaacattgagtgaactcactcagaggcaaacaaatttttgagaagaaaaaatatatccttgatttcttatgaaatgtttttcacaccttcaagagaaaattccgcaattcttgttccatcttcttgcatcttgcttgtaactgagtgtgatctactggactaactaaatggagaaactttccattaggaattcagggaaaaattcacatgcagcacaaggagtcagagatgttgcaagatactgtaatgggtgtgaggatttggattagaggtggcatgtacattatcaggatttctgtttgtccatatattaagagagcattgggtttttggtttagtctgtttggttttcaacattaaaaatctctatcctaaaagatttatgattttccatattgtgtaaacatattaacttaaaggtttgttggcattgagttctcccttcaaataggcctggaattaggagatcgaactcagtcaggagataggggtatttaaaaatttaactttttgaagattgattcattcctctctagtaggtcataatcaagtttatcaacaattagtctctcagttgttttcttatatctggaactttcactttgcttctcttctctttgctttcttcactactcctatcttaagtctgctcatttttcatttttagtattccagaatattcatctatactatttccaatgtatatattgcatatgccaagtagcatttctggtgataattgtcaatgaacagtactcctttgccttctcagtttgaaagttagattataagattttatatcttgtgataccatttaagttaaatgtgcggatttcatattttggtgacaattatgaggattattaatgctttgaagcatttgcaggcacaaaagctcataagttt

SEQ ID NO: 12569 - DNA, 4350 bp, Vitis vinifera
  Intron number 1 from transcript GSVIVT01010771001 (locus G SVIVG01010771001) derived from phytozome v7.0 (chr-ID chr5 ; pos 22448785 to 22453134 reverse strand)
ggcgcttcttctgtccgtccttccacttctggaaggtacgaatcgttttccatgtatgagttttcatatgtttcccgctaattttctagttcctttttagcatttcttcgaatttgaaaatataaacaaggaatgaatgaaaaaaaattatgagcaagtttgatttttttgattttatagtttattattcatgggtttttagtgaaatattcgagtttttaaattttctagggaaatatttaatgggtttgtgtatatgaaagtacggggttgttacttggtagtggagactgaaattcagagaagttttctttttttagaaaatgaaaacaacgaaacttttagttttagatcatttcagtagttgaagtgtttgcccttttttaatgcctcaagaatgacggataaagtagttctcatttctgctacaaaaccacagtcctgtgattattttcattttcaggtttatggggtagcaccaatttagaacttatagatttaattaagttggatgggggtggtttccaatcattttgtaaaaatttacacaaagcccaagcagggcatagtattgtaccattgcagttgtatatcagtccctattgatatgctagagcttgagctgtggtaaaatattggtcactgcatcttgcatttcttcttttccttcttccataagttgaacatggagaaggaagagataagagggtcctattgagaatgtgctaaaaaatgtagaatagagtccaaccatagtgactaattgtgcatctcatgcatgaggatactagccatggttcaaagtaagacttggctgagtcatatttgcctcaaccctttcggtgtcgagtacgatacccaataccatctcaaactcaaactcaaactcgatcaagactcgtttaaactcggttgactcgatccatattctaagttgactttgttgaaccgtctgagttacccaaataaattatttttctcaccaaagtttttaaaggcaaaagcgtaaggcgaagtgttttcgtatccttgaggcgaggtataagccttttgagaccatcattttcagaattaataaatattaaaatataatttaaaatgtataaaaattttaaattataattgaattatgcaaatttttgctattaaatctcaaattaatttcatatccttttttagaatataaaataataaaatttcaattatataatgaagttcaaagtctacaaattcatattctaaataatttaaatattaaattgattgtctaattttttttgctaatttttttgttgtttgaaaaaaattaataactaaagaaaattacaaagtaaaataaattcaattatctaattttttttactatttcgaaaaatcaattatctaaatttttttactatttactataaaatcaattatagaaaaagaaaatagtgtttttctaattttttaaatagaaaaaggggggggggggggggaggaggccaacttcattaaacaaagagatcaagaatgctttttgaaaaaccaaaccaaaacaaaaagataaggaaaaaactaatatgtgtgaaacaaaaaaaaaaaaagtgcaatataaaatgaaaaataaaatataaaactaatttgggagaagaaaagatattggaattggagagaagaaacgaatggagaaggaaaagggagaagaaggaagagctgagaacgaaggaaagaaagagtcgaggaccatatcgggagatctcgttggatcaatggagagatgtcgaagttatctacacgagattgagctattgccacagttcaccgacagtgaattaagaattagggtttttttttttttttttttttttgtgttttctccattgattgcactttccataggctcttttggttgaagacaaccctttttgtatttttttttttttggttttgtcgcagcaacaaaagcacgtccgaggcctatgcttcaagcactaatgcgttgaaggggcattggaaatgcaccttagatactcttcgactccaaggtgtgcaccttttaggagtctagcacttttgtgaacatttcaacttgttttgggaacgctttgcctcaaggcgcaccctgaagcgagcctcaccaatgcctttgaaaatactgtttctcaccaaagctaagaaatctctgaaaaattagagattgccttcaaaaataaaagcttttcaagattcaagacccttgacgcatgatgaagaggaaagaaatcgaccttacccatgactgagtctctctcaacatgatattgatttcctccattaacatgcatggcaattgctgcatctgccctctcctctctctgtttttggtctttggtgtcatggtgatttcctcctttctcttttatttgccctcgtctctcttcctatggtgtgtctatccccctatggtgtgggtgagtaggtgtgcattgtgtgaattggtgatttaaagaaagggtagagatgtgtcattttgtatgaattgtttatcattttatatgttaatgtggtatgaatcattaagtgattaagtgtagtctaaaactctttttttttgtacacttttgtgaattggggtagggtatatttagagtctcattctttgtccttgtttgactttatagaatggcttttgtctagatagaagaaaggtttttctttttggcctagttccttgggcgttttgtgtacttcgtgtgtactattctcgcctttctaggcttttatagtacatcctcttatttgcctatcaaaaaaaaagaaaaagtgtagtatgaattgcattagtttgaggtaatatattatcatattttataatctattattttatatgataatagtttaattattttatatgttaatggtgtggtataaattatattagtttaagtaatgtattattttatatcgtaatggtagcatatatggtgtattgatttatcattaacaatatattgataccatttaatttattattataataatatattaaaatcatttaattaataatatattctactttgtttgataaatatagttttctatttatatttaaatagaaagtgttgtaatcatttaattgaaactaaaaatggaattaataattgaattatatgtcttttagtaaaaatatcattgtatttgaaataaactaattttcaattcttatcattatcataaatcacattctacgaaaactttataacgatttaaataatgttaaatatgagaaaattttattttattacttttttaaagcttatttaattatattattttttctaaaaattttcataatatttttataattttaaaaactttttaacaatcttattttgcatatcacccgatattgagccgagaagtcgagatcgatgtgtcttgagaccctccaagttgatggctgattccgcgactttgaaccatgatgccaacttaactattggaaaaaaatttcaaaatcgttgcaaaccttcccctttttttcttttctattgcaatttctagtagaaatgacatctcttatgtcaattacaccaaagggatattaaatgaatgagattggaatatatgaattagagccactttgaggtttcctatgaaataaggcatggaatggggccacaacaaagaagttccgagagtttcgaaggaaccttcatgctgatattcatcaggggttgagaattggaattgaactgtatgagatctaatctcctgttgttccttggtaacttagtggtctactattaattggttgtaggtttgagttctacttggggagatttaatttattttaatttctttagtttagattgaaaggacttgcttcgactgttaacattaggtaacttgccccatgtcttagttcctcttgcgttctatctcattgtattgcattctatcttgcaatatttgagaatcactgttaataccttggtgtagctttgagataatcctttattccatagccttagagctatttacaactagtcaattaatgataaggactaaggagcaaatttttgctatcctactaatatttttcttgctctactattctgcccaaacctggttgaggaagagttgtgcggtgtaaaacaaaaaaaaaaaaaaaaaattactgattcgggccaagcatactataagtaattttttttttttatgtggtgagtaataggctctggttttgtattcttcaagaattcttttgtgtatgtatgcatgtatgtgcgtgtgtgtgtatgcgagagagagagtatatgcagctttcataatctttcttgttttggtgcagattgaggaactgtgcatttgtggatttcaagagtg

SEQ ID NO: 12570 - DNA, 1177 bp, Vitis vinifera
  Intron number 7 from transcript GSVIVT01027657001 (locus G SVIVG01027657001) derived from phytozome v7.0 (chr-ID chr1 5; pos 14572957 to 14574133)
tcagctttcccaaagttgtaccggttgttgtgaaggttgtgtaactaataatgcataatgtttatggaatggcaattccttaagataattagtctcttttgaagttcttatctaatcattaaaatctgtattctttgtatttattaagttaatttttcttctttgccttatctgacttgcattttttattaaaattctgcttgcaagttttccatttccattttccttatctgtctccgctagttcatgtatgaggcaatatgccctttgcgaatttctttactttgagttctgtctccactacatgtgcaacatggcttttggtttgactcaaatttagtctgtttcatttttgtacttcaggtagattcacatagctgtccacttggttaatttgtctcaatctaaaaaatttcaaaagacacattcaactaggagctattttgcaatagttgtccctattgtggtgctattgctctcctataatattggaatgtactgtcaagagtcatattgcaaaacactaggcaatttgtcactagggcatttgatcgtaatctttattattatttgtataacaatgcatttgattttttagttcataatccatgaatggatgaaaattgtcagtggttccattttcaaacctcaagattcaaaaagataagctgttcagttttccttgggtttttccaagctagccagttttggataagctataaaggctgaattcttaactcttggaagttctgaaaaaggcttcttcatcaggggctagggaaggggatttctcagttgtgatctcttgggcatccatggatagaagttgttgaggtacaatgaatggatgcagtggatttttggttttctttctttcttttttttttttgaaggatgtgatggccttcatttggaagccaagattgactaatcagaagggtggtagcttgatctggaggtgtccctccttgagtttgttaggggtttattttcactgtgggttttttgggattggcttttcatgttgtggctttgtagttagttattactttgatatgggacttggtctgtttgtttatttcactccctcttgagggagctttcatccttctctatatgagatgctgctactacaacatactgatcactaatagttcttcttaacaggcactacatt

SEQ ID NO: 12571 - DNA, 1025 bp, Vitis vinifera
  Intron number 3 from transcript GSVIVT01015231001 (locus G SVIVG01015231001) derived from phytozome v7.0 (chr-ID chr1 1; pos 1985572 to 1986596 reverse strand)
tgcaaggtatgtcagacaaatcgatttttgttatgttctttttcatacactaattattctcttatgttttgttgttaaggggaaaaaatcctgtaatcttgttatgatctcctaattggttaattgatttgttgattggttgtgagggatgaaattgagcttgcttcttgttcatatttatacatctaattcaggatgagatgatgccatttgttccttttctaacagatggggttcattctgtgaattgattttgcttcttgtaatgatctctctctctatgatgagggcctacgactggaaacttttcttttcctcgtcccttgagagtttaggaggctaattcttagaaagtaaaccagtggttctctgtctctctgtctctttgtctctctcgctctctccctccctccctctctttcgtgtccattgataggagggctaattctatagaaagaaacctagcagttaccaaccatgtttacatgaattacaatcagtcagtcaatctctctctccctccctcttttttgtgtgaaggcccaacccataaaacttctttcccttttgtgtccattgataggatggctaattctatggagagaaaaccagcagttgccaaccatgtttacttgaattacaatcagtcagtccatctctctctctctctctcccccctctgaatgagggcctaacacataaaacttctttcccttttgtgtccattgatggttagggcttaggagggctaattctatgaaaaagaaaactagtaattaccaaccatgtctacagagattacaatcagtcctccatcaccctcctttcattgatgtattcttggggttcttaccagttcctaggcatgccatgcattttcaaagtttgtggagatgtggtcagtccattatattttcaataacatttgaacctacaaaagctactgtttcttaaatcgaaagaaagttataatagtggtttccacaacagggtcttgtgattgagcagatacgtgctgctgcttc

SEQ ID NO: 12572 - DNA, 3111 bp, Vitis vinifera
  Intron number 2 from transcript GSVIVT01021291001 (locus G SVIVG01021291001) derived from phytozome v7.0 (chr-ID chr1 0; pos 3565579 to 3568689)
ccacgtggttaacatgtatgtttccttctcttactatcattacaagttattgtatatctctatttcatgaacttacatatgatgtttcagcagtcaacgactaaacattattccatttcagtatgatatggttgacaagtcatgcatgatatctacgggcaattgtctatatttctttcactgtttgcatgatgtaagccttgctatacgtccaaagttcaaactcttaacatttaatgcgaccttctggttccacagagacagcttactagtatgcatatcacatttgagtttccacaaagcacaaaatggaaataggaagcaactcatatgacacaacaatatcaaggaacctacaaaaactattaactggttcctatctaatgttaggttgcactttaacatgtttcccctataaaaatattatagtgacctgccttgacttggattaacaaataaggcatgacccactatgatagacaacaccatctcaaaacatctcttgcaaattgctaaattatgcaatgacttgtaagaaacataagactagtttgatgggcattttccaatcctccagtactaggtgtcactccccttgatcctcaaatttgcaatattgattgatggagctggctgaggttggatttagagtgcaagggttattctttcatcaaggaaacaagctttatctcccttttcacttcaatctagtgccaaatggccttaaattgttcacaaagatgagagctgaatgtgggtgtgagagatagattaagtttgcatatgatacaatcattcttcattaaggtcgtggaaaaaaaagtgaagtagtatcttggccttattccctggattgttgaaatgatctagctgaagaatcaactttgacaaaagtactgttgcttgcatcaattgaattgtgttcttgagaaactttttgggttgtatcagtaataaattgcctcttagaggtatccattccccttagatggcaaccctaattctgtggagttcttcaaccaattgttgagaaagttaatattgcatgtagaaattattgtcaatattgtggagagataagagaaaatcactccattagtgttaggagtgtaatctatacttactctaagcaatcaggtggcagaaaatgtgctgtactaagatgcttgcagtttagaagtagagaagtcaccacactttgcacttattatctcatagcataatcagaaaatatcgtcattgttgtgaaatgtattctacatatagggactatcataaatggccattaaaattcattaattatcttattccattatttctttatgatttaggatatgcatctggatggggcattgctgctaaattgtggaggatatttagtggtggcactacattaagataaaatgactcttagttgtttttacttcttttaaacagagtgcctgcgtgacctaattgagtgccaactccccctcccacccaatagaaaggaccttcagtagttaaggaacatcatcagtgtattgctacctttctgatttcaacattagcatctatgtagcattgcctttgggatttgaacatttacaatgggtcctatgcagaccccatagacaatgataccacaaggacatggtagaaaagtactatactgcccaagttactggacctttttccctcctatccaactgtgtatatatattcattgatgcactgaaaaaggatgtatgttcttttttttgagatgaaattgtgggactggtggcaaaaaagctgtgtcctttgggaaaatgcaagagtagcctcaatttgctgtctattggaggagaagcaacttccaacacaagaacagaagcaagagttgctggacacaattgaagttaatccttcattcttgattttggtgacaaaggagacttaattgttcaaacatcttagatattgggttttatttgatggtgcttgaatgatttaggtctttggaggtatatccaccttccaaaggcagctcacattcttctcttggtttctctcttcactagtccatatagatttcataatcttctattgattgctctattcacttgtccacagagatttgtccataaatttgctggttttttaacagagagagtgttgactttagggagctctcatgtggattttttcttcatcttttcctttgtttagttactcataaccctttttatgattaaagcatacctctttcccccagttagtaacctgtattttttcaataagggttccttcttaaataatattaaacttacacatattggaagttgaaggttgtcataacaagacattttattctgcatattgttagaacatgtaactcaaccaaggtatttctcaattccttgttctttattagaggaataatacttatatatatatacaattgagagtcctagattaggaaggtattatccctaaggaaacaaccaaattatggtatgtacagatatatacagctaacagaacacaatcattcactgtattatgttttgcttttatttatctgataaaaaaggttttgactttatctatgctgaatgattgttttttattagaagtgcacttagccatttgcatgtgcaagtcatagatacacgcatgcatctaacaggtaatgtgtattgagagtttggttcatgaggtgctaaataacaatcattttctgctgtacatgcacgttctgtatggtaccaatataaatatatagcactatggaggtcaaggtattctgaaattgtcactccatctctgcatataaattcttgttacttaggtacaagttttgtgactctgattacttcattactctgttttatgagcttttggaataccaatttttctctctgtttgttttatttatttgtatggagatgaccctattatgtgtttacatataatgcggttcaatcatgaatgatttggttatttacagtctttcttctctctttattcatgttgcagattagaaatattacatttgggactttaaccaaacctaaatttgaatctaatgggcccctgtttccttgtcaaacagaactctcaaagggcaggatcttgctggtgtccttc

SEQ ID NO: 12573 - DNA, 1531 bp, Vitis vinifera
  Intron number 3 from transcript GSVIVT01012829001 (locus G SVIVG01012829001) derived from phytozome v7.0 (chr-ID chr1 1; pos 5844448 to 5845978)
attcactcttgggactgtgtcaccgcaattcacaggttggtcccattggttatactttcagtggatttaatatcccgaagattttgatttgtatgaaaattgggcttcacggaattcggggtttttttttttgttgaaattgtgcttggcatctttcgtggattcagttttgttcagatatttgtttttatgtaattaaagatgattttgtgaatatattagggtatgggtgaattatgggggtttaatcaattctatatgggttatgtaaagagtttttgtaactgttcctaacttagctatgttacccaaatttctaatggtgttgctaaaaatgtttgagaggttatattttggagtgataatcttctattcttttacatattgataaaccgatatagcaattctactggggcttgttattgctcatataaaataaatttattaataaatatcctttttttttttccaatgtatttgattatcatgtggcataatgcacttgaatacagggaaaaaaaatgtttttatctaaatagattatgtggcattttgaaaaatcatgataacttggaggaggtgtttgtgaatatggtaattacaatactaatatcttgtgctcttgcacaaatttgggttgattaagtcaaaactaattggtcaaggttcttaaacaaatggaatctcaatctctttgacattggtctagggaaaaagcaatatcggctgaaatataattgcacaggtgtttacattttcatataagctatataagaaccttttgattttgtaggcaatggccaaatgaatccattgcatttacgtagagacttgttactgttagttgagatagcaatgatttatatgatggattcagcacagttagtgagagtggagagtaattgctacacaccatgttttattgtctgaatcagttaactggtaacagacttggaatgagacaagagcttaaaaaaaggtttgtacaattggaatcaatcttgatttctctcttaataaatttttcgttaatgcacaaactggctaaatgacatgagctaaattttgttcacagagtttaattttataggctttatcaggacactcgataatctttttgtccgaatgaagttgttttggttgaaataacactgaaaccctcagagattaataatcttatcctatgtgggttctggttgatacctaattattgagggtgcagatcattcttatgttgttatgctttttactctataggatgaatattgttcttgtggattctcttttatttattctatttatcaaacttatatacaaatatctagatgtagtttcaattaaaagttgttctaaatgagtgatgcaagaaattaaggaattttttcctatgatatgttctttgaaggaacttaattactaattctactcattctaaaggaggtcatgatgaagttctacacatttatttgttatcttgatcttgtagtttttaccaattgatgccatcttttaggagtatctattattgaag

SEQ ID NO: 12574 - DNA, 11489 bp, Vitis vinifera
  Intron number 4 from transcript GSVIVT01023306001 (locus G SVIVG01023306001) derived from phytozome v7.0 (chr-ID chr1 2; pos 19862412 to 19873900 reverse strand)
gaagaagccttgaataagaacactactttagttttaagtggttgtgcttgtagttgaaatgctaaactactaatacttaagcacatggattatactatttagtttccatgatattgaataagaacactgcctcagttttaggtggttgtgcttgtggttgaaatgctaaactactaaagcttaagcgtattgattatactatttagtttacatgatagaaacgacatcctaactgatggtcctttttaattaaaatttttagagcacgagtatcaacataagtatggacttttaaaaattacttttattgtgaccacaattgtatcttcaagtccctaaacattaatggacatgataaaattaatattcctaaaaatattttttttctttaactagcttataaataaaaaatccagaagttagatgtagatgtcttcaaataacatatataatcacatcaaacaagtgattgatatttacccacaaagttgattagagcagaataatagaatctatgcatggctaaagacttgtgcactgagctggttcgagaagccatgggcgtaatgccatggcttgacgttgtggatcagatggcttgacaggaggcattgatacagtggatagactagtgggattggtggtgcatgacacgagcaaagcatcaatagcctcgcaactagtgggagcctgacacacacccaatgccataggcaccttgacatggtaggggctcaagcatcaatgtgaggaaaggcatgctgatgcatcaaatgcacataattagatgattgatgcctgttgttggttcagagaaccttgatcaaagacaccttgatgggtacccgttcacatgaggcaccttgtgaggaggaggtgtgttagggggacttatcaatagctttatgagagatggcttgaagaaacaatagttaactagtgacagttgaaggttgatcagtgcagcacctaggaagacagtagctagactcagctaagggaacttgtagttagttgatgggtagtggctggtgtgaagagacaccttggttcataggggtgtctcgaactaggtggttatgggcagttgcataaccactaccagactcctagcttgaattttgaaaggggaaactgcaagctttgagttatataaaccctaatgcatctcagagatacatggatagacacttttgaatgcttagacaggttgttaagcattgtaattttctaacccttgtaaagtgttgagacactttgaaatagttttgtatcttgtagttgttgattgaataacacaagttgggaaggattttcgtaattgatttggcctctttacgttgcttttgtgaggtacacaaggaaggttggctaagaaagggttcttagcaccgcgcactcagagaaaagtttggggtgattctcaggggtgtgacaagtggtaatacttcttgaacattcaatgtgtcctagcttctcgtaaaatatttttaaaatgtctatacatttaaaaaataaaataaaagatatttgtgatattttttaaaaggaatttttcaaaataaataaatgagttattttgcaatttttttgaaatctataaactcaaatataatattctttatgaaataatatttttttctctttgatcacaattcaaaaaataatgttgtttttttaaaaaaaaaaaaaaaaaatcaatcgatggcttagagtggcttttttccttaatgaacttattaaatggcaaagaacacatatagtacttttgtcgtttcatggactaggaggaaaattttatgaagcctcttttccttgtgaagtcattttgctaatcctcctctttaaaggaactcatgtttatttataggtgaagttagggaattgaattttgaattcctaagacttgattgcttaatttaaggaatttggttccttgattttagcaacttttctcctcttcgtagaagttttgccaacaagagaatgcttattattgttatttttattctgttttttacttcaactggagatttgtttcccctttttaggaaacttatcaacaaaataatatttattttttattcccttttgactttaattgaagattggtttcccttttctaaggaaacttatcaacacgagaataattatttttaattctcttctgacttcaattatttgatttttttatatttattttgaagacataatttcatagttcttcaaattttgtcatatgttactttttgagttgcatgccacatatttgatgtgtatgacccatcacttgtcaagcacaaattttttgaattataaagtcacgattttgaagaccaatttagtggtaatttaatccactaaaattttttatatctacatatgcaaagaaagagatctcaacaaggaaagatgatgtacatttcaaggccagattgactgcaaaagggtatgcacaacaaaaagaagtattgactataatgaagtgttttctcctattgttaagcattcttccattagattattgcagcccttgttgcttactatgatctagagttgtctcgatttgatgtgaaaattgcctttctccatggtgatttagataaagagaaatacatgtctcaataaaagggttataaagaacttgaaaaagaataatttgtttgtaaaataagccaatttgattattttgtttatatcagcaaattatctaatggaaactttatttatttgttaatataagttgatgatatgctgattgcatgtaagagtatgactgaaattgagaggttgaaaaattatagttgagaattgactttaaaattaaagatcttagagaagcgtgaaaaattgttggaatggatatgataagagatagaagcaaagggcttgttgcattgtcataaaagtaatttttttaggccttgcttcaaattttctatgaattttgaaacaaagactctatgtgctcctttgacacctcatacaaaactcgatgtagatgtctccttacttagatgattgagtacatgaataattgtggacccgtatttttcatgtgtatacccactagttgatgagactcattttttaatggtgaaaaattagttttggaaaagttggagtccccacttatttcattttattttaaaagagaaaataaaataagaaaaaaaataccctaaagaagtgactccatagttttggaaatgcatgtattaagaaaaaatagaatattggtccggggatcaggttacctattgggaaggtacctcaaagagataatacccttttaagccctaaagaggtctctactggctaagttaagggaagtatgacaattagtcagttgattgaggatacctaggtgggctaaggtgatttcaagactagcatgtcaaaccaaaattcaaaaacacaatcataaagaaaggatagtatgcgtacctgaactatttctaaagcgctatcacaaaacatcaaagtgcttagaaatatgacacgcaacatgcattttatcaaaacaaatcaaacaaacatcatggcatctagagatagtatcaaacatggatatagttctcaataacatatatctttatacaatttcaaaattggaggatgaaaagagcatacctggttagcaagcatcaatgcctctacaaaaaacaaggttagctcaacaacaaggataaaacagactcaaatatatcatagagaggaatcaaaatcaatcaaatatcaaacaatcatctctggaatcaataccaaagaagatgtcatagatgttgggcccccaccaaaacccaattaattgtgcatgagttgattctatgagttccattacttggaaccatgaaatttattcatgcttgttgaaaattgagaaaattaagaaaatagttgaaaattaaataaaattagtgaaaagcatggcagaaggaaaatggtagcaaatttattaaaattttgattttattatctaaaagaaatataaagatggatttatcaaaattgaaaatgtttagttggaaaaggattcaaaaattcaatgtaagacagtaaattctcaatcaaagaagcaaacagaggaggaggtgtgcaccaaaatggctactttcagagtacagcccagggatgcgactgtgactgcattgctgatgattgtaggtgctgctaaaaatcccagttttaaatgatctcttcactgttgaagttcaacactaatgctccccagaaattcaaggtccatttctttcgaattccttcttgagtgacgagaaagctgcatggacaaaataagaataacataagagagtcaaactatcccacaggaggaagggttcctcatactttagatgatgacacggctaactggatgattattccaatgcatcttcctgctccaaatccattttacgtctcacacagagcacaagatgcgtttccaggttcgttggaacaaaaggaatactgcatgcagagtgggcaccattaagagaccaaaggtgatcgccatgcaggggtggttgctggagatggtttaaatggctgctccttcagatgtcacagttgttgtaagttgctgcccaggaattagttcagttttcttgtagcaaggacgtaggagcgatgctggcatgcggagatgtactcatcttacagttcagaacactgagtattatggggtcatcaacatctttgaataacccttgatcggcgtcattgaataatctaacagcatcaacataatgcacagagtcagactgttctacagggaagtgatgtctgtaaacagcggtgcacttctgcaggtatttggatggttcacgatttctactgatgattgtagtgggaaatagggcagcttctcacgaattcttccataccagcagaattctcacctagcagttgattcatttctttgtcagttagcctccaatattcttttcaaataatatgcatccatgtgttctgaccgactggacattatgattgactatcatcctcctgttgataacttgagacttcgttaccggcctctgaattctgatctttttggcttaagtccatctcaggcatcgctttcacgaaatctgtttcaatctgaacattcattctctccttttagaaatttctgttccagaactctccaaggactctttttccaagtcttaaattgaggtagaattgctgtgcacaaatcccaaattacgatacttcccattctttgatcgatcactcttcgttttttgtagtagtaaactgattttcagaagctgtaggtatatttccagaaaattggttttcagaaagcttgagaagcttcaactacaaaagaatcctactgtcacacccaggattctgggcaacccaaaactcgacttgtgaccccaagtcaaagtttgaccctaagggttattcctatccacaggggcaatcaattaaaacacactaattttttttttcctttttcaataaagcgtctaatctaaataaatttattatgctaaaatttattgtaacatattatttttttttttccaaaaccaaccaccacactatctcttgttcacaagtataataaattcatcagttatcttcctacctaaaatctcaaatatttataataatctctaagtcaaaaagaatatttccaaaaatctttaataaactaacaaaatataatttaacttacaaatgtccatataactcaaattagtacatgtcaaaagggtaatataaattttaaaacaaccattattatgattcttttgctttctggaacacttcttgatcttcccgtggtccctccaaaactatatttacatctaaaaattttagaaaatgaaggagtgagcatttccatgttgctcaatagggtgttttacacccaaatgggttgaaaattctaggtcaataaaacacaaccatgtgccaatatataatattacctttacatgcattatacacactaaaagataccccaaccatacaaatttaaaccaatcaaaattatcattttcctcattcaatcatatatccagcatatcaacaaattctaaatttacaaaataaataagtcattttagtcttgaatgatatattcaaacatatacttgataaataatacaaattcttcttccaaatgcaaccatgatgcaaatgcttacacgcaatcacataatgcatagtcattctcaggctttcattgaaggatatgcatctgtatccgaatacactccccacttagagtcttcccgatgtaaacttttgggtctttcaccctaaggatctcactctcttcttaattcaccctctttggggtcattccatttatttatttatttatttattttcatttttgccctctccggggtctttttattcttatttccatctcacacaaccatttctttaatttttctttttcttcacataaccataatgcgtgtaaagtgcaatcaaatcatattttaacatccataatttttcaagacataattttatttgctctcattatatttcataatttccaataatctacacaatgatttttcttcactttaatcaccacaaacatcaaagaaaattcacaattaattgtataacatcaaaacatagtttcaaaccttagccacataaattctatttattcttgacatgcttaataatttccaacaaccaatataaccatttttttcttcaattaaataaccacacatatccaagaacattcccattaatacaaatatcaacaaaaacgtaatttatgtcataatttatttatctccaataatctcaataatattaacacctaatacaacaattttccacaattatgccaccacaacatttgggaaatatttttccgataattcaaatattaaaaaaaacccaatttatattatcaatttatttatttctaataatattaataattttaaaacaatcattttaaacatatctcaatactcaaaattttcaacaaataatttccgttattttccacaccaatatatcatcaataaatttacataatttctaacataacaacaatcataaaaatatattaagcaatattccaataaaaagaattttcataaccacaacaatccgataaatcctattacaggaacaacaattaaataccaacaattctaatatttttatcttgcatctaacttttatttacttcccatttaacattttcaaagcaaaatcaaatcattttacgcattcagggtttccaaaaacaacctaaatgaaaactatatgacgatctactataacccaacaacttacccatttccatggagtttttgaaagtaaataagagcaaaatgaaaagcccaaaaaaagtcgagtgagaaatttaggaaaaacacactcctacctgtacaataaaatccaaccatgggataaaaaatctgacttcacagaagtatttaccacattgaagactatcactgtctgaaatttcatcacgattagaggtcatttcgtagtcaaatcggcaaagacacgtagaccctgcatctcccctacgcctgcctctccattcctttctttctttctttcttttcctattcttttgcctccggacgcccaacaatccacttatatatatattattaaacaaatttgaaaatatcaggcatattctttcttttaataataaattaaactactattatttacttcacacttcataattataaattatacataacttatgatttttcgcctcataaaatatattaccgtcttcgtaattaaatttactacaagcctgctcttgaaaaaatataatttgactttaattccttgaaacattaaggcaaatagtaccgagacctttaggaatacatgtgagtgcctttgatgaaagaagtattccaaccaccactgaagatgaaaagcatcaggaaggcctgattcacgcaaggaagaaaaacaagcagtcattaaggacaatttcggccaagacaatcatagcatgagcattttgggatctcacagaatctacaggaatataaatagcagacccaagcaccttcagcaaaaccccaatgagcctcttttgtaaacaaagctgatcatcacttcagcctgaaccttctccaatgatcattgaactatcatttgttccatctgaaccaaaagtcctgtgtgcttctatccacggtctcttttgctaaaagttctacacttcttttaagtctttaaacaaggagcaattgtattgcattccgaatctctgatgacactcctagaacaccaacaaaattgatgctagatccattcaaaaattccaaacatgctcatgagatgctgaatgtgcaaccaactgggcaccaaagacaagcattgcaagggttacaaaagttccagggacaacttcttcagaccccacaatcctaattaattcatgggtatattttggcccattggttttaaaagggtactagctcatcatgggcaccattagattgagcaagatcgataaatacacaagggcaaatcttgttgtacagtctgcaaattctggaagaactgaagatataagaatacctgatcctagtctggtgcaatctcttattccgcacattccacctggaaatcaaatcaagacttgaccattgcccagcatgtaggtttccagtttgttattgcctttagggatcacaaggtttttatctttgtccagtcttggcaaatctggaatctgctcccttacaaagacagatctactaagttttttttacctacattggctattaagaatattttttactcccttgttaagaaacacgatcaaactaaacccagcagcaacctcatgagatgatgtaggggttgattatggagatttccttgccttaactgatcttcgagttgtggtggaattgagcaatggttatttgtacccatttgagtgacgaaaaagtctgagaaatgatgaggtccaatggaaatggtatcaacaatcatggtcaacttggaggtcaggtcatttcttgagaatatttcagccttttgatcttggagaaggaaaacttcctgtggtgctgtacacagaagccaagaaaaagagtttgacacgaaccatatgagataactccagcactgccagtagcgagccttaatccttcattgctctatgtacacatcaaaggtcttcttctggatgcatcttcattctagtatctgtagggcccatgttgtgtttgatgaatcactttcttctcatgtaaatacccggcacccttggcaatgccattgatgatagaaactctagtagactattcaaggaccttcccactgttatcaatcacatccagatactgcagcaagcttccattgggaacaaaatcatagatgagaaaacactcttccctgccttaatccagaacattagcagcaagagaagaccctgaaatattcttactgatgtaggagcattccatacacccattatcaaacccctcttttctcctttgcttaagtagtacagcttccatagtaaacagaagagggacaacaggtccccagttcactttgtacaggtctataacaaaccacctcggaggctctagttcaggaattgccacttcttttttggttgttaacctcccccttctagtggttgtgactattgatgactgaaccactggacaaaaatatcagtgatcattgcaattatagactagggaagtagcctgggttctttatcaccatgtcctagtccactgtagtcctctgtggtggtaattctatgaagattaaaattccccagtgatacacagttccttcctcacaaacccatcatgctcacaacatatcatcaatgcagaaatagaaacaaacccagatatccaaaatacttaatagtgttgctcccaaatagaaaattggagactctaaaccaacggcaaattcatgaaagagaaccaaacccatatggaaaacatccgactcagtacagcagccacagtcttgccacgaatcttgatttgattaatgccacctcaagctctttcatgtcagtctcatcatcccatggtttcacgtccaagtgaatgtgcaaacaccaagagcgaggagaaaatagcaaaaaaaaaaaaaaaaacggaacataaatgaagaaaataagaactataaaaaagccacgtctgaatcaatgggcttaaatgcaggtggaataaaagggttttcaaatatcacaaagaagaatcgaaggattctttaacataaacaaagaagcaacaatgggatcagaagtcagggaaatctatgaaacacccaaaatcaacagtaacaaatcttaatgaaggaaaagaaacagagaaaataaaataaattggacttcaccctgaagagcttacctcaggggagatgctggggacttcaagaactcgtgggcctctcctattgcttctttccttcctctcctttggttcttttttcctttttttttggttcgtgatgatcctttcttctcaaagtaatagtgcctctgtccctgatcctctcctgtggccctcggccctttacagaaaaattcacactatcgaagcagcctctcatcttcggctacccatccttttcatccatggagaaaatcctccctctcaaatccgtgagtctcccccttaaagtgaactgtgtgtcccctttattgcagcccgtagagatcttcttcttatgggaagtggggatcttctatggcatcctctctcattgaatattctgcttcttttttgaatgcatgtggatatgggaagtgcatatatgcgtagcttacttggagatttcgtcaaggatgcagcccatgtcttggttggtaagtgatcgaatcctcatgcaaaaataaaaaaataaaaaagtacaaaaaataagaagggggcttagaaatcatgcaatggtaaataaaaaaaaaattggaataaaattggaaattgcacaatcacatgcatatataggagaatcaaaaatattagttcatgcaaaataaaaataaaggaatcaacctcatgcaaatttaaataaacaaaaatagaaatacgagtaccaaatgcatgcaatcaaaagaaacaaaatgtcaatctaatgcaatcaataataatgaaaattgaaacatcgaactcgtataactaggtatcgaaagaccatctcatgtagtcaatactcaccgaaacctaaagaatcaagcaataaagaagtcaaacctaaagaagtgtccaagtgacctattctgaaaaaagtgccaagtgacctagggtgaatgtgtgcaagctggacaatgtttaggacgcgtctaagtgtcctaaaagtgtacctaaatgcaccatcctaaaacagaaaaaggaaaatcctagatctaactcaaggctgccaaggggctaaataaatctctcaatcaaagtctccaaggtgactaaaaaaaaaagtaagttgtatgagtagcaataggccattagggaactact

SEQ ID NO: 12575 - DNA, 2384 bp, Vitis vinifera
  Intron number 6 from transcript GSVIVT01002450001 (locus G SVIVG01002450001) derived from phytozome v7.0 (chr-ID chrU n; pos 34808776 to 34811159)
gcaggagaaactgaacttcagcttcaaagacgaaggtttgttccatagtatttcataaaattatcttgtttcccagatgctttagttgttattttctttgtgcacataaagattgttcctctatgtatgctcagttcatgagaccataaaacaattgcctgctatgtcagaacaaaattgtttgctacatcagatgtttgacagtttttcccaaatgactttcatgtcattagcatttttctttatggtcgactgtaagaggtatcggtttccatcacaaagtaattcaattgagttttggaagctcagctacatcctcatgatgaggttttaggtctgagtgaatccaagtattcgcgagagctttagtgactttggtccatttcagcttaaaacttcttcttagaaacacttggtcctgcaattggggtgcctggaccagatagggcctcaccctgacccaagttcccagccaatcctgatctctacgcacctgtcaactggagcttaacttttcaagattgtgtcaagcttggtttaggttgggttgggtgaattgattgaattacaaggaatattcatttaagttcactcctcaaagtgccctcagatggatttaatcctattcgtataacttatctgatgattgaaccctgaaagaccagaagtttaacctgttttggaattgcccataaaaagagaagtataggctagtctagatcaatgagatcctgggatacctttttgaatggcacgagatcctatcatcaattctcacatgtcatgataacctaaccaacatacgtgggcctatgtaaacaaaaaccaagtattttagcattcagcatgatgtagaagaactaaggaagtcgtgctaagaacagagtaggacgggttaacaggaacaatgtgggcaaaccacaacctttataatggggggagaaaattttataagatgaaagtgaaatggtgttggagaatacattcttttaataggtaaaacaaatcaaggcatgaaacagatgttggcaatcaaaattgtagaaagtactctgatggtaagaccaggctgcttctcacattgaagaagggatgtgtcacacacaccacacgctcacagaatctgacttgtatagaggaatttgggtgggttgtgatgatgtttatgggagtgggatttgtccccattgaactgtatgcaaatcaactggacttgtcataagaagaattgacaatctgttgaattggtcatcaacttctttagctgttagaaattttgatttataagtatttcttacaaaaataaaatgtgataatcaatcctgtacctggagtactgcaattatatcttttaactgatataaaattgattattttcttagttattaacttcatgtattatttatataaatttgtatctactctgtaatcgtgtacccatgtccattagaagcttttttggctggttctctatatcttgggatttggagtggtttggattggagcatagtgtcataggatgcttcaaatgagcctccctaggggtttatatagagcctaggaagcttttggagactcctacacttgccattgatgggaagaatgtggaaagttttagaaatgcctaaagatgtccatacatctctacactatggtagaaggcatgagaggagtccaagactttttagagaattctaaatatctcttgtatattcttgtacatagaattgtgtaggatgttctaaattattcttgagttgtaaggaaccctccaaagttctagaaagttccattggtgcctataaataagtgagggcctcatttggccaaagcaccaagcaaatgagttccaaagcacttgtaaagctttctttgagcaataaaagtttccattctttaagagttgcctactacgtcttctaaagcttctaagttgtgagcatcttaacttagcaagctaagcatcgggagtaaggctaacttagcaagatcaagggtttgacttgtctaagtgccgcgcgagcttaggaaaagactaagtccatgacaaaaggcacacctgcatctgatacctgcacttaacttctataacactgtggtgatacttggcagattggattctgcggatttggagattaaaattgcttagaacagttagttatggagattagttgctttctttttacttcactgatgtttattattatttatgcatgggatatgagtagtttgtgccgatagaaatatttctaatcaattgatgaaatattagctactcattggttgctgtctaaatttgcaatttactaacttgcctgcatatatatcccaactctgttgtaatcttagaattttagaacggcggaatcatttgttatcccaaa

SEQ ID NO: 12576 - DNA, 1241 bp, Vitis vinifera
  Intron number 2 from transcript GSVIVT01030374001 (locus G SVIVG01030374001) derived from phytozome v7.0 (chr-ID chr1 2; pos 5080701 to 5081941)
tcgtatcctttcaagaaccgattagattaaagattaatgctttcttagtttctttccctttcatgactacgttctgcttctcttggttgggtacaaatgatggattcttctgttgtggtatttaattgctccaatgtatattatctatatatgattatttatttatttatttatctttttgttttctatttatgagctcaaactcttcagaaaacgatcgataagttgcccgcagtggaaatggcttttgaaagaggatgattagattcattttctgttcaacttctagagtaaattcatatgtcactcactatttagccccacatgttgttattaaattcccatgacagtgctatgttccatattatcatttcagtaaaatccaatttgaaaatattgagtcaatataaatttttgtcaggactaataggatatttgaacttggaactagtcttcaatttaagcaccacatttttattttataattagcaagtgttctttttattttaccaatcctttttttagttatatgaaatttctttttttttttttaccgattgtttttgggatttttttattttttatttttgtatttttaatagattaattgcttgctcctttcttttttgcaaatttttttccatctacatcatctttttgcttatatattatgtatttctgtgggtgaaagagttggagttttcattccaagaattccaattatcaactcaagaatgcataatccaaactgtttacagccagctacattgtgtgtgcatatatctagaattcctgggatctgtgctgcctacaggctgcagatattcaatagcttggtttcatctataagagtaaattgtggagaatgaatagctccctggatttccatgtgaactctgtagataccttttcaatgtaaagttctgctctaaatgagaggttaattcattagctttgttgaccctgcttgcaaatatgatctttactttatctttttgaacactcttaaatacatatgcattctctgattttatcagtatctattcttagacagatttgtagtgcatattcctgtactgttatattttacagtgcctaggatctcttatgatgatgatattttttcttttacaaattgttaaaaatatgaagtaggcatagaacttcgctgaatgctgaatggagcttatgagatattatgacataaagagttcattgttgacctgaaatgggtatagtat

SEQ ID NO: 12577 - DNA, 16994 bp, Vitis vinifera
  Intron number 1 from transcript GSVIVT01010986001 (locus G SVIVG01010986001) derived from phytozome v7.0 (chr-ID chr7 ; pos 2407116 to 2424109)
attaaaagctatctgcagctagttctttagtagtactcattttcaagcactgttctctgatggctacttgaatcattcaactgtattgcttgaagctaatgtgcaatatccatatatagtctgctttaataatcatgtagagactagagagtactcaagagtagagagacagcgggttaataaacgataacttcattatgaaaaggaaggttacatgcataagacaatcactatttaacacgcgaggaggtacataagattacacatatataataaagagcccatgagactagtagtttaaagccacgtttattcttgtcacatggtatcagagcattaaaattaagataaagtctgctgatatggcttcagcaggggaatgagggagccgcttaggtgacgggacatgacttcgttggtggatcccacgagctttccacctatgaacacagctgggacaggagcattgcatcccagcctcaagagggctttctccatttcccttccatcggggtcttggtcgatttcatgaaccgtgggagtgaccccaagttcttgaaacagaatgttgacagcatagcacaggcagcatgagctcttgctgaagatcaccacccctttctctgaagccaatctcgtcaccttatccatcctgtgctctgggctcaagaatatgcacaaaattctaatgtgaagatcaaattaaagcagaggaggaagaaaatcttggagggttagcttagattcaatcgaaaacctcaaaaaaccatcggatcgaaactaaatttcgatccaatggtattattgagatggaaatatgaggaggaggaggagtatgaaagggagaaatgagattgaagattaagcttgttcgaacttgagctctcatgttacactatttataaggaaagcagaggatggactactcctttgaacatagacatggattcaaaaagaggtcgtgctttacttagatgcctaaattaataaagttacttttcgagaaagagactactgtgtttctcatttgctgtacaagctggcttatatggttatgcacaatttacatgatggactgactccatatcagtctattataaccatctgatatgtctaccaaaacttagctatctttctggatggatgtctgagaactctgatcaatgttgggattgattcatttggctcatcacacacgtgttcttgctaatgaccatttgtgtaacttttgcagattctatggaaacaagaatactctctccacctaaacacaacaaaagtaggaaattctcaaaggtggtcgatttctgccagattctcacaatcatcttctttgaattcccaggcagaaagatggcgaaaatgagatggcttctttcggtggctctgattctttgtgcgcgcgcccaccaacttgttcgattcctccccgccatctcccatgcccgtggggctgaaactgctctctatacagctgtttgcacggatggatcagtatgcaaacggccacagcctgcagtatccaaacctcatagcagcctcaactatctaatggtaacatatctatatatgtcatagattcaagaagatgggaaaaactatgacatgtatgcctccaaatatgtatgcaattgtgaacaaaagcatatgtttgtatgtatcctgtacagtactacatatgtaagtatgcattcaggaggagggatagtgtatagcctttttcttgtacacatgaaagtcatgagtatgagagggcttttacagtgatagcacagatgtataaaggtttcagcattttagatatggaggaatgcaataaagacatgaattttcaagcatcaccctttattctgtccttatgccttcctgtcaaaaaataacacatgatgcctagcgattcattggccttaatttcagcttgtgtgcgattcgtgctgagcttaaattaaattcattagaacccaataaaacaatggtgtccaggagcacttttgcattgatttaatgggttacagcaagtttgtgatagagaggatcacattttggtggatagataacgtttctgtttaagcacatatcttatttaaaaggtggtgcattgtggtaactttattccattgtggattgaatggcagcaattcgtctgaatattcccaaggggggaaaatcctctatatcactctatatcactgtctgatcgtgaatttgatctgggaatttacgataatcacttagcccagatagaaaaaaaacagtacttcatggatatgggggtttgaagtttgaacccagttcaaggaatagtaaaagaagacaaggcaaagcaactgttaaagcttaagaaaagcctcaggctattttagtatcagtgacttcatacaacagagtcaccaaactccaggagaacaaagaaaaagaaaattaaaagaagatataccccttctacaatgctgctcttaacatggtatggagctttgtggtaatatacaacattagccgtagatgctatagagctttttttccaaggctgcgctagaaccagatggctctggctgcaatgagcatttgctttagagacccatcaacatggctggtaatcacatctttagcagacccaacaaattttccgcctacaaacacagcagggacggaggggttgcaccctatccgccgcaaagcccactccatttcccttcctctagcgtccttatcgagctcatgaatcgcagggctcgcacccagatcgtagaacagtgtcttgatgctgtggcacatgcagcatgagctcttggtgaaaatcactgcagcattcttcctcgccaactcctccaccctatccatcacagaaaccctagttttctttcagccgagaaacccaagaaatgcagtactctcaagaacgcagaaaaatgatcacttgggctgaatgcactaaaaccctagcaaaagtactcttcctacttccttggttggagtctgaggcttcatgagccttatttataaaggttggtgagggtggtgggtggtggattgcattgtttaatccaaacccccgaaaaaggaagaacaatatttggaaaaaaaaacaaaattatagaaagataaaaagagaaagttctttgagatatttgtttggataaggaaaattctcctgatgattttcctgataatgacctttgtgctaacaacaagttgcatccagtatttctcattatcataattcaaatcatcggggacttccgtacagatgagcagtgttgaaaggatatggaaaagaattgtttaacccaaagtttggatttggtgctgacaagatgaatcccatgtgattttttatttttaaagatcaaatctctttccatcttcaggaaaggagagtttaagggaaaggaaaacacgttcattcaagatctcattttctcgagaaacaaacacattagtcgactgatcttgggttttaaaaatgcagaaaaacaaaatggaatttgtcgatttgcgtgattcctttgtctgacgcggagaaagataagagtttatccaatccagttccactttctcgattctgtctctttatcaaattcatgggacaaaaaataaataaaaattacaaattacaaattaataatcatctgatcaacctatttctaagcagaaaatcggcacactttaaggtcttgttccaaaaattgtttatttatttatttatgttttatttttcttttagatgaaaaaaaagaagaaaaaaaacggaaattaggtagagatttagtttagaaaatatttgatggataaattgaactgaaattaggaaatattgaagtgtcccctcaaagatcgtaagggctactacgaaagggccggacaaaatgaaaagcaaggccattgcgtcatcagcagattctaaggtataaatgcatcttctctttgttctgcttcatctttaatacgcaagaatcttgaattaaatcttagaatatttctttattattgttattattatttccatgcatattatgaataatttattgggcgtgagattatttcagataatatatatggtattatttgttttatttgtcaattagttcatatgttaaaatcccatcacttatggtatcttgaatttattcgatattagttattgcgggatgctcgatatcccgatatttgggttcttataaatttctatcagtgttgataccttaaatttattcgatactagttgttgcaagatgctcaacacctcaagatttgggttcctataaaatcctatcaccattgatactttgaatttacttaatactaattgttgtgggatgcttaacaacccgataattaggcccttacaaagagttttaaatatttgatcataaaaaattccttaattatcattatatatacatcatcaagtttaagttcaacgatgatttatatctccagcactacttttgttagaaaatcctatcaaaaacaaaatttgatgggaaagtatgaatcttaaacaatgaggttcttgcctttttatttactttttttcaaaaaataataataataataattatgttttaatatctttcgaaccgacgtagggggctttatgctggtaggtttagaagaaagaaaaagagaggggacaagtgggagaatgagagaggagttgagacaaagggaggcttttattcagatactgcagacttattttagagatcatggtgggagatggaatgtcaacttgagagagatgcccacccacgacactcttcttctaaaatcactacatcacctacaagccacaggtcaaatctctccctcgtttcattctttttccccttttttttataatagtatgtttaattgccagaaaatttgtgagaaaattaaagggataaaaaatagaaataaaaagtagaaataaaaataattaattaaattaatttaaaaaaagagatttaaagataataaattatttttatatattattttatgatttattttgattatttaatataaaattaaatcatttataaattattttacctttttaattaattttaattttatttatttattttttcatatttttcataacataattaaacaaaacaaaaaaaaaattatttttttcctaaatactttctgataacccatcataacccttatatttttttctttatatatatataatataatttttttttcatatttttattaattaagatacgcaaataatgaattaaaatatataaatatttgtggaaatgacacatgttacgttgcctctagtaattgcaaatgacacctcccattccaatcctgattttatttgatcctgattttatttgatgacgtagatgtgatccaacagttgaaagttggattatttcagatactctttctcatggtgttggtgcttctatatcttatcgactttgaatatttcttacataaagcttttggttctcttgtcaagacaagggtcgtttggctacatggtcaacttcaaaatcctactaaagttgattttcatcttgtcgctttcctctaaaagcctaaatttttgttgttcaactttttactattcgaaaaaactcttaattcaaacgaattttatgtttcaaaacctcgataataattataataacgtgataaatgtcatttttattggttcttgattatgatcaatcctctaggtagtcacttcaatgcctcttgttcttaatgatcccataaaaaaggtatgctcgggtgtgtgccaacagatctctccaattctaaggtaaaacctacatatcactctttttttgcatttcttcttattttattgatttgagtttttacaatatccacttgttttttatgacttattttaatttggtatttatattataacgtcatcttagtaatatcatgtaccccactaatgtcgcatatcagtcactttcttataatgttgtataacagtcaattgctactaacgacacaattaagttaattcaaatataattgttcatgcttactttgctcaaggaaatatacctatttagataattcatgtatgagacgcttatctggatgacctactaccaagggtatccataatttctactaagctccaacttatttcctatcttaaatttcatcacgtttttttggaccatgaaagatgacctactaccaagggtacccataatttctactaagctccaggttatttcctatcttaaatttcatcacctttttttgggccatgaaatttggccttgagagaaagagtatacttttgttattcctcttgtgaatgtcacatatccaaggctccattctaaaaattttcaatggtactcattcttgattcataagcaaccaatcaatcactagtttttatttaataatagatcttttaatactaattttcattcaatgaaatttaaactctgatagactatttgacattattaatataaaccttgatataagattagttaatgaaaaataaataaatatttacatgataaataaaaatatgaataagaaaataaaagaaattttggaggtaagtagaaataaattacgctataaagatattttacaagaataaataggtaaaatttcaaatgttccaaaggataaataattttgattacaccatgcactttgtattttcaaatgaatcataataataatgaataaataaaataaattttttatgaatttggtttttaaaataagtaagattttaatttgtataataaataaaagtagccaacacgaagtaagataatttttttatataaatggaaataaattatattatgagaatatttttgatgaaataaaagatttaatgtaatatatatttaaaataattaaaataattttaaaaatctaaataataactatttaatattaaagttaatataaactcatcattcttattcttattttgatattttccttttaaattatctccacgtttattttttctagtttattttatccattggaatttcgtaaattaagaatctaaataaaatgtaataataagagtggaaaaaaaatcaaatttcattaaatccacataaatagaataatttctcaataatcaaaattataaaattcatccgttcatatattttttttaaagttaaaaattaataattaataataattaaatatctttaaaaaatatcatcaagataaagtgcataatgcctaaattatttatttaaatatagtaaaatttaaaatttattgctaacagttattttataataatacaattatttttaaaataaatatgaaatttaattaattaatatttttatttttatataaaatgaaagaatttaagtaaacgaatttatgcacaatgaaatataaataaaacaatatatatatatatatagatatatatatatattaaatttgtgaaaaccgaaaccaaaattgagaagttttttgttttctaaaataaaaaataaggaaaactcatttgataataaaaaagggtttttattttttttgtttttaacaatagaaaataagatatttttagaaaacattttttagatattttatattgttttcatttatatttttaggactagtttaaaaaataatgatgcaaatatataaaataattaaaaataaaatattaaatattaaatttatttttaaaacatatttaaaaaatattaaaagtgaattaaaaatattttaacatttcaaacaatcttttgttctataaaatattaaaaaataatttttaaaaactgttatgaaaaactgttttagaaaacaattactaaatacgccttcaactccatttgaacttgaacttgaagttggttgaggtgattttttcatcggctcaagacatccgaattgcagaattaaagatttaagcccactcagagcccacaaataaaatttgggtcggcccaggctcggcccattatcacctgtctaacgctgaacatcgctttagggtttggttgcagtaccagaatcccccatgtatatttacgccaaatgattccatcatagtttcttctccaaacgctgcgtttctgttgatctttgagttcaaggtactgctccaatctcttttccccattcaatcaattgagttatagcttagatacatgtttggatgctgagaaatttctaagtttgatacgatcgtttggatgctggcaaaataatgagaaactgaaagaaaattttccatcgtaattttttaagcgtataggggtcgagaatacagaatatggtactttacctaaaactcgacacttcggcttagttgatctgaggagttttttttttttttttttggaattctagggtttccgtttgaacagccgcggagatattgcaaatttgaattacagatcagactggaattttcgttggtttgacggtctttactatttgggaatgtttccttgtatggaaatagatttaggaaaaaaaaaaaaaaaaacagaagagaaaagtaataacaaaatgaataaaagggtgaatttattatgatctttaaggtgaattcgttatgattgttagagctaataataaaagtgtggaatatggggggaaataagtgacatggtagggatagtttgagaaggaaaaagtctacaaataacatttggtgacttctgcatgtgcttgtagtagtagggcattgtgtatgcacttgcattggcaaaattgggaaaaagttatgcacgctatcttgctaagattatggatgcaaaaaacctagccaggatgatatatttttttttgtttgatgaataaagagcaatatattaaaagaaaagaggcacaaggaagcaccccaaagtatacatgtaatatacaaaagagagcaaaaagaaacccttgactatggcctaaccaatctacaaaatctacaacggaagggggaccagagccaaaaaaccccttaattccacgcccacagattacaaaggaaaaacaatttacatccacgaatcgaatgctcctcgttttcaaacaccctactatttctatccttccagacaatccaaaaaaagcacaagagagttgaaaaccacactttcttcctttcctttcccacacaaggctcaagccaacccaataacgtctctctaactgaggaggggagcacccatgaaaccccaaagaggaaaaaaagtaagctccataaacttttggccaacacataatgcaagaggatgtgatcaatagactcttcctctgatagacacaaataacatctgttagccaagtagaaccctctcctctgaatacaatccaaggttaaggcttttttccacgtagcctcccaagcagaaaaaacacacccttggaggcaccaaagaattccaaataactcttgcaagaaaatcccatagtctttttggttccaatgtcttgtaaagagacttaacataaaatcttccatctttgcttttgtccaaactacttgatcttccacatcaccataaaccctcctcccttgcaaccttaagagaaaacgttctacatcgaacacttccccatcattaagctacctagagaacctaggagcccacactccccctccagcatggctccacacatcctccacccaagcctccttagccaaggatatagcaaataaagagggaccacaccacttgttcttccaaaatctaaccctcgtaccattccccacagaataaaccaagttgccgcctatcacatcccaacctcttctaatcgctttccataaaccaaccccaaaactacctctcacaacgcagggcctccaaccgccctcttcttccccatactttgcacaaataacttgcctccacaaagcttccctttctactgcaaaacgccaactccacttacataggagggtcttattcaacaacgccatattcctcacacccaattcacccttttgtttatctgagcaaacaatagactaatccactaaatggggcttcctctttagggctccaccaccccaaagaaagtccatttggatctgctccaatctcaaactcacactccttggcatatgaaacaggaacatacagtaaatagacatactagatagagtgctcctgatcaaagtcagtctaccccctttggagatatactgtcttttccaaaaggaaagcctcttcctcatcctttcctcaacccagtcccaaaccgccacttccttgaaacgagcacccaaaggaagacccaaataagaagatgggagcttgctaaccttgcaaccaaactcaatggccaactcctctacattctccactcttcccatcacgatgatctcacttttgtccaaattcacattcaaccctgacatggcttcaaaccacataaggagtcaactcaagtaggacacctgatcaatgaaaggcccatagaatactaaagtgtcatccgcgaacaacaaatgagtgatctccactcccgcacctcctctaccattgagctaccaccccaacaaaaaccctccctccttcgctctcttcaataaacaactaagagactccatgacaatcacaaacaggtaggaggataaatgatctccctatctcaatccccgagaactttggaaaaaacctgagggagtcccattaataaggacggagaaactgacagtaccaatacaccactgaatccagctaatccatttatctccaaaacccatcatttctagcaaccaaagaagaaaactccaatttacatggtcgtatgccttctcaatatccaacttacaaagaatgtcaccacccccacttttctacattgaatcaatcgcctcattcgcaatcagcgaggcatccagaatttgccttccctccacaaatgcattttgggacttagacactatcttaccaatcacctttttaagcctattagctagcacatttgctaacaacttgtaaagattgccccccaagcttataggcttaaagtcattgagatctatagctactcctttcttaggaattaaaaccagaaaagaagcattaatgctcttgacgaacttgctctgatcatgaaagtcctaaagaaccccataacttcctccttcaaaaaactccaaccgaattgccaaaatgtcattgtgaaatcatcaggaccaggagttttatctccattgaggtctgagagagcaccaaacacctcttcctaaaaaaaatgagcctctaacattgctgcaacttcctcttccaggaccctaacctgcagcccattgcatctgggcctccactcatttctttttgacaatacaatggccaacttcaaaatcttactaaagttgatcttcttcttgtcactttcctctaaaagcctaaatttttgttgttcaaccttttactctttgaaaaacctcttagcacaaatgaatttcataccattatgttttaaaacctcgaaaataattataataacatgataaatgtcctttttactggtttgaccaatcctctaggtagtcacttcaatgcctcttgttctttacgatcccgtaaaaaaaggtaagctcaagtgtgtgccaacaaatctctccaattctaaggaaaatcctacatacctctctttttttgcattccttcttattttattggtttgagtttttgcaacatcttataacttattttaatttggtatttatattataacgttatcttaataatatcatgtatcccactaataccgcataccagtcattttcttactaatgttgcataacagtcaattactatcgacgacacaattaagttaggccaaatataattacccatgcttactttgctcaaggaaaggtacctatccagatgattcatgtacgagacgcttttctggatgacctactaccaagggtacccataatttctactaaactccaatttatttcctatcttaaatttcatcacctttttttgggccatgaaatttggccttgagagaaagagtatacttttgttactcctcttgtgaatgtcgcatatccaaggctccattctaaaaattttcaatggtactcattcttgattcataaaatcaatcactagtttttatttaataatagatcttttaatactaattttcattcgatgaactttaaactctgatagactatttgacatgattaatataaaccttgacataagcataaagaaatgaatatcacaatttatgattagttaatgaaaaataaataaatatttacatgataaataaaaataagaataaaaaaataaaagaaattttggaggtaagtagaaataaattacgctatgaagatattttacaagaataaataggtaaaatttcaaatgttccaaaggataaataattttgattacaccatgcactttgtattttcaaatgaatcataataataataataataataataataataataaataaatcaaataaaatttttatgaatttggtttttaaaataagtaagattttaatttgtataataaataaaagtagcaaagacaaagtaagactattttttttatataaatggaactaaattatattatgagaatatttttgatgaaataaaagatttaatgtaatatatatttaaaataattaaaataattttaacaatctaaataataaccatttaatattaaagttaatctaaactcatcattcttatacttattttgatattttccttttaaattatctccacgtttattttttctagtttattttatccattggaattttgtaaattaagaatctaaataaaatgtaataataagagtggaaaaaaaatcaaatttcattaaatccgcataaatagaataatttctcaacaatcaaaattataaaattcattagttcataaattttttttaaaagttaaaaattaataataattaaatatgtttaaaaaaaatcatcaaggtaaagtgcataatgcctaaattatttatttaaacatagtaaaatttaaaatttattcctaacagttattttataataatataattttttttagaataaatatgaaatttaatcaattaagcttttttatttttatataaaatgaaagaatttaagtaaacaaatttatgcacagtgaaatatagatatttgttccataaataaaacaatatatatatatatatatatatattaaatttgtgaaaaccgaaaccaaaattaagaagttttttattctccaaaataaaaaataaggaaaacttgtttgataatcaaaaacaatttttattttatgtcgttttcacttatttttttaggactgatttaaaaaataatgatgcaaatatataaaataataaaaaataaaatattagtgtggaccccgcatttcagctcatgcgtttcccactcgaaggcgagctcgattttgatttcgaaaaatgattttattgattaagaaaaattgacttggagtcgccacttatttttgttttattttaaaaaaaaaggataaacaaaataagaaagaaaaccctaagtgtgactccttattttggaaaatgtggtatgtgaaaaaccggatcaggctcgagagtcagattacttatctagaaggtacggtaaaaaccgtagcacccctctaagttcctaaagtaaaaaccgtagcacccctctaagttcctaaagtagggtctctactaataaaattgaaacaatcatgacaatggatgagtaaatcaataaatacccaggatagatcatgcacatgtgagtatcgggacatgcatagacaatgattagagggaaaatggatacatagctaggcaacgatccaccatgcgctatcaataaaggggttagtgcacaatttaggaataatttctagtatacatgtcagagagcaggataaatcaatcatgtatcataatcaaatcgatctatcagttaatcaatctatcagtcacatatgtggggcccccaccaaagcccgtttattttacataaattaatcccataaattccattattcggaattatggaaaattccattattcggaattatggaaaattcgtttatgcttattaaaatcaagaggagcagaagattgtttgaagaccagaatggaattaaagctatttgagagaaaatcggatttttgaaattcatttgaaaaattggagtctcgaaggttatttaaagaaaattgggattttagagtttatttgaagatcggactttcaggaattaaatgtgagaatgagaatttttataaattaaatttgaacaaggttggaaacttgaaaatgatttgagagttcgggattttaaatgaggggataagtggatgagtgaataagtaaaggaatgaaataacgatggtgaaataataaagtttaggtaaataattgcgaaagatggaattttagagatttgaagatgtgaatttagatattgaaaacttaagaatttatttagagatgagatctttggtatatgaataactgaataagtaagtggatgagataacattaataacgagaataatcattaaacggcgatatatggacgatggagtttttgagattggaaattagatttggaagtcggattctgatgaattaaactttaacaattagaataaacagataatatggaataataatgctacttaacggaaacaatattttaaacgaatagaaaaggagcagtggaattttaagattgaaaattaagttaggacgttgaatttttgaagaattggaccttaaatgaataaaaaaataggggataaaaattctagttaacgaaaataacatttaggcgaataatagaatttctaaggttgaaagttaaattgagatttttgaaagattggactttaaataaatatgggatgatgattctaatggatgaaaatgaaatttaaacgaattgtagaatttttttttaggattgaaaaattaaattaaaatatggaattttttaaggattagaatttaaataactaaataaatacgggattataattttaattaatgaaaataagatttagatgaattgtagaatttttaggattgaaaaattaaattaaaacatggaatttttgaaggattagactttaaataactaaataaatacgatattgtaattctaagtgatgaaaataaggtttaaatgaattgtagaatttttaggactgaaaatttgaattaaaatatggaatgttcgaaggattagactttaaataactagataaatgcgggattacaattctaattaatgaaaataagattgagttgaattgtagagtttttaggatttgaaagattaaattaaaacatggaatttttgaaggattaaactttaaataactagataaatacgggattataattctaatcgatgaaaataagatttaaatgaattacataatttttattattgaaaaattaaattaaaacatggaatttttgaaggattaaactttaaataactagataaatacgggattataattctaatcgatgaaaataagatttaaatgaattacataatttttattattgaaaaattaaattaaaacatggaatttttgaaggattaaactttaaataactaggtagatacgggattataattctaattaatgaaaataagatttagttgaattgcagagtttttaggatttaaaagattaaattaaaacatggaatttttaaaggattaaactttaaataactagataaatacgagattataattctaatcgatgaaaataaggtttaaatgaattgtataatttttaggattgaaaaattaaattaaaacaaggaatttttgaaggattaaactttaaattactagataaatacgggattataattctaattgatgaaaataaggtttaaatgaattgtagaatttttaggattggaaaagtaaattaaaacatggaatttttgaagaattagactttaaataactagataaatacgagattaaaattctaattgatgaaaataagatttaaatgaatatttgaagaattaaattaagacatgggacttttgaaaaattacttaaaggcctaagttttgaaaatgggatttaaagtttagaatgtagaaaattatttgagtccaatataaatttatttatacaaaaaattttcatatatggtgatttagacataatttaaagatgggaaggtgaaatataaattatcttgagttttgaaaggatatccaaccttaataatttgtcctttaatcgtcctcaagttgagttaaataaattggtagaaatagaataagataacaaataaaagggaaggattgaattaattaattatggatattagagatttttaagagaattatttaggatttgggcaacctaatgggctaaattgatgtgggcatgggccaatgagggtggctagcataggaggcatggggccttcatcaacatgcttgggttgggctccaactcaagcccaaacccgtcaccaagagcttaggtctgggctccaacttaagcccaaggcaccatcaccatcaaagcttgggcctaggctccaacttatttcaaaaaagaaatgcaaagaagagagaaaaaaaaactctctcccggggccccccacaaaaggggtctacaattagatataaaaattatttttaaaaaatattaaaagtgaattaaaaatattttaacatttcaaacaatcttttgttctataaaatattaaaaaatagtttttaaaaactattataaaaaaactgttttggaaaacagttactaaatacgccttcaactccatttgaacttgaacttgaagttgaggtgattttttcatcagctcaagacatccgaattgcagaattaaagatttaagtccactcagagcccacgagtaaaatttgggccggcccaggctcagcccattatcacctgtctaacgctgaactcaagttgtacatcgctttagggtttggttgcagtaccagaagccccg

SEQ ID NO: 12578 - DNA, 5840 bp, Vitis vinifera
  Intron number 2 from transcript GSVIVT01022629001 (locus G SVIVG01022629001) derived from phytozome v7.0 (chr-ID chr2 ; pos 13762443 to 13768282 reverse strand)
agattgagaggtagtgtgttttacagggggaaaggaggaggatgacttaggggagaagcatgcgaggtttactggtaggagggaatttgactggtaagtgtgatgtgagaaagaggcggtgaggcatttggaagaagcatctcctttccaaaaacttgttgctccccattcttctttctaaactcatttgcctgttccggcctcccatgctcatttgtccgctactaagatatgctggttaacacaacaggttgagaagcactaagttacatagccatttgattaattatatggtgtatatatatatatatatatatatatatatatatatatattaatttttatcatataagtgaaaatgtgatacgaatgtgacaataaaacaacaaccctgaaaaaaaagaaagaaatatgctttagagaactgacttgatccactcataaaaatcaactgatcattatacttgctcactaagtcacaaaggctctgtttggttccccaaaaatgtgagagaagtaaaattgagaggaaaaatggaaggaaagaaaaaggtaagaaaatgaatataatttttttcacttgtttggttatccttggaaaattcaagggaaaaaaaaaaagttaaggaaaaatagaaggaaaataaaatcaacaatttgttttaaatggttattaatttgttgaataataaaatcaattaattcaataaaaaaactgttgaaaaacgtgaatttttcgacataaaacattgctcataaaaagtctctgttattatttttttattaataatgataagatttatgtataaaaaatagtaactttttatttttacatatttcgatcttacattcggccaagactcactaaggagctccttcaaaatctccaaatataggcccaaaccaacccaaccaatctaatcactcaagtttcatttttcatgaatgttgaagctaccgtttaaaacaaaatatgtttttcttcttttaatttcttttacctctcataaaaaatccgtcaatttttaaaaataaatattgagattatataatttttttttatcaaaaaagaataataatattttaaaacttttaacgacgaaattatcatgttttaaaattttgcctacattattaatttactttaaatgtatagtaaaccattaaaaaaaaagcattcaaatctcgatttaattacatcagcctaaattagggaaaacatgacatgattttcaatcaaagtaaatcgatttaaatgaacaaagaccttgtttaattattttaaaaaaaagacaagttcaaagctcaatttaatcatagactgattaaattaattggaatcaaagagaccgtaatctcactgccctaggcctccagaattaacaagaatccaaagaaaatcacaaaactaatttatgatctgattaaactgctacagcatatcaaaaaaccctttaattactaaaagaaaaatcactagaaaagaaattatcaagtttgccacagaaaaacaaaaactacaaaaagacatcttagtgttccaaggcaacagatcatcaaaataaacaaacaaaacacgatcaaaagtttcccaattatctatacaaaacatatcaccttaagcacctgagacaatcaaactgaactctgtgctttgtttggtagccgcaaaaacatagataataagataattcaatgaaaaaagaagtccagaatttgaaattcaatttgtaaattattgaaaactcaagaaacaacaagctggtctaaaccgaaaaaagcataatttcctccattttttagctaaccaaacaaaggaataattgaataacatgttgaaaagatagatgaataaaaaaagtcttcgtaagtctaaaaatataatagatcaatttctaatagtcaactatcatccatgagttttaatatcaaaacttaacgtatagtcccaaaacaaaagtaaaactaaaaataaaaataatctccatctcaaattaggcataaaaaaagtaggtccaaatttaactgacagccaaagcttacgcctatcaattggacaagcaaggaaggctcgagctgcactcacatcaccggtaagagcttgatatgctttcttatgagatacatcactcatgcctccaatcttagcaatctcttcaaacaattgctcttctgtacaattttgaaggttgcttctatcaagagccgcaacaactgcatccattccaactctaattgacctcaattcttcacttacaatatcagcatattttgtttttcacttttttgtttctttgtttgactttggtgcagaaacatatgcatttgtagatgagaaagatgtctcagttgttgcttcattttcaacataagcaaatgtttcatctttgatcccatgttgtgatgatcctaattgaattgtgccatccaaattctgttcctaggcccaacgaagttgtctttcttttgcacctgcagcaagacttcctattgctcaatcttttccaagaagaatggacaacttatcataatttctaataggtttgtatctgagctgagatgctcctgggtgtgccttttaacatcagaaaaaacaaatattaacaaaactcgagttcaattgtgataatgtctattagaaatttatagctctacattacatgcaaaatttttatttctaataactcaaaaataataattaactcaccttagtgtaggtagtctatacttccgtggtagcttcgatcatttgagttgattcattgaaaccaaatccactaccattttgtaaaacttcttaagcaacattaaagttttttttttaaagttttcattcaattttttatgtgctccaagttacaactcaattcaaaattttccccaatttcttgcgcaaccattgcataagctgtcttggtgaagactcctcctatcttttgccatttatgcattcgctccattaatcgattaaccaaaaggttatccatttcatcaatccaagtcaagtttcttttttcacttacacttttgtgtacttcaaagccttcactatgttccatctgaaataataatacatatatatatatatatatatatatatatatatatatatatatatatatatatatatatatatatgtttaaaatgaaaagtcaagaggaggagatataataataacttcattgtaactcattcaaagtgtgattttaactagatgagttatagttctaaatacaatcatcgtacttaatatgaaacacaaaaaactatataagaaaagaaccataaaataaaaggactcatcaatggtttctattgtaatctttccacatatccatggctattttctcccttaagatttctcattccttgcattttttagctaaactcaagaccattgattcaaactccgcttcttcgctaaaaagctctctatcgacctctgctattaatctttcatttggatcaacacccatgagatagatatggaggatacgacatgctagtataatatcagattgtgtgttaatagggtaatgtggctccgtcccactagctattattggaaacctttccttcaaaataccaaatgttatttcaattgcatttctcaaggacgagtgtcgaaggttgaaaacctctcaagcattttttggttgatgaacactatactcttttaaatggtaatgagtgcttttatatggggtaagaaatctaatttttagctgaaaacccgcattagccaaataatatttacttaagaagcatagacaaaggatctttgttactagtaatagtcacttgagctaataaattattatctaatcaccaataatcaccttgtggaacaatcaatttatcaaaatctctcattaatgcattatctaggattctcgagtctgatgcagatccttcccaaccaagtaaaacatatgtgaacttcaagtcaaaggaacatgctgctaaaacattttgtgttggatagtactttcgccctcgatacctttgtacaacatcatttgacacttttacacgaaaatatgacccatcaatcgcccctatgcaatcctataaagaaacaaaattattagtttattttgaaatataaataatattctaatgatgtttattagataagtaagtttaccttaaagtagggcaaaaatttggtattgtccttgatttcttgaggacactttaatccatcaggttgctttaagaagacatcatctaaagatattatagctctaagaacttgatgaaagtgacgactaacagtttcactagaacgcttgaaataaaatttcatagttctattccttaaattatgaccaacaatgtgaaggaatttggcaacttgttcttctacattactatgtgcactatttctaagacgacctattccccgaagaatgtttactagtcttgtgaatgcatcctttcccattcgtagttgattataacaatcttcattatccattagtgtaagtctttccatcaaagcatgtcgttcataatctccttcattagagattgatctctccaaatagtttgagtgatgataaattgaaacaagaattgctgcatatgtagcatacatagctacacaagttgcagcccatcttctaagtctttgccactcttcattataagtctacgtgatagcaaagtaagaggaatgagttagtaaagtcattattcagtcttgaaatgtgatagttaaattaacttaatttaagattgattatgataatttatgatagttaaattaatgacaagttaccacttcttgaaatagtaaaacaaaccttactagagttgaaatgtctagtttaaagcatgataacaaaatgaaactctttctaagttcaatattcagtttgaaatttgtatgattacttaagaatacttggtcctccacttggttttgggatgaatgaaggagagtagagtattaagaagaagatgatgaatgaatgacaaagaagtgaacttacttgaaatcgttcaactgccaaagggtcactcggatttttatcaggatgaacttgctttggctgcacaaataatagaaaaagttttgagaaagcattattcctgctttgagtcaaagaaaaagtaatcttaagaagatagtattattagtttttttttataattaatgttattgcttggagatctctgtttgaaaatttcaatttgaatttcaggtccctctcatcaggcccattctcagatgaggtcaatgtaatttactcacatagacgaaacaattaaagaggggagtttaatgaagcaacaaaaccgttctttttctagtttgaagactgtggtcttctaggtctgcaacagaatacattgcaattctagaatctagttatatgtattctaggatgtaatacacacattcgactttgggtactggtgcattctctgcaattaaactgaaaatcatggaaatggaacacccaaaacaggaatattagctttgtaaattgtgttggttggaggttattgcattcttggacatcacatggactacccttgccatttgagtagaatttgaagatgaacagtatgcatcttcatactcttgtaagccatttagttgacattacactgctttatagcttcaaacctctaagagatccatgtttgaagttttcttttggttaattttttaattttgtgcggtgtatatgcttgcttgctcataaatgtttttttttcttcttgaatatattcttgtgtcccactctctccatccctacccatgacaacaaaatttgatgtgttctgagtagcttgtgttctatatattctatcctgcgctggtagc

SEQ ID NO: 12579 - DNA, 9286 bp, Vitis vinifera
  Intron number 11 from transcript GSVIVT01034228001 (locus GSVIVG01034228001) derived from phytozome v7.0 (chr-ID chr 9; pos 13069932 to 13079217)
ttgtgaactacatttggtattgcctctttcttctaatgagtacactcccaaacctccatgttctattttcacacttgtatgtgactgcttgaaatttgtgccaatttccctaactttttagaaaaacaaatgtacaaaagtgagttggatatgagcaaaatgtagtaattctaacacaaaatttctagatttttgtttcttagaaaaatcttataatttaaaatatgaaaaatatcctatacagctctttcttatgcaagaggagcaatagggctagttattacctctcttctagtgcctctgcactttagccctttggtgtagagtgataattaccatgggtatgagtgatcattcccatgtttgctactagattctaggtttttggaagtggagtgaggaacaatatattttgggcttgtgtttgtaagactgatttgaacaatatggtagtaaagaaactctagaatatttgtagatgggtatgatgatataggagtaggtctgggataaaattaattatttcacttttcattgactttcagcgataagaacttatattttgtgcgtaatgaagtatcattaggtgggtatgttgaaccatgtcttaaatccaggtaaaagatcttgacatctcttttcattggttttgagatatcttttatgatccttcttgagatgtagacatctgaacctcccagggaattcatgtggtatttttctagttatattacacgtctaaagtgtgaatagtttgtgttgtcacatttcttattaaaaaagactgcatagatccttcttactagcattgtggcatagactgatcattagggtagggtataagttgagttccttgtggaatacatttcatatttgctactagattcaatggttttggagaggtgcgagggtcaatatgttgtaaacttttgtgtagctttgatttggttaatatggtagtaaagaaactcttgaatctttattgattgacacaactatggaagttgtttgggatagaattaattttttatctctttgggctttagtgacagaattcataaatgtccatgttatgaaatattagttacttgtcaccatggtcttaaacctaggtcataatcttgtctctcttgttcatgcgtttctagatctcttctgtgagtcttcttcatgtataggcatcccaattcatccaaggaacttctcatggcacttgtctggttgtattacgcttcaatctgtaaaatgttgtaccaaaaaattgtatgatatttagaaagttctattatatggtactgaattgattccttttcatatacatacatataagtatgtggtgtttactgtgtacaagctaatattagatgtggcttgtgcacactaaccaccacatatgtatcatccatgcgcttcattaataatatgttgaatttggaaaatgatttttgattatttttaacagtcaagttttattttggatttttatgtttccctattattataaatcattttgtagagaaccaagaggcagtgtctggtgggctatacggtgactttgtgggttatttagcttaaaaaaaagagagtatgtttgaggtttggaagagattaatgcttgatttgtgggagatatttgctttctaacatccatctcaatgcctgttgccaaatagttcttggtagtttcttagcatcatatgtgcaattgaagtttagtttgcttcccagttcagaaatttgtaagaatacatgaatttgacaactagttttctccactagttgtttgaaacttaattttgatggatgttcctagggagtttgacctagatgagcattggcggatttgttttggggtcatagtgatatgattcaggctttcttgaagggagctgattttggcctagttgttaaaatgaaaacatttgcttcacttaatgatctcaagattgcaagagagttgagtgtcagaaatttgttggtagaagggggtttagcggcagttttgtcttaaatggcaaataatggtacagggtcttaggatatgaccaatggatatgaagattgtgttattgatagggtattgagtctctctttctcttgatagtctagatcgggtaattaggaagttgatagtctgtctaagagaagcgcatcttctttagttgatcttattggggatgtgatgcccccttgagttttgatgtttgttccctcacccaaagaacatcaaaaaaaaaaaaaaaaaaaaaaaaaaaaaaaaaagaagaagagaaggatcccttggtggagtcgatacctttaggaaatctatgaagaaaaagatttataagagctggaataatttgatcaacaatttgatgaaattaacttatttttttaatggactaaagaggtttagaaatgctatcaaggtggcgctctcttgcttggccaaggataagctagctccacgggggaagcaaagtttttagtgaaaagggattcctctatgagtaaggttaagaggcttcctgacctatcaaaaaaaaaaaaaaaaaaggttaagaggcttcctgaaggactggcatcaatttcaagagattaccttttaatgaactacactgggtttagaaatgctagcaaggcaatactcttccttgaccttaggtaagctggctccaagaggcaagcaaagtttttagtgaagggtgctcctgtatgaatgaggttaagaggcttcttataggattaacatcaattttaagagggccttgtgggcagataatgaagaggactacattttttcctcaaaaggggaaccttgagttagcactttctctccttagttagggttttgtgtttgcttcttgctttggtttatcctgattcttggtgtatccatgtatttatctcagtcaaggattcattgccttctttgtacccatctttttctttcttgtccttctattcattaatattgtagatcatccatatgtttatataattagaattgtgctagagtccctcgtatggtttgttgataatgcgcctctgttttgtggggtgagttgtgaccaacttctatatctgaggtgaattttctttgtttcaaggcactactgggttttataaataatatagggaaaagtgaggcggtagtggataatgtggaaaatgtagatgtgtaggtgtcattgcttggttgttaggtgggtgtgttgccgactacatatttggagttatcattggaggcttctacaaggctagtgttgtttcggaccctattgaggagcagttcaataggtgggtcacctcatggaaagacaatacttgccaaatgagggaacacttgtgcttgtcaaaagcattctgtccagattacaggtatactttatatcttctgtatactagtggtttaagcttgaaaagtttaatcttatcttagagagtcattggagtcgtccttttaacattagcactattttgggactttgctgagtggttcaataagacacttgcccaatggaaagacagtacctaggaagtggagggatgtgtatattttttatcaaaaacactttcttcagactatgtatatactttatttcctctgtgatggtccattctagtgacaatattcccacttttattatttcagtactgttaggggcaattgccatgttattaacccatccaaactttaatacaactttttttaatcttgctgagaatttatctgggagacatccaataatgcaaacccctcccacctagctctgcaagggaaccccttcgggtttttcaattcaaaaggtagtgtaaccatagtggatgcatcacatggacgtcaaatggttgatattatccctctaggatcagaacttcttgtttcagagggtgaattatcttgttcatagatcttgaaaccagattaatatccattttcaatagatttatccatctattgatagagaaatattgatctctattaggatagaatatgtgggcttttttgcttgagaagaagggggacttacatggccttttcctaaaaagaattcgattgtgatacccgcaaagctctcctctctctcccttcctcatatttcttttcctggacaactgtcttcagactgtcatgaaaagttagactagtggcacctgattggtgttagaatgtgagtccaattctttggttggaaacaaatatttattggaaagtcttcttgctaaaaggcaagaagtggagcaacattacaatcaaaccacaactgtttgaccaattttgttatgacaaaattgaagagaggattaggtattagaagcctattgcttcccaacaacactttatgagagttgttgtggagcacggttcaaagaatcggccaagttaagtatgacttggtcgagtcgtatcatccttgagcctgtccgcgttgagtccgatacctgatacttgatcccatctaaaactcaggctcaaatcaagaatcgttttaaactcggttgactcgatctaggattccgagttgactgggtcaaaccttccaagttaccaaaagaaatcgttttttcacttcgaaatcatagcaaatgaacaacagtcgagatctcaaccgaaaaaacctcggaaaaattggagattgccttcaaaacaaataacttttcaacaaccaagacctatgacccattttgaagaagaagaaaggcctcagtctaatcatgagtgttggagttgtataagaagaggaggttgagggcatcgctaatttcagaatggatgtggagcgccttcggtggtgccattgggaattcaacaatagttgttgcccttctctctgcttgtttttgccctctatcaccgtggtgtgggtgagtcttgcgagtgaattggggatattgaaaaagagattgtgcatgtgaattgggtatttgaagaaaggatatccgtaatatattacctgattttttaaactattattttatatggtaatgatttattgttttatatattgatggtgtgatataaattacatgtacattattttatatggtaatggtagcatatttggtgtattaatttattattaacaatctattcaaaccattttatttgttataatattaacattattaaaatcatttaatcaaaattaaaaatggaattgatgattgaattatatgtattttagtaaaaatattattatatgtgaaataatttttaacattattataaattgctttctgcaaaggctctataattatttaaataatgttaaatgtgaaataaattttattttataattttttaagcttatttaattatatttatttttataaaaattttcataatatttttataattttttaaactttttaactatcttattttgcgtatcacccaataccgagccgagatgccaagaccgatgtgcctcaagaccgtccgaatcaatgattgataccacgactttgaaccatgttatggaggcctacggttgagtgagatgctttgttaaggaaagtcattgtgtgtaattctagagaggagatgggttgtgtttgagggtggaagcaaggcttatggtttgggtctgtagggatctattaggagaggatgggatgtctcatatgggtgcaagactaagttatcattcgatgattagtgtggaggactttctttaaaaattaattcttagatttgtttattattttagcttataaaattctcattatgctggggttgcttatatatgggtgagggattctcagaatgcttgggatgtctcaaacaggtgtaacactaagttatcatttgatgattggtatgtaggactcttctgaaagattgttcctcatatttgatgcttgatcttgggggatttagaggatttactctgtggtagttcatggaggtgttgagaatagatggtgtggaaggttgcaaaggatgctttcttctttatgagtttttggtgaattgacaagcttgggcatggttagcttgtttcggctaaaaagatgtggggtcttaatgcttcatccaaggattgcttttttgtttggcaaatagtgctgtatataaaaggaggcatgagcctatgatattctttgtgagatggttctctggttgtgacctttgctattctcctttgttgtgggtttggcctcactgtgtacttaagctgcatggtagttttgttggcaaggatcaaaagatatggtgaatggttcctttgtgcctgctttggtggcaggaaaggagacttagaacttgagaaagtttggactgttctgaagtggctacaaaggctccatgcttatttagtttcttggtcctggggtggggtgcttgtaggattgatgatttttttttcttgtattttattgtttgagatggatttatgtgtattgtacattcttcttttcttttccttggctctattggtattggggctccttatattcttccagtgtacctgggtagcacccacctcttttgctagacacctttcattgaacatctatttatttgtccatataaaagaaaataaagattaggactatttcatccctattactttattccttgttttttttttttttttgataagtaaagagaagtatgttaaaatgaaagaggaaacaccaaactagtgtcctctaggtatacaaagagtatacaaaagcagcccctcgactctaaaccaaggaagcgagctgaaacccctacctataacaaaagcctagccactcaaaaaagctaaccagagaccgtgggcttaaaactataaacatcctcacccatgaccacagattacatacaaaagaatgtttcaacctttggattgacaacacctcattcccaaaagccaatgaatttctttccttccaaactgaccaaaatatacataaaggggccatttgccacgcctttttacggatgttccccacaaacgctccatgccaccccaggagagtttccttaactgtaccagagagaacccactccacaccaaagagagaaaaaagaagattccataatgtcctcgtcataacataatggagtaaaagatgatccaccgtttttgcttcagcaagacaaagaaaacacctatttgccaaagaataacccctcctctgaagttggtctaaagttaagattttgccccaggatgcttcccacacgaaaaaagctacctttggtggcacactcgctctccaaataccaacataagggaacatagctgaaccaccaggctccaaaatagagtagagcgacttgactgagaaaacaccacttttagatgctgtccaaaccatcttatcctcgttctccctttgcaccctaaaagcttggattttaagcataaactgttccatcatctgaatttcccaatcattaagcgcccttgagaacaaaggggtccaaccatcccctacaccatctgggttccacactttcgatgcccacgtgtctttagcctgagaaatggcaaaaagagaagggaaggattcgtagagaggctcatctccacaccacttatccttccagaatctcactctccgaccattgcccacacagaaggctaaactgctatacatacccaaccactcctttctaatagctttccaaagccctacaccatgcctccctctttcggcccgagtacaccaacccccctcctctacaccatatttgtgtttgatcactttcttccacaacacctctctttcaatggcaaaacgccaattccacttacccaagagagctttattcatcaacgctaagtttcttacccccaaaccacctttcttcctttccaagcaaaccatattccacctaactagatgaggcctctgatcaagagcacctcccccccataggaagtccctctgaatcttctccaaccgcatccttacttttctgggcaaaaggaaaagagacatgaagtaaactggcaaactggaaagagtgctccgaataagggtgagtcttccccccttggaaatatactgtctcttccacatagccaaccttttcctaaacctctcttcaacacaatcccataccacctctgatttgaaaggtgcccccaaaggcaaacccaaataactggaaggcagaccacccaccttacaacccaactccagagccaaatcctctatatcattcaccctccccaccggaataagctcactcttctccaagttaactttcaaacctgagcaaaccccaaaccacatgataagccaacttagatacgtcaactgaacctgggactcctcacaaaacaccaaggtgtcgtccgcaaagagcaaatgggatatcagaatcccttctccacccctacctctagccctccaaccagataaaaagcccccactgatggcccttctcattaagcaattaaaaacctccatagctatcacgaacaggtaaggggatagagggtcaccttgtctcaaaccccttgagctttggaagaatccagaaggagagccatttattagaacggagtatcttacagttgagatacaccactctatccacttaatccatctctccccaaatcccatttgctttaacacaaccaacaagaacttccagccaacatgatcataggccttctctatatccaatttgcacatcacacccccttgattgcttttcaatctggagtccacaacctcattagcaatcaaaactgcatcaagaatttgtctaccctccacaaaggcattttggggttccgaaatcacttttcccataaccttcttgattctatttgccaacaccttggccaacaacttgtaaaggcttcccacaaggctaatcggtctgaaatctttcaaatcttctgcccctcccttcttagggactaaaaccaagaaggttgcatttagggattttacaaatctgcccctttcatggaattctctaaaaaagcccataatttcaaacttcaccacatcccacccataaagccagaacgccattgtaaagccatctggccccggggctttgtctttgcctaggtccgtaagagctgctagcacctcttcctccaagaaagggatctccaacccctcagcctcactgatatctaacctcataaaagagatcccgtcaacactagggcgccaaccctcttcctcctggtactttattccttgttgaatgtcaagaattaaaaatgattttatgtgttggcagacataatgcaaattggtgcttaaatcctggctcaagtttgttttcttttaaaagattttttttatgtgccactttcaggacaaagagaac

SEQ ID NO: 12580 - DNA, 7110 bp, Vitis vinifera
  Intron number 14 from transcript GSVIVT01029303001 (locus GSVIVG01029303001) derived from phytozome v7.0 (chr-ID chr 11; pos 17244707 to 17251816 reverse strand)
aagtggcagcaagtcctcgtgtacataggtttcaggtattcattttttttctgagtctagtaggtgtatctgtaatttttttccaggtttatttatttatttattatttttccctcctactgctcaaatgttcaaagcagcattgtttatgctgatatttcctgttgctaaggtgcgaagcacaaaattagtcacatgcctggctcaagtaagacatgtgtatccaaaatacacatgcaaaaaagcaaaacaacagaatatatgcagaaatatgagcatattaaaataatgctgattttgcctttcgcctttgaggctaggttcaataaggaaggtatttgaacagagatagtgaaggttctaggtttaattccatgtaacagaaaaaattgggatttgcctcttgttttcatggaaaatgaaatacgttattaaatagaggagtttgtcaaatcctccagatgtaagataaacaaaatacaagaaacaaggtgatttcctactgcaaaggtagcactttggttgttgtcctaatatcacagggtgcaagttcacatgactgagaagggttgcatagggcttgttttggagttgttcttgaaaacaattttctgttctttaagaaaaaaaaaagtttttttatttttgtgttggaagaattgggattgggttgttaaccgtgtgatatagtttccatagttcaagtgctgtatagttgtacaatgttatgtagtgttatgtagatcctaaaattttgctaggattaatttgtttccctgttagattcgatgtttccttgtttagattctagagtgaaaagttttgttcaatatatacccttgaatcaagacctttgaatgtgaaaaaaaatattctttcttgtttctctccaacttcagcatggtattagagcccatctaggttttatgggagtttctttaattattcttctggtggctgccctcattgctatcgcatctcacaccagcagcctttattgctgtcacttttagcactatttgtgaagggtttctttaaccttatttcacactattatttgatccatctttgtcacccatgtctgaaacatgtaagtgtgttaattcaatcaatatgtcatcctccaaccaggcttccatctgtaataaaaaaccaacccttcacatcatcacttccaagttgaatggatgaaacttcattgagtggttaccatcatggtttgaaatgttggaatttttcggcaaaatatcgccgatatttcggttattggagcaaaccgacacgatattccacactgataatcggtcgatcgatttttcacagattttttttgaaatttcatcaaaatatctgcatttatcagtatttttgccatttttagggatatttcccaaatatttcggtggtcaacccagtcaacccttcaattatgtcactgctactgcccaatcacgttgctgccagcctgccaccccctttcaaattttgcccgccttgtttacgttgatgcatggattcaaacctagaccaaaaggcttgggttcaagcctagttaccactaggctaaactcgcgcttattaataggtattggtagtaaatttgttaaacttcattattaaaaaattaattaattataattatataactttaaattttatttatttaattaataaatgtataaaaaccattattataatttttttaacaaacattttttaatatcatttatatgatagttaaatataaaaaatataaatattaaaaaatcatatatgcatcataatttattttacattattgaatgcatttgaattaaataaattatagttttaatattaaatatatcattatttatctcattaatcctattttaaaaaattattgtcacttcactttgaaattttttatatttatccttttaattttatttaattttgaatgtttttattttaaaatattaaaaatataaattgattcaaaaaatactaaaataaaaaaataataatgaatttataatattttataaattaaaattaatttgattagataaataataaattattaagattaatttatccttacttatcgatatttttctctttgatcatatctatgttaattatacttagaaaataattttaacatgtgtatttttatttattttatcattatttagggttattttaaacattttcatgaattttgaataattttcgctttatcaatatttttgtcaaaatccactgatatttctccgatatttccgatataaccataaaatccaagtaccaatatatccgtatttactgatatttcaaaccatggttgtaatcagcaaaggtataagggaaagatgaagtatgtgatggggactgcaaaaccaccagcaagggatgacctgaaatatgaagtttgggatgcaaagaattccatggtcatgtcatggttgctccactcaatgcaactagaaataggtaagacctatttgctcctatctactgctaaagacatttgggaaccagtgttaaaaacctactctaaggtaggtgttccttctctaatatttgagttgaaacaacagattgttaacactgagcaagggccttctctaatatttgagttgaaacaactcaaaggatttttgttgaaactagatttataccaaaacctggagatggagacagccactgatataaagaaattgaaagaaataatggaacaagagagagtattccaatttttggtaggtcttgatccaaagtttgatcaggacagtggtcaattattgggcaaagaaccatttctatctatggatgaagcatttgcccttgttgaggggaagagaatcataaggaattgactgttggaaattcaagaaatcctatacctgaatatttagctttggcagtctctacacccccttcgattgccaaattataagggacaagaggatggtggacaaagataaattatggtgtgatttttgccatattagaaattgcatgagaaaccttaaaatttgaagggtgttagcaatgaagggggacaccgcacgacaaaatctggaaaaggccaccaaacagctgctgtagaggattctcaagaggctacaatattcaaccaagggactatcttagggttgcaaggcttggtttttactacttatcaagagagaaaagatcaagcttagctatggctttgaagtttaggagatcctccattttctttgttgaaaaagttgtttccttccttgtttgaaaacaataatatagaattttgcatggtgaaatttgtgagcttgctgaacatcatcgtttattttctcctttgaaaactctaaaatttttatcaccatttagtttgatatgttctgatatttaaggtccctctcgtgttactaacactcctggttttagatggtttgtcaactttatagatgattgtccttgaactacttaggtatatctaatgaaatcttccatttttcctatcttccataaattcattagcacttagtttagggcaaaaatacatacactaagatccgacaatgacaaagaatacttcaatcaagatctcatcacctatcttctaaaagagggtaaaaaagtgacatcttgttgttgtaggtcacttcttttccaaatgaaagtcctaaaaatttattggatgttcttatagttgcatatttgataaaccaaatgccatcttgtgttcttgaatgccatcctcccattagtaaactctcaactttgtttcttaatttccaaggggttgggtctctaccttaaaaaatatttagttgtgtttgttatgtgcacgttcatagttacttgtgggggaaatttgatcctaaaggtatcgagtgtttgtttttgggctattcatccacttaaaagggatacaaaagttatcatcctccaacaaaaagaaaatatgttgaatggatgttacctttgtggaaaatcaagcattctttggggacacctatcttcaaggggagagtcaactaggagaaaaaaagtggtgggagtctaatcagcctttatctatgccaaatgtggtatatggctccatgccgaggcctacttctgattcaatttgaaatattgctcctgatttaaattctcgtaaaagtacaaattttggtattggtcttggtttcaattctggtgttagtactgttactgttacacagtttggtattgtttctggttctaattttggtatgagtacaaattctggtcctgatgagtctttgagtcatgattctcatagttaaaatccatccattgaatccgttgaatctaccaagatctcaagtattgcaaagtctccaaagaccaagaataagaggcccaaaactcctatctccaatgtatattccaggtggaagaattctacaatcacctcacatattccaatctttgaccttgtgataggtaatgatgagttgaatttccccattttcattaggaaaggagttaggtcctgctctgatcaccctacttctccaaatttgtttcctttcaacatcttttttttttttttttttgatcagaaacaaaaaaatatattatcctttcaacatctttcacctcagttttaagcctttttcactcatatttcctttgacgaagtttcttctactgtctaagaatctattagaggttaaggccatggataaggaaatgagaggcttgaaaaaaagaattagagttgggagctacaaaaagagaaaaattgtgcggtgcaagtggattttcaacattaaatacaaagctgatggtaccttggagagacacacagcaagattggttgctatggggtatacacggatataggacattgattactatgagaattttgctcaagtagctaagatgaacactattaaaattctactttcattggcaacaaattttgattgtcctctgcaacagtttgatgtaaaaaatacttttctccatggtgatctagaggaggaagtatatatggatattccttaaagatataaaaaggagtcatggggaaatgaggtatgtgaactcaaaaaatcactatatggtctcaagcaatctcctcgggtatggtttaaaagatctatggagctatggtgaagagaggttaccatcaatgtcaaggtgatcacatactatttatcaaacactctcatctagggaaaattacaacattaatgtgtatgttgctgatattgttgtcattagagaagaacaagaagagattatgagattgaaatcatacttagctaaagaatttgaaatcaaggacttgggcaagctttgatatttccttggaattgaggtggctagatcacaacaagattacaagaattattgatttctcaatggaagtatatacaagatttacttttaaggagataggtatgcttgggtgtaaaccagctaagacacctattgaacaaaatcacagactaggagagaaatctaaaggataactgattgatcgaggcaactaccaatgaatggtgggaaaactaatttacttgtcacacacaaaaccagacattgcatatgtcgtgagtgtggaaagtcaatttatgcatactccacttaaaccccactcagaagttgtatactggagtttgagatatcttaagatagctcctagcaagggtgctttgtttaagaatggtagggagttgaagttagaagcctacatagatgcaagttgggttggatctattatggagagacgatcaactactagatattgtactttcttaggaggtgatcttatcacttggagaagtaagagacgatcaatagcagcccattcaagtgcggaagcagaatttagagctaaggcacaaggtatttgtgaacctctttggattaaaatcatatttaggcatctcaagatcaaatttcaagaacctattatattgtatcgtgacaataaaactgccatcaacgtagctcacaactcagtccatcatgatcgaatcaagcatgtgaaggttgagaaacattttataaaggaaaagctggatagtggccaactgtacacatcatagatatgtactactaattagctgactaatgttctcactaaaggactcccaagtttcaacaaatgattgacaagctgggaatgcaaaacatctttgcaccaacttgagggaaagtgttggaagaactgggattgggctgttgaccatgtaatatagtttctgtagttaagtgttgtatagttgtacaatataatttagatcctaaaattttgctaagattaatttgtttccttcttagattcattgttccttgtttagattctagagccaaaagttttgttcaatatatagccttgtatcaagaccttagaatgaatgtgaaaagaattattttctctcttgtttctctataacttcagcatttagacaccatgtttgacaaaattttgacagaaaacatttttttgaaaatttattccgcaaacagtttattttttagaacaaattttagttgtttttttgtagaatgttttgattagcaaattgaaaatatgaaggatatgttgagaacatttacattgtagagtactttcatagaaaataagtctagaaaattgtttttcatatttgagtttccatacaaaattaatccctaaaaacatttgagaacagtttttaagaactgttctcaaaaattgtttttttgagaattctttttgaaaatgttgctaaacaggcccataatctccacatgacccaagttgtatagtattttccagacatgcaagattaaaaattcaactccctctttttaataatgggataaaggccccacagcttttgttcatttagactttcatggcacttcagtctgcacaatttagcctgaaagttaaaacttggttgtcttataattttttttttccattcatgtagaggtgtccattgcatggcaccggactaaaatcattcttgtgctagatatttaattcacttttagggaaagtagagaaaatccaaatggcttatcacttcaagttgacaattattttatcataatggatatctttgtcttccaggtgctcgacgctttggtcaaccttttttgccgctc

SEQ ID NO: 12581 - DNA, 2321 bp, Vitis vinifera
  Intron number 1 from transcript GSVIVT01010782001 (locus G SVIVG01010782001) derived from phytozome v7.0 (chr-ID chr5 ; pos 22546326 to 22548646)
gtacacccaaatacaaagacaaagattcgaacaccgtgcaggaaaaggaataaagaacaaataaaaacgatgtaaaactcggagaaggaaagagcagaagatgtcgatcagtaaacataaatagctccacttcaaatattaatccatgggctaagaacagaggaaataatgcagaataggatttaaacgaaaactgagcattatcaaattcaggcatggagtcataaatttcagaaaacatcaatgacacattaaagaatcaaaatcaaaatagggcaaagaagtaaacgaccgatctcaacaggacaacttgtggcccttaacgtccacaccaaacagcaaaaactaaacattcagaaacgaccaaatggaggaattgaatatgggtaagaacaccaagagtaacgagaagtgtacctggacagttttggctgcaatcgctcctttcccactcctgctgaaggaaaatcccccttcttttttatcccccaagatccttggccctctggcagctgtcccccattcagtgccttctatggcaagcgtgcttcttttttaaggaattccaaatatatgggtgtctctggatctcttttgcagcctgtgtatatggcctttccaaatggatcaaatgtggtttccttgacgatgccaagtggaaatttcttcaaagaagcaaccttcgtctcttgcttggaaagtggagatttcctcattgcaaaatcccatgcaaaatagaaagtaaagagtagaagaaaaagaaaatcatataattgaaaattaagaattaaaaattaaaattatgcaattaaaactaaaatatcaaacacatgcatattttaaaaataataataataataaaatataatttcaaataacctaaaaaaaaagaatcattaatcttaagcaatttcctaaaaataaataagtgactaaaactaacaaataaaaagaagaatcaagcacatgcaagtcatacaagccatgcaagttatgcaactatgcaaaccatgcaggaaagtgagtcaaaaagtgcctaagtgacgtgaactaagtggaatctaacctaaagtgcacccaagtgaagcttaacctaaattcgaaaggcggccaaggtcaggatgaggggtcaaataaatccctcaactaaagtctccgaggtggctcaaaaaagggtaagttgtatgagtagccatgagccaccaagagactattatgagtactgaaagagcacttaaaagacatgtgctaaaggggacaaaatagagggtctacaactaacggcttggaaggggcaataccttttaagaagaagactaactttgatcaaaagtaagttatcaagtcttctaatttattttatatccttgtttgtcattcctaggaaagtcaatgtaagactggagaagattcaaaaagacttcttttatagagatggctggcttgaaaaaaaaccacatttggttaagtgagttgttgcttgcttgggaaaaaggaagggagccttggtattcataatcttttcactttaaacaaagctttgattggtaggtggaattggagatttgcaatggaaagagatttgttatggaagcaaatcataatagagaagtttggagaggaggaaggggaaaggggtggggggggggggggcgcggcggcaggatcaaggtgggtgagggaaggttatggagtgggggcatgaaaagctattaagaaagggtgggagggtattaaaagcaggtcttgtttcatagttaggaatgagaaaaggataaaattttgaaaagatatttggtgcgacgatttacccttggaagaagccttcctaagtttatagcttcaaacaaagatagttgggtagcatacacatggggacaagtgagggaatggggtgatttgagttcccacttttctaggcagctcaatgattgtggtcttatgtaggtggagtcattctttctaaagctccacgccttgtactttccctatttatcacatcccaacacttctaacaaattgcaatggtgaaaccatctagcccgagggctttttcgttatccaactgaaaaatggcaaaatgtacttcctcttctgagaaggggcagtccagccaagaaacactctctcctgatatgagagaccaatcgaaaccttttattctccaaaagtcgcctgggggcttggagtatagctttctaaaaagatgcattatcttctttgaaatgtgctattaaattttatgaaatacacaaccgtgatattcattttctagctaacatgcaacatgctcttaaaatgcagaatacacaccataaaag

SEQ ID NO: 12582 - DNA, 2025 bp, Vitis vinifera
  Intron number 9 from transcript GSVIVT01022364001 (locus G SVIVG01022364001) derived from phytozome v7.0 (chr-ID chr7 ; pos 19049823 to 19051847)
atcccgatatcatcatcgccaaactggtaacgttccttctcctcccactccaccaatctttgtagtatgaaccaaaaaaatgctaaatgacacaaaccaattctctagcttacttctcataagtaattatttttttgtgtccagctataaaaccaaataaaaaaaacctgggtaattcaaatatgacccgcaagtcatgtttagtatccggaaatgaggaataaaaatgaatattttatatttcattttttcttgaatgggaatgaatttggtgatttcaacttttgtggttaaatgcactatgaatataactttgtaataattatttatttatatttcaacatttggtaacactaaaaatatgaatgaaaaaataaataaattgataataataatcttatatatatagtttaaaataatttttcttttttcattttattttaaaataacatgcttaagagttttctttttaggtaggtcataagattaaaaaaataagaattaataaataaatattaatcatgaaaagtcataaaaatgtaatggaaatgtagtgataaaaacaaataattgaaatatcacccacaagtcttgtttggtacttgaaaatgagaagtgaaaatgaatattttattttttattttttctttaatacaaatgaatttagtgatttcaattgttgtggttgaatggattaagaacataagattagactaattatttatttctatttcactgtttgataacactaaaaatatgaatgaaaataataaataaattgacaataatactcttatatatagtttaaaataattttttttattttaaaagactttttaggtagataataagatttaaaaaataatattaattaataaataaatattaatcataaaaagtcataaaaatataatggaaatatatggataaaataataatttaaaaatattatatattatttgctctaccaacatagtcaaaatacttcatcttggggattaattccaaatcccacttgtgagtgggatttatgcatcctcattattatttaagttattaatgcatatgaatggatgaggatatgaatgagatgttcattctcattcttgattcactcgtatcaaacatgatctcaaataaacttagaatcttctactattatttaatgatttaagttaaattatttttaagttgttagtttaacttataacttattacttgatttttcttttaaatattaaaatgatttgataacaataatttaataattttaattagtaaattgaaatatttatctttattagttttaattaatatttattttcatcaactttagctaatattcaactttgttaaccttaaataataaatttatttattaaatatccatattaaaagtattgcacacaaataaaataactataaaatatttactataaaaaataattggtagatgcagagttacacttttaccatatgtaaacaaatatggtaaatgatttgggatttaaaataagttaattatttttgtttgatatttaaagtgattttacactttaaaattatgttattacattatttatcaaacatatttgataatttacttaggtggtgtttgtttttttaactttttgttgaaagtaatttgttttcaaaatttaagttatttgtttttctattttttcatgacttattataaaatttttactaaacagaaaaagccaaaatatgtagttttttttaaatagaaaaaataacatattggtttttctttactttttaatacttaatataaataaaatgctataaaaacaaacaacttaatatttaatactattaatctttaagatctatttaaaattaagtaaaaaaacaaacatcaccctaatgacttaaattaagtcattaaatcatattaaattattaaattaatttattaaatatgatctccgtatttacaattaattactttgatttccattgatttgtatttggatagagtgtaacctgtgatttctacgtagg

SEQ ID NO: 12583 - DNA, 402 bp, Vitis vinifera
  Intron number 7 from transcript GSVIVT01014738001 (locus G SVIVG01014738001) derived from phytozome v7.0 (chr-ID chr1 9; pos 9097085 to 9097486)
agtacaaaactgcttattactcattttaccttccagtaagctaagctctctctactaagaacggttttgtattccactttattgttaaatcatgctgattttttatttttttttactgaagttacttgaggctattgatttttttattttattttattttgttttttgaagttgaaaactttttaattcttcattgagttttttatttttcatttttttcaaatgaaaatgcttgcacgtgagagaattttcatttttgtgcttcctaaaatgatatcaagttttctattctttgtatttgatcattttgctgtttactaagaagtttttgttcatagcagggatcagtgaattattaaccttgacttctatttgcttgcaatctcgatacacctaggttgc

SEQ ID NO: 12584 - DNA, 1845 bp, Vitis vinifera
  Intron number 14 from transcript GSVIVT01008542001 (locus GSVIVG01008542001) derived from phytozome v7.0 (chr-ID chr 17; pos 987347 to 989191)
atttgaagatactcaagaggagggagaaaaagaaggtaccagttacttctcatcttagccatcagtatatccttgaaaatttgttgcaaatgtaatgctaatatgatagctttaatatcgaagaattgtcatttcaagttctaataattatgtgttccttgtccataatttagtagaaattgaggattgttaatgtggagatccctttttgggctaggttgttttgatttcaatgttacaaattgatttgtatttaataaagtaggtaagatttgctaatgcggagaatcgtttattgggatttgttgatcatttattaggttttttttttttggttgttgtctgcatctttttagcttatttcttaccaagcagttgtcatgaccatagttgttaacccataaaacatattgtgtattgtttttctatttttctgtattgtgtattgtaagttgtttcatacagtgaaaaaagaattaaaaaaaaaaatgcgtatgtatgcatgtatatagaaagtatgaagtatagaatgttatataaacagttttatgaaagatagtaggatttaaagagttaaactatatcatatcatatgacaacatttaatattagacttttgaaaagttcaaattagcaaaatatgactttaatgtatagattcatcacataatccacaaaaataaacttcttgaatttttaactatgattttgagttccaaattctaactaggcatatgcacttatgtatgttgttaatttatatatatagcatcctcaaagttccagcttttcatgttcgttatcattccttccccatcgaaaaagaaataaaaaaaagctagtatattaggtaaaaaaatttattcattattcaccatcatttctaatgtcacattcaaactattcaaatgaaaattcttcaatcttcattgtaaaaataaacttacttaacttttaatataatattcaataacaagaatgtagcttttcatgtaagattattttacctatttctcttttttatgatcaatttttactcttttagtacatttaagcaattaatgtgataattttttttaacaaaaaaaaaaattttgatttttcttaaaaattatggaaaatagttaaagatgtatgtgtcgtttgtatcattatatcatgtatcatatcgtgtatcgtatatgtatcataagatacactttaagataagatatggattgcgatacatatcaatttcaataaaaaaatgtattgtatcgttgtattgtaagtttttaactactatggtcattaccatcctaacaaaaagggtttacatggtcatttcatagtattgttgctacttctcatgtgagtaggtaaaaaacttaacccccacctgcatgcaagcacacgaaatgacaacaacaattcacaataaattttgcatttgttattggagccacccatttgtaatttgattgcactcttgtaatgaatgtttctttttagtgaaagtaacaatgacttatttgtaagcatataaactggatctgagatgctggcctaagtgttatgtcaacaagcatctaaaacattgatattcaatagggaggcgagttctacatatcaaagcttttagtagttccttaactattttattgcctaaaagggttgtccatttttaagcttggaatgtattaaatattcatgtttagtcttccttttagattaaggtctgctattaaatatgaatggtgtactttgttacatatttcatttgaatattggaaatctacctttcctaaatgttattgctttacttgaacagggtttggatcaagccagcaaagcaacacctttgaa

SEQ ID NO: 12585 - DNA, 4896 bp, Vitis vinifera
  Intron number 13 from transcript GSVIVT01030062001 (locus GSVIVG01030062001) derived from phytozome v7.0 (chr-ID chr 12; pos 9360456 to 9365351 reverse strand)
gaagtgggctagtctttggagtgattattggatacatctttaccacaaggaaacttcaggtttgtgaagacttttggaaggaggcaacaagaagggagaaattgaattagtgtgactacattgtttcgttccctttttctttctttgaaatgtggaagaagcagtggactagtattaatatatatggaatggttaaaaagctatggtgatttgcatgtaagaagtaatgtaactagcttgtcattttaaagtattagttgtaatgtgctgttgtgacaccaaaagcttagacatgaattttactaagtagcaaaaagtatgaacatcaatatgaatacatatcaatgctcaagaaagcaatacaattgactgcaaaaacaagcaataccagctatgggaaaccagagcagaaaaaagcaattaaggtgctgctaaaacttcagtagtgcaatgaagctaaatcctcaataacaaccaacaacattgataccatcacaaacagtacttaaaggaccagcagtataattaaagaagagtttcattttactgagctctgtataccaggaatatataataattttacagataaaactgcctaagttttttaagtctttatttcagacatgtgattcaaccacattgtcaagcttcctctttgtaaacacaattttagcctaaaatgtcctcagtttcaaaactaatcatgattcctgctgtttagacatcatgagactcagatattaaaagttagaaatgccagcgatagtatgttgtgtgtagctaacaccgaatttcatttggcaaagtcttattgctagtctctcatctagcaatatacaatatgaattttttttttcttttgataggtaaaataaaagtaaatatataaagaagcaactaaggaaaagagtaatcttcctcgggaccaccaatgccaatgctactcttcctaagcctcaagatcttaggattgaattcttgttaacttgaccaagtttccccatttcctgcagaaccaagatgagttagagttctttcactttccaataataaaatttgtggtcaaattccagaactgacctgcaacatgagttctctggagatacttcatctattgtataacaatttgagtggaatgattccccaatgcttgaccaacttcagcaattctttgtttatgctgaatctggaaagcaacaacatttatggtaacattcctcaaagatacaccatctcaaacaacttaagaggttattaatgtcagtcaaaatcaattagagagaaagataccaaggtcattgaccaattataaagggctcaaaatcctaaatcttggagacaatcagatcaatgatactttccccttttggatggcatgtctttaggggtcagattccttctcccttggcaaatctttcccacctcactcgtttgatccgtaaagcgaaactatataaatggcgagatccccactcttgcaaacctaacccaactaactggtttaaacctgaatataatcaactaaaaaaaatccatcttggttcatgaacatccccaattaaaattcttaaatcttgggcataataaatagcacggtccaattccaagctcaatatttgaactagtaaatcttcaagagcttcatctaggttcaaataactttagtggcacattggagctggacatgcttcttcactccaaaatcttgctccacttgagtgacgataaaacaatttatcattccataccaacatcagtgtcaatgctccacttcccaagtttgagattttaggattggattcatgcaacttaagtgagttcccaaatttccaaaggaaccaagatcaattgaaatttagaacgttctcgcaacaaaattcatggccaaattctgatatggatatggaagacaggtaaaaaaactctttcagttttacaactccttaaccagctttgaccaacctcctgttatccttctggggcctagtctaaaagttttagaccttagttctaatcttctggaaggatcacccccattcccaccaccttcgccttttattattttgttctgagcaataaactaactggaaatcttccgccactaatctgaagtgctctagatttgtccaacaccaccttgagtggcaggatgccatgatgtttgatcaatataagcaattctctgtctgttctgaatctatgaaactccatcactaatctgcagtgctcttgatttgtccaacaccaccttgagtggcaagatgccatgatgttggatcaatgtaagcaattatctatctgttctgaatctataaagcagtaacttcaagggagccattcatcaagcatttggcacaggaaacaggctaaagacaactaaacaacaacttaagtgaagaaaatggaaatcaattagaagagcagatgccaaggtcattggccaattgttcagagctcaagatcctaaatcttggaaacaattggatcaatggcactttccccttttggttgcaatctcttctacaattacaggttctcatcttgtgattcaatagattgcatggtgttataggaaatcctaaaaccaagatcaattttcccgagctgcacatcattgacctctcttacaatgtattttacaggtaatttttccatgagaatgcttccaaatttgggatgctatgaatattttggatgaaaattgcttcacatatatgcagaaaagcatgaattttcctagctgaaggttcaggatcattggcaattacacatactccatgatgataacatccaaaggcatgcagaggttatacatgaaggtccctaatatcttcagtacaatcaatctctcaagaaacaaattaaaagaatagattccaacctccattgggaacttaacaggcttctattgctcaacctttccagcaacagtcttacaggccacatcacaacattgttggatagtttaatagaagtagaggcagtggatctttcttaagaaaagctctccagagagattcctcgggtacttgtgaggatgaaaagccttagttgattcaatgtttctcagaatcatctcaggacacctataccacaaagtaatcaatttcatacatttccaaacaacttacttaaggaaaacccaggatcaaatggaagccctttgtcaaagaagcgtggaaattctgaggcatcaccactgccaccttcaacctcccaacaaagtgaaaactcagagactggcagcaaaattaaattgatgatagtattgatgggatacgggagtggactggtagagtaattatggggcatacttttggcaagagacaacaaaaacagataaggcagaataagagaggcagaaattgaaggtagtagtttattgtttttgtctccatttttctttctttggagtttaggagtgaagtggtattactgtatggaatgaacagggctttggagatttgcatgtagggagcaatgaaacttgcttgtctctatcaaccagtaatggtgtcggttctcacagtcaaatgtcccatttttactctgcatttccctttctttctttcttttttcctttttttttttttttttgataagtattttactctgcatttcttaatctccaattctttgttttgagaggtgtcaacacctgccatttagttgtaagcagtaagaaatgcaaacatttttacactacactaaaatcactgtcgtttcattagtataacaatgtcattcactaacttgtgttctctgtttctttcgttcctgcctccatttcctcataactacagaatcatagtcattttcctttttgtttctttttgctactataattcatcattttgccttttttgggtggtatggaaagaaagaaataggatagcatttgacaatgaagagttttcagtacataagttgaaatattcttttgtgtgtggtttatggtcttggacaaagttgtttatagatgttggccctttatctttaattaacgtttttgattggttgggctctaggtaaggacgggagaggtttttgttttccctcctattttgctctttttagccttttggcacttgctgtatacttcctgtatgccttgagttacccttcgggcttcctttttctaatcaatatattctcttctgtgtttacccatcaaaaaaaataataataattcatcgttttggtggaaagaccaagataaattcatgtaagagctcaaagaagcaacaaaattaagcaaaataagtattaaaaacaacattaatgctgtcacaaacagtgctaaagactagcagttcaattaaagaagagttggatcatactgagctctatagatcaggaatcatacaataattttactggaaaaggttgtttaagattttaaagtctttatcttatagacgtaattcaaacagtatgaaggtttttccaactaaccatgggggtttgggtttcacatttctacaaaaggcacgtaatttatcaaattgtttacacctcttggatcccatggttcctcattttcaaaagtaactgtgatttatgcatgctatatagaggcattgtagaaactccactaaaaattttaaaaagctctagtggtggcatgttgaacaggcctaagttagaaataataaagcttatactccccaggtggagagagcatcatgttggcaatgaaataagaggaacaaagattccactgcagttagacaccacgaggtgaaaccatggggaaaccattgcacgagaccttactcctatgtataaaaaatcattagttctatgcatcctagtcaatagtgctaagaaaaagtaggacattatgggatcatttatgtacctttccacattgataagcctccagattttactctt

SEQ ID NO: 12586 - DNA, 8668 bp, Vitis vinifera
  Intron number 5 from transcript GSVIVT01008239001 (locus G SVIVG01008239001) derived from phytozome v7.0 (chr-ID chr1 7; pos 4233689 to 4242356 reverse strand)
ccattgagagacatcttcttggagaaataaaggtaattgtttttgtttttgatattgtgatattttctatttgcgtgtgtcatgctaatgttttgagtgtctaaacaaatcctttcatacctatattactttagggtgtttttgagttcaaagagcagttccaaggaagaaggataacatctgcgattaaaatgatacttcttataagtttttggatcatgttaagaaagcactgacctctttgtaggagatgtcaaaaaagggactttgtctatgggtcaaatgttaattttatttcaagattagaaaagttagaataaaaaggagaataaatgatatagcaagaacgggcaactggggttgaaagcagtgttatcactaaatatatggtctggtaggaactagaaaaaaatttgtgggtaatgaggagtgtatatttttgtactggatattatagcagcagcagcaacatgtgctaatttgctaatatctggtttgttgcaagctcacctccaatagttccccttatgagccctacaaacattgtgcttcctaatatgtgggaagctgtttagaagttgattctgcttttgagattggggtaaggctggaggaagtgcacgactctgactcttcacattggatttgtggttttataggtttttactttgtttttattttattttcttttatgttttaaaacttttgcttcttgaaggaattagaacttgcagcgatagtccaacactagtcattctcaatcagtatgtgggggttcaggttcatgctttagtttcagagaatttacactctcatatgggatgcctttgttgttctattttgaagatcaagttaagcctgcttatatcttgtttagttcattactttcttgagcctgaatccaaattattcgtgacttgacgtcatcatggttacattgatgataataaatagaaaatggaaattggattttgtaattacaatgtggtttgatacttttgagagtgcatttatagaggatgcttgcatatggattgagattgttggcatgtacactagagttagagtatcaaaattattttgttgagtataggcaaatattgttgattccaaaacccagagttagtgtgtctcattgctaatgaagccgttgtctccaaaattcagagcttgagagaagggttcctttgcaagttggatatttgaaggacctatgattatacgaattggtatttcttggtgttattgatggagagaggatgggttttaatcaaagatgagtacttggattgagttttgtgcttctatggtcttaaatttggtattagtgaatggaacacttaaaagttctttccataagtttaggggtctcatgtaaaaggatttgctcccatgccatccttttgttttggttataatagaggtttttagcttctctatttctacaatggtggagaagggcttcaccgaaggtgttaaggttgggagaaggggtggttagaagttaaagatctctcatttgtttgctgctaatgacacttttttattatataatgttgatggggatgagtccgccaaaatctgctctagaaaggaagaaaagaacattgtgctgatttaggacctttagaatcaagtttagtagttggttatttaagtcttgtttagaaattataagttttctttaacaattccctattttagtaagtttttatactttaaactttccattttccaaagctattatatttagaaaacttctatttgtaaaagtttatattttgtaaaattttctattctctaatttttttttttattttctaaatcttttagcttctaaagaacttttattttgtgaaaagtttctattttttcttaagtgcaaggtttagcaattttagtaaagaattagaaattctatttaataaccatatagattaggtttctttttccatagtttgttaagtgtttaggttttctaaaaccgataaataaggctatttaatgtaactaagagatttgtagtcacaacctatatagatttagtgttggtttgcaatggactcaaagacatttgatctttttgtaaaggtggtggggggagaggacgttgagaggcatcattgaggagaaaggaagacgcctttcggcctagattagatttagggatttgagtttacactgcttgttggaaggggtggaaacttgttgtagagatgaagacttagtgaggtggagtaaagcttaggaggaaggtggaaagaagttcatgttggagctttgtttgaatggggcaagagattttttcttttgtttagttgtgactgaggaggtaaaaaggttttccccgatcttccttcggggatggtttggcttagtggagaagctttgtttgttaggagttgccccttctatagagttcaagggagtggtctcccctgttgaggcaaggtgtagtcctaaaggggactgttatcaggacttctgcagatttggttaagaaagatctgggcatggggggagaagtcgtttggcttcaattgggggagactgagatgaagtgtagggaggatcaattgaggaggtgtctggtagggtggttcagagagggcttagacttgctactggatttttttcttgctaaaaagtgtgatgacgaatctgtggtctttgaaaggagggttgaagatatcagtctttgggggggccttgcttttgctctattttgaagatagcatcgaggcagagagggtgcttgcaagaggctatagaaggctcagggagaaagttttgcatttggtaaggtgtactcccaaggttgggtgtttgctgtttgctaaggaagtctaggtgagggtgttaggtctccctttgtatctgtggagtcaggaggtgtttaagaagctaagggattgttgtgggggttttgtcgctatggatgaagaaacttcacttttgtctcatctacagtggggggagatcttggttaagtatgatgggagaaccatggttgacaaggtgcaagtggtagtagggtattccaatttttcctttcagctgtggtggaaagctccacctggtttttcgatggtggttctgagatgtggtagcaatggtctttgcaagatggaggaatggggagatgaggaggatagtccacatgtcggtgtaggagtggggaaggaagggcaaccctgctagtttgctggcattgaagtgttgcagcctagtggcaagagtgttcaggaaagagagactgcaacttcctgtttgtttgatcagggaggggtggtggtgggagaacctaggaggtggtgagaggggtacaactggaggaggaagggtccatttggttgaccctgtattaacggagcctctagtggggctgagtcagggactcaatgattgggctgctagaggttgggaaggggttaggcctggtttgctctcaagccaaaggctttagtgggtctgttccttaaagggccattcgactacaagttatgaagaggggggagctttaagagtgggcctggcctaggaaaacttaaatttagctggggttgtggtcttaaaggagggttgtggttttttttttggacttggctgagggagagaagggctcgctagggcttctcaaagagggtggtttttctacaaaggatcaagtgactgagcaaaggtgtagtgacaaagttgtggttgagaggcaaatattgttaccagagtcagtgctgacatgttcccacatggcgatcaccgacgaagcccttgtggcaaaggtgaataggtaccctactctttctactctctctttcatagggattttggatgacgggagttggacgctaaggatgttgccaagatggtagttctttggagctttcaggaagtgtcacgaaaggatccttcaaataaggactgggtggttaggaccgagcagctagaggcctctcacaccatggagcttgcttgcatttttgagggggcggatcttgatagtcttcccaataagcttgtcaactttagtaaccatgtagggatgctagtgacggggtttgaaaaggagatcaactcctttctaaagattttgaagttgagaaaaggaaggaaagagcgtggggctaaggtctcaagtgaaaagagtaattttcccttggcttcccattttgagagggaaattcataaactagagtgctccgttaattataatagctctccgcacccaatcaggggaagggagaggagcactggggattcaatgctagtattgtgggattattgtcttgttttagtggtggttgagagttttgggtttggctggtttttgtggtggaggtcctccctattcttggattctccttcgaaccaactctcttggggttgggctttgtttaggtggttggtgtgcttgccttttggccttattgtatactctgtgtttactctttgtgcctttttgcaagtgcttttagtatattcttctaatttacctttcaaaaaataaattttttttgcaaacctttcaatggtgaaactccattatttttcttctaggtaagactcaaacccacttctatgaatgcaccacattgaactgaaacccaatcccaattaaatggaccacattaaagtctccatgaatgcaccataagtcctcccacaactatccaaccactaacaaatccctcccaaaaattcactttccatgctctaatataatggagtctatttaatagagaaagcaagctcattctagtggtcaaggtggaggatatgaacttcttggcttctattcttggttatggagtaagaagtttgctttccacctatttgggtactcaatttaaattaggattagtttgggatttagtgaaggaaaggtttagaagattgacttgttggaaaaaggcaatacccctattgcgaggagtagagaggtaggcatatgtatattaagagaatcatctccaatttgccaaatgtacgtcatgtcctctattgtgatccctcacacagtgagaattagagtttaattttttattaatcaaaaacaaatagttggaaggattagctgtccttcaagaatgtaacagtgatacaacaagacaaaaaggtagaaagataaaaataacaaaacaaaagagtatttcttaaggtgcccctccagcaaaagttggatcctgttagttggtagagcatatattttgataagaggaaggatgggttgcatttattttttaattttttgttagaaacaaaatgtgtttagatgtggttaaaaagtatgtgagaaggatgaagaatccttcctaaatttataagaagaaattgatcaaaagaaataggtgattcaaccttctcctatgctaaaaaggcctacacattgatatagtaccatatgagattatacaatatatagcaactcaacattccttgagggttaacccatctacttaaaaaataaactaaatcaatgctcctccccttgctatccaaattcttttgatctagacattgaataccaatcgagttgaacaatattgagagaagcacccttaaatattgtggtataagaggcctagaaagaggaacataaatcatttacatcccatagcatctttgaagttctccaattgtcctaaaaattccttgtttctcttttccaccacccaatccaaatcaatataagacaagcaattttccatagaactttgcctttgatgggactccccatgcacataatgcaacaatcaggattaagggctttgtaaggtcttctcatttgtagcatatcgttgatgttgaccttcttgttggctactagttaagcaaaagttttgaccataagtataggctgagtattgaaagtttttctttttctatatattggttggttctggatgttttgtagttaggaagactaacttgtggagagtcattttatgtaaattttagtaagagagggaatggattctccagggaaggcagaggtacactgttggcctatggaaagctcttcgaagaggctaagaagcgttctgttctagaatgagcttctctgtgggcaatggtctaagaacaaagttttggtaagagtttggtttgggtacaaactccctttccagtgtggtttttacctttttgcagaaatgtgttggttgctgagttggcatggatggtcaagggcattggaatcctgtagtttggggggttcttgtgattgtaagtttgggttagtgggggcatatctacagtctatcaaatctgtggttatttgtgataacattgtcaataggtggtgtggtggtagccaagaatgttggttgaggaggttttgtagttaggaagaataacttgtggagtcattttaggtaaatttgagtaagaagtgagtgtatggatgcctaaggagggaaggaagacgcacagggttggcctgtggaaagctatcagaagcggttatgaagcattctgttctggactgagcttctctgtggtcaatggtctaaggacaaagttttggtaagatgtttggtgagggaacagagtccctttcccagtgtggttttttgcttttcccagaaatgtcttggtgtctgacatttgagttggaatggatgctcaaggacattggagtcctgtactctgaggggtttgtgtgattgtgagttgaggttggtggaggcatttctacagtctatccagtctctctggtcatttgtgacagcagtgtccattggtggtgagatgggtagccaagaatggtattttctctgttaaatccttctgcagttcttaggagttcttatgccttgatcatttccagctaaggtggtgtgggtctcaaggcctctgtgggaaccaatttgggaggaaatcctcatggtgactcagtttataaggtgtggttggactttcatcaatcagtgctgtacatgcaaatctagtgaagagtcagccaaccatatccttgtcatcctgagctgtctcatagttgtggtcctttttgttttacttgtttggggtctcttgggaactttgtcatagtataaaggagatactaatgagttggtatgccagtttcatgtgcaaaagtcgtaaggtgatttggaaattagcccctttttgctatcttagtgcttttggaaagagtggaatggtaggatttttgcaggcttggactgcttccgattggaggcacagaaacttcctttaaatctttgtccacttgatctatggatgctttggaggttaataatatatctttcctcaatttattgattgcttgggagggcctaggggtgatgtagtgcctattattttgctttgttgtatttttccctttggcacacttgttatacttcatgtgtacttgggttgtggacccttttcgctaggttctattttataaatatccctgcatgatatatatattatatatggtagattacatggggatgagtgttgttggtcttggaaaaggagtatcaatcagatttgttgatgtaatcaaggatacgtataatggagcagtggctagtatgggaacaattgtagaggagatgaagtgaatttgcaagccaatagaaggcacaactattgaaattaataaacttgcatcaaagatcaacattggctcttatatttttgtatttgctgtatgaacctatcagcttgttcaaaatgtactatggtgcatgttgttaactgatgatatttgtcttgattaacaaaaccagactgggggttggttccaagtaaaaactgtggaaagatattatagaatctgaagcagctactagaaaacctacgactttaccaaggtttgaaataaggtagtttgatgatagatgtagaaccaaccttaagggtgtgaaaaatgggggaacaagcccaaataacagacaaataccaaaaactcagtgaaaataggttaagctatggaccagcagactcattaatatttgagaactcattccacacaaatggaacaagggtggggcacttgttgctgaagatctattggataactatggttaatcttgtggctagagatggctgtgcaagagagaacaagaaaacaagcttttgggtctgcttacagtagccagatacaatcctttcagatttccggatgtcagacccctctggatgatcgaagagcaaatatgaaatctatctgagaagactgaaacccataaaagcatgagttttggcagctgacagattgatgacatggctttttcagtagctggtgtcaccaaactgaaaattctgacctggtgaggtccaagattggaagttgaaaagagacctcagaagccagaactccaatgaaaaagtttgcaagatgtgctaacaattttttaggtctataatactatgttacactgaggagagtagaaaaaaaaaattgtgtatgaccttttaatgaggttacatacggtgaatgtacaggatatatagtaagaattttaggcatacctgcatattatagcactccccagtatttggtaggcttgaaatttatcatgttatatttgctttataagctcatttccaatttatgtttgatttaactggggaaaccatgacaatgtttttactttttgtttaaatgcaatcttcagctgctgcaatcagaaaggggtaatccagactctgc

SEQ ID NO: 12587 - DNA, 4966 bp, Vitis vinifera
  Intron number 5 from transcript GSVIVT01011923001 (locus G SVIVG01011923001) derived from phytozome v7.0 (chr-ID chr1 ; pos 2972494 to 2977459 reverse strand)
cacgtattctccctgttattatcagcttttctcaggtatgcttttgtagataatccttgtagagaacaacttttttctgttgtttggcatgaagatttattcctaataaattcttcctttgttctattcatcatatagtcagtggctcttttcctgattaggacttatcctcaacttccatttaaaatagctttgtccatatggaaggggtgttgcatagtgtagaggaaaagagatggaaggaatgaaaagtattaaattattttccttaacttttttctgtacagagacacaaatatatatatatacaaaaaatcctaacacctaaccctttgatcacgggattacctaattctctctacaaaatcgcaacctacctaattccattcttccacacataagatccttactgttaatcagctcaatgaagtagttttggttcttatcaatatatcttctctattatgtcttggaaggcagaatgaggcagaatgaggcatcttttaaagttcatttgcagctctactgctgttgttgttttgttttttttttcccccttttttttctttgcttgggcttagtctctcttggtcccttcttgcttgtagttttccatcttttgaggtcccagcatccttgggtgagcttgtaatatgttggcactgtagtttcatattcaatgcaactttcataacatcaatattgccccttagaattcatgacatctgcttgagtatcaacctctagctaaagctaaaagcaaaaaagccatcacaagtgaggtcataatgagttttcaagttttgaaattgccttcatttttgtaaagcctcccccttgattgggtaatatttcccaataaggaatgtctttcctgcatttataagacttgattccatgttcattcttttagtaatttgtttgttatttattgttattgttattattatcactattcttattctttggaaaggatggtatgtgtttgtgtgtgtttagggggtgggagtggtttggcttagaccgatgcatggagacctctaccagcaattatttgctagttgacccctttcaggcatgtaaggtttgctttgagtcttagttggacatgaccctttctttggccctttttggaatcgtgtcaaactagcttagctccaaatcagctcctgttttttgaccatttaggctttggcaagtcttgtatgggtcgttgtcaagtcttctaggtctttgcacaatcactaggttatttctcacaatgctgaaagtattaatgatgtctagaagaatttgttcatcaaatttcttttattcttttgattttgagggtcttctgtcatagctcaaattcaaaactatggtttaattataatacaaaagggttagcccataattctagaattgaaatgtgaattaattgttaatgatataatgtttgtgatataatatgttaatcatttatttttcatgttcagaaattctagttctattgtgcaactaacaaccaaaagatatttttttttaatatttatttatttatttattattgaatattaatttttttttataataataatattagactttattttacaagtttcaaatttaaaatttctttttgtttaataatatagataacatggtccaatggagagttttcggatatgtcttgtatgctgtcttagctatgtagaaattttactaagtatgagaaataggctgcttttaaaagtttcaaaatttaagataaaaagtgacgtcttttgttattttcatgttagtgatactcgaaagtttgtagatcttgcttatggtacacctagagggggatgaataggtgtttacttaattgtagcccaaaaatattttatttttaattcctcttttgatattaggaagtgaaaaaaaaaataataattgcacaagatacaacaatttttgtatggaaaaccactcacatggtctccttgagactatgcagatgtaaacaccataggatcagataccttagtgcacaaatccactattgaaagaacaatacatggttttacctaacggatgctatccttaaaccttactccctaatatatactgatctttatgtttgtgttgcagtatcacatgtgcccccaatggattatactttagcgcttgaggggatacaaatctctctcacaaccttaggaatgagaagacgaacttcttgaaagtgttcgatgtggagaaggctaatacgtttttttttcacaatttgcatcacacacaaacttttttggacagaacctagaattttccaaaataaaaacgatttaagaaatggaaaaatgaaactacgtagaattttaaattcttccttaagcgtttaagcactcacaagtttttaaaataattttcaaaaactttatgctcattttaaaatctatgtgccttaattaaatccaattagcctttcccggacttctctatacttatgtcatcccaattgatcacgtggcagccttgaagcttcaatagagagtaagacataaatctagaaaagtcctatgtcaggataaatggaacaaaattgccaacttaaactatgtagcctactacattaactatattcaaaataatttttcaggatttttatctttgagaattttacttgggtgaacttctttttaaagaaaatttagaaaaattgtcaatttataactaaaattggaaaataagattttcatttacatagaattaacttttgaaagtattttttattgaattcaaatgagagatattctgttatttatattgtaaacctcaaagtaaatggaaatataaatgaccaagtaataaatgaggatgatgtaaatagaatggtgaggctacaactgcattgaggcgctagagttagggtagctaagttgagaggtgtgtcaattgcactaagaggtgcaccacttaagttgcatatcacttaagttgcgcacctttcgttttaaaacaagtcttacgcaccttactgtttaaatagatcttgtgcaccaccacttaaattgctcaccttaccctttaaacaaattttgcgcatcaccacttaaattgcgcaccttgctctttaaacaaatcctacacaccaccaatgaagctacgcacctcaccctttaaacaaatcatgcacacctctttcttctttaaattatttccatgcaacatatagcaagccttctatgcacctttggtttaaaaattcttgtgcacctcaacttggcgcgcctagctcctccgccaaacccttgtatttttctttctttttttaaaaaaatatattttttccatttttccacacttggaacttttgaaaatcacttctaaattttttattgaataattttgaactttaaaagcttatttacaattgaaaacttagatttctatgatcaaaatcaaatttatatatcttcaaaaggatgaactttcacaaggttcctacaaaacattagttatttttacatagtcataagtacaactctctataccttttatgtacaacaaccaagttgcaaagaacactcaaaatacattagaaatgcattgtaaacatagttacaaaatatcttcaagcttcataaaattttcaaatgttttcctcccttcctatacatcttcaacttggtttgaaaatcaatttaaagaaaagaatgaactacaacttagtggagaagagtttattgtcattaaaaggtttataaaacaaccgttcaatattctttcatagcaacataacataattcgttcaaagatatgcatttccacaccaaatcatttttagcttattataccttccatgaggctttcatgtaccctgccgactaacatttcctttgttttcaactatgaatacttgtattttaggactctcacccaaggacatacatctatgccttctattatatctactcatagaacttccggggatatattttaggtttttcatcttagggtactttacccttcttcctttagggactgttgccccctattatttttcataaggccacccatcatggcaccttaattctaatttacaatgtcttcgacactttgtatgttgttcatgctgcatatccaagttggtttccaacaaaatagagcatatcacatataacagagcatatatcaaccatgagcaacaaattctcagcatttcaatcaacattctttgcattcaatcattatatatgctcaaaagttccctacacatgcataatctaacatgttaattaatttcacacttcaaaatatccaccggaatatcaattaaacaattgaattcacaaatccataaaaaaaattagtgtattttttttaatagcaacttctctacctatttaatttctcttcagcttttgctttgttttctttgatttcattcacttcaagaggtggcttttttttttcgttccacttttaatacttcccattaaaaatataacttcaggctaacaacttactcatccctagctgctgccacatgctatttaactagtcatcctaagtgtctccaagctatcctctcctcacacctgttccagcccctttccaactgaatcttgagatgacaaatgacttctacagcagccaagtaaaactagagaaagctagatgaatttacagccacaaaaaattaaacaagcagctgactaagctattagcctagtgttgcagagaaagtccactattgttaatcatctttaaactacttttcagttagttcaatgttaattatcctgttaatcataccccttctttaagtaactaaacaattcactaattaagtcattaatcttcattaatggattaaacaaatcaatatcgatgatattcaggtcattcattacatcttccgtctactttttactttttttttatatatatttttattttattgtgtgaacaggacagatcttggcgtgttcgctac

SEQ ID NO: 12588 - DNA, 1186 bp, Vitis vinifera
  Intron number 1 from transcript GSVIVT01033695001 (locus G SVIVG01033695001) derived from phytozome v7.0 (chr-ID chr8 ; pos 18576181 to 18577366 reverse strand)
gaggtctttataagtttatatgcctagaatcccaattattctctgttttctgtaattttttttaagctttttcttggcgctaatcttaataaatattgtgacttgggattgatttttctatcacattactgttttggtaagagaaaattgaactaattccatcgttatcatcgtaactacgttaagtttctctgaattcgtcgatgttatctttttctttcttgaatttgcttaaatctcatacattgttgctttgatcactatatcttgaggtttgattctgtagccattccaaattgaaactaattccgctgctatgaaattcaccccaatttttttgttgttggtattgtaattatttatttatttttttgtaacgactctgcacaaatcttttcctcatccttagaatttacttcatgcttcatcattgcagaatcaataattattctgattctccatgttgtagttaatcattgaaaattttgtatctttggaataatacacacatctgcattgatttttgtcatattattgggctgctgtgaattaagctgattcttttgtggataaggggactgaaataatgtaatttttttagttgtttggtttttaaggtttattagtttgatttcaatttatcatattatactgtttaattgattcctctaaattgagcacgccattgtttttgctttttacaaaaccagagcattgggtaattagcaaatttatgcaacagatacaaatacgggaatagggttgatattgcattattgtaaaccctgaatcagtgaagggtgaacacattgttgcctttttcactgtcattaaacattcagatcgttcaattaaattcccaatgaaatattttgctaaaggcatatgagggaaataaaaattttgaagcatccctactggaagaatgtccaagagaacgagtgtgtgaccattgtttgcatagaagtgtacacatagctcagtacattttggactcctttagtgttgaagggttaactttcttatgtaactgtttaaaactagaacgctccaacaatcctgtctgatgtttatgaagtttaagattcttgttgctgtttgattgaaatttttttttaaaagatattattttttgaacatttatacatcaggttccttgctgaggtcctccagcagcaaagataca

SEQ ID NO: 12589 - DNA, 4336 bp, Vitis vinifera
  Intron number 6 from transcript GSVIVT01026953001 (locus G SVIVG01026953001) derived from phytozome v7.0 (chr-ID chr1 5; pos 19078284 to 19082619)
aacaaagagttaaaggtattgatcatgttcaacattctaaattcccaatcatgcttgccttgaaatgccaatgcctttggttaaggtctaccaacttcctatgattgctccaatatcttacacctgtttttgttttctgaatcattttcctactttcttaagatgtagcaatttcaacttcataaagtatgactccaagtatgatttttcaagcatggtgttttcttttgagggtcgaagtgtttgccttactcctttactccacatcgaacaatttcaatactttggcaaatttgtattcaagtgattgcaaagtgaatgagacttgcttctgaaatgacctagttgttgagcttatttgcagtggctgaagtatcgtagatttgtcggcactgtttgactgtcctagaaatatgtaaaatgaaaaaactagaaactttttgtcttctaccaactaggtgtgctaatggttacctatttcctgttcacctaatggacccattctcacttaatagagatttggtccaacactttggacccgatcaattatttgcgggatccaggtccacaaaaataatgcccacctagggttcattttccagacccttcatatgtaatgcatactttttattatttatggatataaatgagaattgtctttttttttttctttgttttctccttgtatatccattgtatgtttaccaaaaaagtaatttttttttaaaggttaaaatataagtacctaagtagagacctggtacttagatggaacagtaaaggaaaaagatctgtctccattatcttagcgtttgtttagttgcccataactagattgcagaattggtaattggaattgaggagttggaaaggatgatttcaatttgatgtttgaatgcacatggaattagaatttttagtcatggccaaaatgtttgtgaagtggcaaaatttctaggaaaaatttctggagttaaggtcgccgaccatggcacatctgttgtggtaaacatgcctgctggaccttctattttgcttaagctttgattcccacagcctcagacatgagaaataccatccatgtgggtaggattgagatatttattacttggaggaatttgattataggagtgagattctcattctagatgatgcatcttaatctgtagaattagtgatctaattatgttttataaaagaggaagagtaaatcgcagagaatgaatgaaacccataagcagttcgtgatctttttggcgcatttaaggtcttgcatccttcttatttgcattttgttacttaaaagttaagtagtatcacattggataaaatgtgtggttgtgaatgatatgtttacccaagaacatagctcttccatttcatggagggtctgttaactcttagtgatccctttttttcttttgatgggcagttcctagtgttcttgtcaccaggcatggcacacaaggcatgtgacttttaaagctttttaaatattgaattagtcaactgagtcataaatatttttcatttggctaatattatgtaaagaagtaagaataatcactagcacatcactgccttctgttttgaggatttggtgatcggaggcacaattggtgtgcgcatgaataggtcttgacttttgaagatgcatttattaaatctttcccaaaacattgatgccatgtttaggggtggcaattcagcctgtcgtctcaggttcatgccttgccaaggtaaaaaaatcacgaaacttagtcaacctgaatactacctgtctaataatcgtgtctgatttctttgacacgaacatgatccatttattatattggtacccatggaattcatttaataaataggtcaaattaggttgtgttgaagtatattaaattaacacaaaaattaaatgaataatccatttattcagagtacttttatgactgacctaatatgattatgactcgtttaactcattcaaaacttgaaatttacatgaattataaattagcttatttttaacaaatttactgtaacttattaataagaacattatttaaaaaaaaattccttaaaatttacaactatgtgaatacattggtcatatgtggattgattcgtaatcgtgtcaatacaacaagataaattgaatctgtctaaatgggttgtgtttggattgaagtctttaatttgaacatgacttgtttaataaacaggttaagtaggttgacacaaatacaacataaagacaattaacctcaatctaaacctgttaattttgtgtcgttttcaagtcgtgtcagaaattgccgcctctggtcttatccctaagtctcactagaaattagtatttaacattcgtatttaagttttgaagttggctccacaaacccttctttttgccagctttaaggtcatgaatgcacttaaatgatgtaaaaacatcgatcttgggtatatgggattgttttcatgcatgcccattgttgtttggtttctaaaatcttgagattagaaaggctattaattaaatactgtttggatgccccaaaactctactgatgagcattattttgtaatgaatgacctgttgatgtgatagcatcctcctacaggggtgtggttcctaaatcatttgcataagagacctagatatctaggcatcccatgccatgttggtagaattagcctcattcaggccccagcttagtcattttggttattcagagtttccctaagatctaacttcaagcccattaatagaagttctggcccagaggaaggaccccaggtgtaaagcattttttaatctttacaacaacatgaagatatggggacttagatgatcttaaaaatatacgagaaaagcataaaccagaaagcattctactctttggtgaccataaaaatgtggacttgcttcttgtggtatgcctgtctcataacatcatagaaagatgcaatataaaatattcatgcttattatgaccattgttggtctaggagaaattcaaagcaattttgagatttcataacatgatgggttttgacgatatctgtttcttgttaaattttgtgtggtagtgattgagccttgtagtttcttagccatgaaagtgattgggtcgattttttcagtgtctggaatttgatgtggacttgggatgaagttccttaagacttgaggatggtcattttatgggtttcaaaactaagcttagtggtgtattgctataggttttaaatgacataacatgtctataattcagaaaaaatcagactaatatagtcttgaaatttgaggtcagttcattttcgattactggcaggccaaggaggtttggctgtgtcataattcaaagtgaacaaataaatagactgacgtgctgttgccttttttttttccctaaaaaatgaaaacttactgagcctctttcgactcctgagatgtaaaatgacgaaacttgtttttttgtcccatcttcttccataattgcagtcaacttcttatctcaaaccccattaggaacaaatgaaatgcaactcagaattagtagaacaacctttctggaaagcttaggttgctgcaccattgagataaatagggtgcacatatttgcatttggtattattccaggtatttgagagagcattgataaagaacatatcatctgctcagatttatgatctgttgcttgtaccattaagctttagaactgcatactatgctggattcgggaattgtttctttctttaccttgaaaaaaatatgatgttctagtgtagcttttgtgttcatagctttatcattttaatcacattctatcaaattgggtcttgggtgttatatcatttggatgtgaattgaaattgaagtcagtcttgttttttcttttcttttcttgccacttgcctgtttggaactgtttttgaaaacacatttggcaaacttttgacctaaaatagattttatgtcaaaattgaaaatatgaagacacaaattgagggcgtttttatcttgtttttttaagtgctcttagccacaaatgaaaatatgaagaatgttctgagaaccagtgtaccacaccttcatgcagaataagccgagaaattattactgtttttcatatttgaaaacatttgacaattgttattattttaaaaaactgtttttaaaaactatttttttaattgtttttgaacgttaccacgagatctacactgaatctattcattttggacatgcttctcaaatgccccaataagcttctctccttcgcattgtcatattaactgtcgcctgtgctgatccattgcccagaatactgtgaaaagt

SEQ ID NO: 12590 - DNA, 6835 bp, Vitis vinifera
  Intron number 2 from transcript GSVIVT01020854001 (locus G SVIVG01020854001) derived from phytozome v7.0 (chr-ID chr1 2; pos 1007664 to 1014498)
aattcaagaccatcctattacacagacttgaaagggtatactttacaattgttgatattttggtctcttgcaaagggtgatctttgctcttcttacttcgtggtctaaatttttttaaggcctttcatattatatttttagtttctttagtgatatttttttaatcgttgaagatataaaaagtaaataacttcggtaagtattttatggggatgaatctccaagatctactaaagaaaggaatgaatggaaataaaaagatcgtaaattactctatcaagtgcactaaggtaattttacattgtttttctttttcaatagtaagtagttggtatttgagtttcatttagaattttttttaattggaaattctgcttaaaagaagtttctatagttttaaactttcaattttatagaaagtcttttatcataaagtttctattttgagtcttttttagaatctaaaagtcttccatattagaaatttgtcacaagaagtttctataaagttaagtttttaattctaaaaagaatgtttacattttccttttaattctaatttgaaaagatttaagaattttaataaagaaataagagtcctgataagttattttatatatttggttttttgtccaagattgtatttagttttaagcgagagtactgtttcatatattttcttcatttttttctttcttgttccatattttattttcttttttcctgttgccataattttagttcatcattctttttttcaatttatttgattgtagacaaccatcctaggattgttctacatcaagattactgactattagaaaataagcattgttcatttgatttgaaataaacaattttgataaggaataaggaataaaggagggataacttattcttcatacttgaagctatcatggaaacaaatagtgtgttgccttattgattgaactggggatctaagaaaaagactagcccaacatcagagaaatatcaatagttttgggaacctatatgtcagaataatggtttgttcccttgcactaggaagtcacaaatacttgatagtgtcaccttagtcaaatcttctcatagtgcaaagttttgagaactaagtcttttggggtatatttataggatgctagttggtattttcccatttctatttccttatttatagaaaaaaggctatgtaattgaatatactctttttgctcctttttcacattgttttttgttaactaacattaacctttatatgtgtaactccaaaacctttgccaactccctttgtatagactcaaagaacatctcattgatactaggtgtaccattccctaattaaaataaaatatttcaagaagcgtttgccactccctccttcaaaattaggtacacaacctccaagtgagattctatatgttaatgcatatgttaactcactctactaactgcaaaggctatatttgggcgagtgtgtgagaaataaattagcctactaagtaatctttgaaacctccctctttctattggtgcttcgtcatccaaagacttaggtcttttgttttgaccaacaggagtttcactaggtttgccactaagcatccctgtttttttaagtggatttaatgtttatttccattgacaaacaaaaattccaagtttgcttctaacaacttccacccccaagaaatatctcgaactaccaagatccttcacttcaaattcatcaatcaatgtctcctttgatttcttcattccaaggtcatcatcacttgtaagaattatgtcatctacgtaaacaatcaaaattttcacctttctttcttgagagtgcctatagaacatagtatgctcataatgtctttaagagaaccctaacctttttagaactctagtgaatcttccaaactaagttctaagggattgtttgagctcataaagtgacttctctaatttgcaaaccctgcccacttgttgaccatatgaaaatccaggaggaagatccatatatacttctttatcaaggtcttcgtttaagaaggcattcttgatgcctagttggtgtagaggtcaatccttgtttgctaccaaggatataagaatccttattgaattaagtttagcaataggagcaaaagtctccaagtggcctatactataggcttgtgtgaaacctttggctaccaatcttgcctaatgtcgctcaattttaccatcaaagttgtattttaccataaagacccatttgcatccgactggtctttttcagttaggcaaataagcaattttccatgttccactttttttttaagagctctcatttcttccaaaatatctacctttcattggggaaccatcatagcttcctatatatttttgggttttcttcatgtgaaagattagaaataaatgcatagagagattgtgataatttctgataggacacaaaatttgaaatagggtgaagcatgcaagatcttactccttttcgaagagcaatgagaagatcaagattttcagaatgatattctggagatgagttggaattttattacctattgatgtttttctctttgatttagattcatgttgaactcttggtgcaacatgctcttttatttgaggatttggttgctaaggatagacaaaaagttcattcaattggtggtttgcaagtagtgaaccatcttctccccctatgtttgatttttccaatggtactataggttcgattgagtgttgtgacagtggtgagcctaagataggaagagaaatttcccaaaaatggtcttcactcaaattctccccttgaagagtggtgttgggaaaaaaacctttgtttttttaaaaaatgacatccttaataataaacaattttcgtgagattggatcataacacttgtacccttttattgtggaatagtagcctagaaagatacagttaatggcacggaggtccaatttggaatgatgatgatctggaacaagagtgaaagccgtgctaccaaagatctttataggaagggaatggtaaagagaagaaggttaagtggtaagaagagttgataaaggagtgttaaagtttacaacacgggatgacatttgatttatgagaaatgtagtagtacgaaaagctttgccccaaaattttttagtcatatgagtggtgaacattaatgctttgacaacttctaagagatgtcgatttttgcacttggcaactccattttgttgtggagtgttagtgcaagaattgtgatgagcaattccttgagtagatagataattgccaagaacaaaattaaaatacttagtaccagtatcagtttgtaaaatttggatttgggcttgaagttgatttttaaccatgggatgaaattgtataaaagtttgggcatctttaaatttttctttcaagaggtaaacccaacatatgggtgtatgatcatcaataaaagaaatgaaccattttgtattagttaaatttggaacatgtgaaggacccgaaatgacattgtgaataagtgcgaaaggatgggaagctatgtagggtcgggtaggataaggactaaggtgatgtttggcaagttgacaagtttcacattgtaaatgagaaacatttttgtaattgaacaaagtgggaaacaaagatttcatgtgagaaaaactaggatgacctaatctatagtgcgataacattatttcgttatcacaagataaagaacctaatccagtacttgcaacttgaccttgtccattaacaatgatcgagtcctcaagataatagatgtcgtcacattcccgaactttccttatcgtcttccccaaagatagatcttgaaactcacaattggaaggaaaaaatttagctatgcaattgtggtcgcttgttaatttgctaacggaaagtatattacaggaattttgggacatgtaaaacaaaatggatttttagagaatttgagagtgacatcattctcttctctgcaacagagaaagtgaaccattcataattctaatattttggtgactagaacaagggacataggaataaaaatatgttacatactctgtcatgtggtccgacgtcccagagtcgacaatccacatatcttctttattatttgtagcattgagagcagtaagaaaggtaaccttatgggctgtagaacaattactacctccttgatttgaacaggattaggacaatggtgaattaagtagtttgtagaggtgctcaatttgcttcttgctgaatttgacaagagcattttctgagttgttttcattctggtttgtagtggcttgattgttggtggtgctctagacttgaaagctctttccatttgtaggttctccaagtgcccaggtggctggatttgcatggatcttccaggggatcttcttagtatgtccaggtcggttgtgatgctcacaccatggcctttccccatgctggttgctatgctggtcaccagggtttctagtgttttgctcatgtgacacaacaaactcttagtagtccctttttctcccagcattacctttctacaactttcttctctctttacctttaaaaaacttcatctgcggatggaaatggctcccttcttaaaactcttcttcttgctttattgagttctttatttagacctgccaagaacttaaaaactctttcctttttaataatttttttctgcttcatactatactcttcatagtctaattctgactcgtagaataggtctaattcctgccagatagcttgtaggtcattacaatattgtgttacgtccatagttccctgtttcatctccttgatccttgacttcaacttgaaaatttgggtagcgttgcctagatctgagtaatttctcttaaccatgtcccatattgcctttgctgttgataagaacaaacaagtctgactgatttttgtgcccattgggttgattaggcatgccatgacaattgaattgtccatgatcgatgtggaataattcagatcattcttctctggtgcctttgtttcatcggtctgataattgggcttgcctcttccacacaccaccaacttggctgatgagaccattggaggtagttctttccatttaatttgtgtgtcgtgatctgcctagaaggattatcaccagcttgaaatgcggctaatgattaagacgatgttgccctcggctgggttgaagagttagtcaaagattcttctcctctagcttcacatcattgctcgttatgctccatatggcagttttggcccatacagacaaaataggaattgaaactttattatttttcattagatggatttatggggccaaataaatagaccccaacagaaaacaactagcttgattttctcctacaaactaggatccaatctcctcctaaaatctaggtaacaaactgacttcaaaattaaactataaaaaagaaacagaaaattcaaatctccctaattttcaggacttatcatgaaataccctgatttattgaacaaaaataaatcaaataagaaaccaaattctatccttattcacaatataggaggccttagaaaatctcaagtggaaagaggtagttcaggagcaaatgagagctttgaacaagaatgaaaaataggaacttatggaattacttcctgggaagaagacaatgggttgtaaatgcatatttatggtgaaatttaaggctgatgggacagttgagagatataagtccaggttggttgtaaaaggaatcagtcaaggattcactcaacagccttgaatcatagtccatattcttgatatacatgtagttttttgtttgaagtattttggaattcatgaattaatgagggtgtttgcttgaagaattctgagataataaattttagcatgggatcttctcccctgtttcttttttaatgataagtattataatccttaaaactatagaagctagtggaattgattagatttgcatctcagtaatacattggacggacattgtttatgtcatttttttatgggaattacaattcaaagtgaataagtgtatgtggttattcttgatttatttgttatccatggctggttggtgctgccaatatatattcagtcaatacagaacatgatagggtccagaaccctattgtatccagtcttatatcacgagttcagtggatactcaacctgatatggagggttgtaccaagatattatgcaaaataaatatttggatttgatactttgggtatgatatgatcttttattttattttatttcgtaatataaactgttaaagaagaatttgctttgcccacctttctcttgtttatcttgtctgataaggggtactctttattttattcatttattttcctgatggcaaataaaattttttatttattaatagggaaaggaaatgtatagggatgagccattattccaaaaggacagaaggaaaagaggaagaggaatgaaatttggaaatagctcccaacaaaaataattatttaattctcttttgttttgggtactggaatttgaaggaggaagattataattggttgtgatggaaatgggccttcaagttgtgatgaaatgacatagaattctagccatgttacgatctgctggtatggaaataattaagggtggacattgatgttaattgtttgtcagtttgttatctaaacaataattaatttttcaatagttagcatccattaaaattatatcagaggtttgaaaatcgattagaaccagattcacaacatccaaaactcttggttgcaggaagaagaggaaacgcatcctcagcttgcaagaaa

SEQ ID NO: 12591 - DNA, 4258 bp, Vitis vinifera
  Intron number 3 from transcript GSVIVT01010259001 (locus G SVIVG01010259001) derived from phytozome v7.0 (chr-ID chr1 ; pos 18522317 to 18526574)
gttgcaagagagcttcgacacaacgtagaaggcctaaagggtcacccaaagagacaccaaacttgttgctcagtgatgggagccaaggttgaatgacacttgacacctgctgctggatctttgtttggctctgggttctgtaattaccctcttagagtctacttcattatatgtctcttaccattgaaaccaggatatatactggcaggcagtggctgtactgtcacatgagtaaggccatggccattgtgatgatggctcttgattcattcaaagccacaacccccagttgctttattagtacaatcttattcttctgtatcctcctgtaattggaaaggctgcaatagtattccattttttgtaagatcatactggaaagggttggtcttttcaaaacgttttgaagatatgtaagtgtcagttggggtttgacaaacacttgtgaatctttctgatgaatattaagcaatgagcaaaggactaatttaactagaggatgtaagcagtagcttgcttaatcttttgttttaccagccctggttgtatcctgcttgtgcccatcacgggcctgccttgtcccagcccaaaactatatatatttgtttagataatgagaagtaagagggaaaaataggtgaaaaagataggatttggattccttttctttttccttgtccccactttccaagatcacaacaaagtcttaatctttaatttttcaatccaagcttatggacccaccatctccatagataaggctgctaccagctcagccctgtcggaaggcccatcccaaggaaagcccgcaattgatgagtgtggcgggatgggttcatattctgtttcacggggccttgcccacgtctcttggcccgggtggctggcccatacccttttactcgtaccatgcatctaaacatactcaatatccatttatttttgttcatgcgctctaaatcgggatgatccaatagaccaaatcatggtgtagagagtgagaaaagagttcacctcttcaggcgttttatcgaggcctcgtttgctaagttgagacactggatgctatctgaaacttctgttctatggtggggttttaccgttgaggactccgatgggacgggtttagtcatttgcatactaggcaaaccattgctccttcggctggtcgtgcccggtcatcactcacattcttaataaattcttttgctttggattagacttagcctagaaggcttgtgggtttattctcgactttggatgagctaaacttttaaaagtaaaaacagcgtgcgcaagcaaggaaggaatggattgaatttattatcaatagagaggacatgtattccccgaaagcaaggaagttcgaaactttccacatggactctttaagcataaattagaaggttctcttttctctttgaatcaagattttcaaagtgaaaccggatataaaaagatgtccattaatttattaaaggacgacatggaaatatgaagaagcttgtgctgtcggccttaatcaataaaaaaagggggtctatattcataatatttgtcctaaggttctcaaaagactttcaaaagtttctaggattctcaggatattctttcatggatgtccttcccatacccatttgtttaatgcatttctacaggcaatgcaggtccaaaccctttaaggaggccaataacataagctttatcgatctatatatatatgtaagtgtaactttttataatgggtgatgcaggtccaataaaataagctttatatattatatcaagtgttacttttttttaaatgataaacaggcacaagcataggctgattttaattatatactaatcaataacaaaccctgaaaaatatgtgttaggcaagtttcattgtttctataggtgtgttttctcatgcataagagtaactgatgtgcaattatttacttttcaacccacatcatttattattttattttattttatatatatagtttcacttgatcaactaattaatagcttaattggcacaatgataataaattgataatcatagcaactaaaaacatattcatatctacaagccatcctagccttaatcttgaggtatgaggttttttgttttcattgataactgcaatgtctatttattcatttctttttcatgtgcttggattctttagtactttctgataccaggagtcacagagatgctgtgttacaatttgttatgggtaatctctctctctctctctcttaattgagagtgaaaataagtattgatgtcataaattgcatgaaaatgaagacaaaaatcataccttaagattaatttctacattaaacatattcccaaattagtcaattgtatgctaccttgtgtatgttcagttttctcatattttctattagttgttgatgtttacatctatttttataaataatgatgatcttaggaatttcttgggacatctggaatgcaagagcagggtataagtggagttaaagaattaaagttgcatgaagatcaataatgtattaatgcagaaaaatcgggaaagattggtgaaaaatagaaaaaattctgaagaatctaataggtattttggaaaaaatggtgccaccctatagcctagtgccatttttcatagtagcaccaccattttgagcaaatgaagcccacccacaagaaaaaatggtgccacattataacctgccaccattttctccaaaattgcccttattttgttttggaactccaagaatgcatggaacccacattttttgacttttcctaagccgctattagatctcccaccttgtttttatgcatccatgtggtatatgaattatgataacatgagaacatctatttaaagagattttgcaggtggaaaaaagggattttggggtaaggccccttggtagatcttcttcaacctccaaccttgggatacttgttgtagcttgaattaatctttgtaatcttttctagcttttaagagatttttatgtattaaactcttttgtcttgattgtgtttgtatttagctacatttactatttagttttatataactttaaaactttttcttggattttaatggttcttatttcatgctttatttttattattaattttgattcaattttcatgtctttgagtagtggattaggccaaggagaagggaatccttacaacctcccttctacccatggaatgactcaaatcttggatatttaatgatatattcatcttgtgagttggataatttgtttttaattagaaaaccattccttgatacttggaaattagagtttagaagcttaatggttgagaactattttgacttgagactgccattattgagttcttaatactatgatttgacaattaaataggtagtggaggcttcaaggatagcataagtaatttatctttaactagaatactatgcctagatgcttggaaattagagtttaagggcccctttgggggtatctcaaacacttaatggtgaaaaccattttgacttaagacgaccattatggagcctttaatgctgcaatttagcaagtaaatgggttgtgggggctttaaggattttacatggtggaattcacgagtttgaagcattaagtttaattacatactgcttgaattgaaaattctccaactgagtgcacctctaggtagtcttggttgtgttagcataatcgagggtcctttcatgaaaagaagaaagcccaaaggaccccttatccttaatacttttacaaatcttgttaaatcaaattttagctcaaattcacttggtttttccaatgtttttaacaaaattcatcaacttttttttcccaagtaattgagtgaaagagtttgtctaaaaaataaatacatatgcttatcctcaaatcttttcaattcccttacctaggatcacttctttatggtttgacacttggctccatacacttggagaactgcactttgacatacatatttgggagcgataaagttttttgcattgttgccaaggagggaggatcaaatttaaatcaaatcaaatcgaagtaacccttaactattggggggaggggagggttaatagaacgaataacacttttacccctaaactatacttgctacaatatgattattgtatataaattgaccttttgtgaaacaaaggaatcaaatacaattaagatagaataaaaaaagaatcatgaaaattagagttttgttgaggactta

SEQ ID NO: 12592 - DNA, 19260 bp, Vitis vinifera
  Intron number 1 from transcript GSVIVT01012250001 (locus G SVIVG01012250001) derived from phytozome v7.0 (chr-ID chr1 ; pos 155916 to 175175 reverse strand)
aaaggaaagctgtttgagtactcaactgattcttggtacgcttcttatgtttcttcttcatcatccattcttcttcttcttcctctttaaaatataagtatatatcttatttgcttccttgttgtaatgaaaatatcttcttttttattttttgcaatttttctcatcaccggggctttcttttataaattgatttagatttttgtctcccctacttctgatccatggcctggtagagaaagccttgcctatgaatggcgaaattatttaacaattccttacgaatccctgatatcatcttcaagtcaccagcctctttgcatttaaaaaacttgttatcattcatacatatatagcctttctcctgatctaaatcttgtcccctttttttttttttaattctgtgcttccttttccttcagatctttggcttgaaaattataaccaaatgacatcattcattgttttcaatgagagattatgacgcatgtgcatgtgtacgtgctccttggggacttggtgctagatggttcagagatttcatgcaaaactatgagtttatagagtatctttttcctggggtattggaggatgtcttgaagtttttcatgaaccttcaagtaccatccagaccggcaaggtggggccactatggaaggtcatagctggcaaacgcagctagtccttcaaacgagggtatgagatctaagccattacgcagttgatcttactcagtgtcgattccctactctggtgcaactgtaaagaatagggcgtgtgtagattcttctaaaactgattaaaggagaagtaatgcatagtttagaccttttttattagttgctgccttgctggaaagtgatcgctttagatgaagttatatatacatggttttgacttgacatatcgctggtaatgtgctataaatcgaatccaagaatgaattgaacactttcggacctaaaacccatctccattcctaatacttcaggtttaaaactcttacttgattaggtaggcggcttatagtaataccaaaggggagtcagactatttaagaaatttgcacaagtacgtacattcacacatagaggaggtgtttcagtttcaggtagtggaaggtggtgttttcgtttaatccaagaccctaaaaccatcttggtcacttagaaagagtagtgtagagattatattagcgccatttttgtgtgagtattagttaggtttttattttggaggccgcgactgtgccagcgacagaaaatttatttctctacattaattatcatggttgtcacataaccacaggtcttcagtgttttataatgatgacaacccaaagcaactaggaaaagagaagtagaaaaacaaaaacaaaacaaaacaagaacaaaggcaaaaaatattactgaagttaactcttgttttattaatctggttttcaattaaataggcaacctaacctaaaaaatttcccaaagaaaaataaccactaaagcattaacataacacaagcaacttctgaaacctaggacccacacattcaactcttgcaaatttgtaggatccatgctgtaacatatttgactcaatgtaatatttaaataatttcatgactgaccaatatcataggactacatttcaacattaatctcaacactcctcccttaatgctgaaatttaaggggtcccaacatgtccctccaatacacaagcttctccaaagagaaagaccccataaacatttctacaaattactcattgtgatacaatatgactgtcttgatgcttccattggccaccaactatgataaaatgatgccgcatttctatgtgtcttgtgcattcatgaaatactaaattctttgctatggcaattgtggactgattttcacaatgcacaattttcggattttctcgatgctatttcacatcttctaaaattcctcttaaccaaacaccttaacaagctgtggaaattgctataatatattccatctctgacaaagatagtgcaactgttgactgctttttagaactcaatgaaatgacccttgaaccaagattacaaatatagctcatcgatctttaatgaacatgcctgatcactatcaaaaagaccacatagcttaagattgttagcaataatgtatcaaataccatatgagcttgtcatcgtagcactctcttggctgcaccaaaataaagtttgcttagattttgcatgaaccttgatgatagacttgttgcttgcataacatctgacctgctgtttatgagatagaacaagctttcaattaaactttgatattcttgagtatcaattttttttttctccatcattcaagcaaaatttatggttggtgtgtgtaggagtttcactattttaaactcatacttgcttattttgagaaataaaaatccctacatcacattgtttttctttcaacctaagaaagtaattcatcaaccaaggtcaatcatctcaaatttcattaattatcatagttttaaattcctccactaacacaacacaatgaccagtataaatcaattcatcagcatatatataggcaaatgataagtttttcatttatataggctccttataacttgagtgaatggacacctttcacactccttatatatcacctttaaggacttcatctttcttagtggtgtttcaagaaaggaaagagaagaaaaacttggagaggtcgatgggctatatcttggtgtgaaatgatttaaatcaccatcattttgaatttcatgtcctaatggtctttcttccaacttatcaattttcagaagtgcacccagataattttgtagttcccaattctaggcatttttctcatcaaacataacatcacaactaaaaattacttcctgataccatttagttttaagtgatgtaacccacaatatgcatttcatactattatcatcaagtttatgcatcttttgagaaggtacattaacctttgcaacacaactaaaaatcttaaaatgggatatcttgtgcatccacacaatccatgcttcaaaaggagtttgggggtgtaatgctgatgtaggactcccctataagaaggtaagttgtttggcctagaacaatttggaagactcttagcttttggcatattttgagccattactaccagacttatgtttctcttttctgctactccattttgttaaggagtattgctagctgtcagttgcctccaaatgtcaaattcttcacaaatttattaaactcattagaaacaaattcatcagcatgatctattcacataatcttcaaggaaaaagtatcatgtttttttaatgtgattcttgaatttgttaaagatagacatagcttttgatttttctttagcaaaatgaacccaagttatcctacttaaatcatccataaagatatataataaacatttactatcattaagaaaaggagttcccaatggcctacaaacatgggcatgtaccaattcaatgggtcttgtagctcttttcacttgcccttttggaaaagcatctcaatgtttctttccaagtatactattctcatagatttcatctacatgttttacaaaaggcaaaccatgcatcatattttccttgcacaatagttttaaacttttaattaaattaatatgtccaaatctaagatgccacaaccaattagcatcaaacaatgaaacattgcatacatgtgtatcaccacatagaattaagggttaacaaactttcttttttagccataggagctttttacaaacaaatgtcttttggttttctctagaaacatggaacatgctaaatcatcgaaaaacaagagattaacctcctaataaaaactaccccacatataacacacttgtatctaaattagtatcttcacatagatggtcatagatttattcaaacgtgtgaaaacttctaagcttgttgtcatgtgattactacaaacattgtttttatgccgaacatttgaaacattctttttaacagaataacaagcgagggacatagttttggattcttcattgtcttttgcttcaacaaatttcatatgtttttcttttagtctatcgtatttttctatgcagccaaatttcttacaaaagaaactttggattgacatatgattataattttcctttttttttttcaatagctttattttgttagtgatttttttccaccatctcttttgcgacaagaggtttaatgttcttgacatactcttttgctggtagattcgttgttgttgcctactatcttttcttcagaaaagtacaacttaagtttgaaatagattttctacaaaattttcttcatatcattttagcctatcttcatgacattgaaggaaccaagtaatttatcaatggttaggaaacttaaatctttgaactcttctattgtacatcttgggttaagtgtctcaaaaaaatttcaatagcttattcatcggataattgttaaccacattttttactttagttcacaattttcaacatgttgcataaataatcatgcatacaatcactatctttcattagtaaggtttcaaactttctacaaagagtttgaaatttagcagaatttacattagctgtgttgtggtactgtcttaacatgcatctaaagcttcattgatctttgttgctacagaaaatcaaggaaataacttgttgaatgaaaaacaagacctcggtatctttgtttcatacatctttaataatctttggtagaatgtttcttctatataaccttcatccaatagcttccacaaatcttggtagataaaaagagtcatcatctaggtacaccaaacattatatccatttttttctccagaaaaaatggtatggtatgatgggttgggtaagataaaaattattaattagtaaaccgataatttattaatttgatttgcaattaaataggcaatatagcctaaataaactccttagaaaaaagtaactaccaaagcattaacattaacatgatgggagcaccattcactaacaactcttagaataaaggactttcatattcaattgttgcaaatttgtagggcacatgctataacttatttgactcattcacatgctataacttatttgactcatgcaaaaaacatatatatttagtgaaataataaaaactacctgggggtcaataggttgtccttaaaatcatccccaaattaattccttattattagtttttagtttgttcttttagattaattgtttattgagagcaattaatttcatgcaaatgaatacaatcggtcacatagatgagcattaggatataaggtagaaaaatcacctagcaatctatttggtgtgaaaaaccatggatggtttctcaatcattaaataattcattaattattaaaaatgacacacaattttacatgattggatgcatctactctataaggtcttataccattagcacttacactcattttccacgtccctgacacaatactcccctatttttctttagtgaatccctccaagcctttatcaaagtttcgcgatgagatctcttacctttgtcaaagtcaaaagtttctcttaagttttgacagtttgatatgctctcttaaggtccatgaaagtccatgcttattttggataaaatatctctatttatatttataaaactctttttagaattgtgaagagtttcctaattctaaaacattctaaaaatcttttttaaaatcaaataccattttatagataaacacaaatttaaatcttgtctaaaaaattattaaacaccaatttagagataaacacaattttaaaacctaccaaaaacaatttttggaattaaaaacatagtagaaaccaacttaggaaaaataaaatattttcttcctaattccttgtattaaccattgtaaaagctttactaaccataaatgcatatttactttaaattttacatgtttgaacaacccaaatttgaatatgatgaagtccaaatttgtcttgggatggataagatccaagaaagtaagtcacatttgattgttaagaaaggaacaaaattgccaactaaataaactacattaacaatcttgcaattcagcaattttgtgacaaaatacatagatacaatgaggcccctaataactctcataaaacctcactaaacctaattctaatcctagtcaaggccactcccaatacaagaaggcaaaatagtaaaacatgtcctttttgtcataacaatgatagataaataaataaggctagaaaaatcaatatccaaatagaggcaagaaaacatttagagtgaaaaagaataagcacttaataagattttcgaagctatttggaatccatggataactccattcctagccctaggtggcttaaggtgcatcctagtaatcttagggctctctagacctaatcacattggataaccatgacaataaataatatagatctagatagaataaagatcaaacatgagatctggatgttaccagatcaattccaattaatgaagatgtgtcgaaaactgaaagattcttgtaaacacaatagtcttccaccaaattaaatggcttctttaccgatcttgacacaaatgggtagaatcctctaagagggttggaggctagggttctcttttctctggagaatggtagactagatgggcaaaagaaaatctaaagctagaccttaacagagttttatataagcttccaatgggtttaaatgacttgagtttattataggtttaggttacttaaactagcctactttggttataattgattaattagcccacttatgctctaattaatgaattaaccaaatctagatagatcattcacaagttcttgtataatgttatagatttaccaaaatgccttgtgcacataagtgaaaaaagtaatcaattaactcttttaaactatgttaccatggaaactaaactcaagcggaaactactgcgacccataggaaaatattgatatcctcataatccaattctaaagttgaccaacatctcaatatataaagtcagttgcattcatttttgtatattaaagtgatatacaagaatttaggtacatgacctactatccactgtttgtcgactccttatgaactaatgttcattatcttatgagacatgtgttattaatcgttcaagattacatttcccatccttgacttacaatgaaatcttgttattatttgatcaataaatatattttagctcaaaaagagcatatgttaaatttcactaaaagaattactagagtcatcgatttcatgatcacatgcccttatgatcacctaagaggacatgctatctcaattgcataagacattatgatgtctatcttaaggttacatattgccattagcctccatcaattgtgacccaaaccatggaaaacatatatatgaccatcttaaggcatcactcgtagactaaagtcattgataactttagtacaaactcaatatcctctcaaagttaagagttcatacaatataatagattcataaggtcatgactacttgatagctaatgtcatgactcactataagtcttgtccaatgcactcgccataggaacctcatttttatgactaagactagtcatccttctaattaaaaggtaatgcactacaacctcaaatggatggtttaagttaataaactaattgtgaataaatcatttatttgcaagaaacctaagacttagatctttcatacaacttctaatgcaccttagtcatatataatacaagagttgttaggtttgaatgcttaacatatataatgcataaatgggataaagaaaggagaactaacttatagtgtttgataggttttcttttttcttaggctattcttcagcatcctttgagagtccaaacagctctagcactccttagagtgctcaaaatgtcatttttaaccaaaaatactcacaaaatttccctttgaaaactttgtagaaaaattctaacacaaacaatgttaattcacttgataacctttagaataacattggaattcaatatagtaaaataatcacaaataatctgaataatctaacaaaaaataactcaaatcaaacatttttttcatgaaaattgtcaagaaaattaagttaattacaatttagactctaaaatttttcaagagtgaataagatattagaagcataaaatcatctaaagaacctcatctcgatgtcatcgattttctattcaattaaaattattcaatttacaaatctagttggtttattagatcatgtttgccttttaattaatttaacacttattcaatttgaaaattgttcatcaaatttttgtttagcacgacaaaacattggtctttaaagcataatattactccctctaaattgatgactttgttttttcatttttatcattcattttttttaaatttttttttcattttcgtttttttataatgaaagcttttatcattacttaagataaatacctttcatgcatgggtagcctttctacaaggtggttttcccaattttgcaagtgatcactttcactcctggtttgcaaaatatgaaatattgatttaaccaatgaagcttcttgcacttcgagaaatttaaattttgaactataccaagcatgtatttcaaattagtttaaaatacacataatgttcatgaattccttgaattggaatctttatgcaataattaaaattaagcaaatttccttctaattagaaataatataagatcttataaaatagtcatatcaaattctctatatactttgttatcaaattttaaaaggagttaaagtgaacataaggatattaaatagaagaataaactcttttaagaataacaaaatagagagatcacttaaactatttagaaaaataataataaattaaataacctcaaactttatcaaaccacaagtatagaatacaattgacatagaattccaagaaatataattccccttaaaataaagattccaagtcttaaagttaggaacaaatatacttccctaactatgatactcttctcctaaattcataacgaagattctagcacactaataatatagtcttaaaaagcaaacacaatagaaaaaaccctaaggtctcctaaaattgacatgaccctatgaataaggataaaacatgcactaagactagacccttgagtatggaagaaaatatgctaactaaagagggaagctcctaaagagttcccaggtgatgaacttcttagagaatctaaagtagaaagcttggaacttactaggcttgtatgtgaagtacaactaggtcttctttcctaatataaatttgactagtttaagagatagtgttaattggactctatcttttcttaggctagcatgagatctatttctcttttttatattcaaaattttatttttaagataatttgactcacttactagtctattagcaatgattcttcaagagaggaacttcctttatgtttcacaaaagtagtctttccacttgtgggagtttcaaagtcgcttaagtaacctaaacttttttttttttatctccatgagctttttgtttctcgattatttcattcaagattttagaactagggtaaaagtaaaacacttcatttcaactcctaagttctttctaagtttatcttgctttgagataaagaaattgtttaatcaccacatcatggtgttaagattcaagaaaattaatttttttcaattagattttttttttcaactttaagttccttgatctcactattcatgtcaatttttttagatctataaaaatttaaattttcgtttaaataattttgttttttttagattcaaggcattcaatgaaagtgttctttatattcaaagttttctttaagtttgtattctcaacatttaactcataactcttatgatacaagacattatatgtctcttgaagaatcacttgattcaatgagactatcaattttagaaaatgaggaaggaaggtagtgaaggcaataggattattattagtttcactttcaatcgagcctttggaattattatcatccaactcgaaatcactccaagtcacttgcatgactttcttcttcttttttagtgtatggaaatctgaagcaaagtgtcatttcccaccacagttgaaacactcaacatatgatgattttgatagactgttttcattatgtttcttgaaaaaagatttcttccctttgtttgagtcatcttttaagtttgttttcttttgcattttcataaaaattttgaattttttatccaaccgtgaaagttcaaattaagtgagaacttgctcactctcatctttaaactcaattttttcttttgaagaagcctttagggcaatccctttaggtcttttaggggttgatagatcataggtctataaaaagcctacaagttcatctactttcatagggctataaagagcttacaagttcctctatagtgatcacttcaagtttaaatctctcaatgagagatcttaatattttcctagccattttagagttaaggattctttttcctagattgaaacaaaaattatttagttaacatttgtaattttgacaacttcacaataataatgttctcatgtgttactgtaaaaatgtcctaagcctctttaacgtatttacatatggcaatcctatgaatcttatttggactaatcttattgaaaatgaaacaaagagctttggcatttgccttactgctttcattatctaatctattccatttttgcttaggttttaattcactagttggactaccattcttggtagctaagattgagggcaaccactcatatttcactatattctaaattcttttagcttgcattttaagtgaaaattccatttcgacttccaatgggggtaattactcccatccatagttgtgaaaggcacatctaaggcgcgcctaggctttgggcggcgcgacgccaccctccggcgcctcgcctgaaggcaagtgacgtcctttcacgaaggcgtcgcttaggcacacaaggtgcgacgcgatccacaggttcgccttgatcccttaccttcttcttcttcttctttttcttcttcggcgttgggttacagagggcaaagagaagccctaatttctttttttattttttgggaccaaaacgacatcgttttggacctttttaaaaatggtcaaaacaacgtcattttggtcctttttattttaaaaaagaacaggccaaaacgacactattttggagtctgttcctttaaaataaaaaacaggccaaaacgacgtcgttttggccttgttttcccttccagcccccttttctggttgttttcaactcgataactctctcaaatttttccctagcctcagccgtgcagtggagaagtgaagatgaggaaaaataggagaaaaatagagggaaaatatatgtaaattagggtgcgtctcacttcactaaagcccgcgccttaggtgcgctttgtgccttaggctctaagactacatttgcgccttggtacaccttgagccttttaaaactatgctcccatcaaagaatgatggacaatttataaaagtctcaactctgtgtggttctatttatcaagactagcatgaataaataaaaactttaaaaataattttttcccattttgatacaacttaaaagaaaatttatctctagttttgatataatgaaactacctaggcttgaataggtagttttttaattaatccccaaattaattatttattactaattttttatttttccatttagattattatttattaagagcagttaatcccatgcaaatataaacgaaatcatatatactaatgaacatagggatataatatagaaaaacctcttagtgacctagtaggtgtaaaaaaccaagagtagtcttttgaccactagataatccaaaattatgataaaagagtatacaattttatcttattggatgcacctactccaaagagtcttataccattaatacatacacttctttccacatcttgacataatactccactatgtagatccctcgaagcctttattaaagtttcgtgataagatctttgacctttgttgaagacaaaatttactcttagaccttaaaagtttaacaatttgaggataaatgttttaataagtgaacatgctcttatacagttcctaaaagtccacatttatttagaataaaatatttctatttatatttataaaacatcttttagaattatggagagtcttttttttttttttaaaaaaaaaaacattccaaaaaatcatttctagaatgaaatactaatttagagacaaacataattttaaaacttaccgaaaaccattccaaaaaattttgttattatcaaacatcaatttagaaataagcaaattttaaaatttaccaaaaataatttttggaattaaatacatagtagaaaccatgtctggatatataaaatattcctttcctattttcttgtgttgttcattttaaaagctttaccaaccataagtacatacttacctttaaattttaaatatttgatcaacctaaatccaaatatagttaaatccaaggaagtaagtcatatccaatcaataagaaataatcgaaattgccaactacggtgattaggatgttgttctagagcttcaaggaaaggttacggagtgggctctagaaggttatctagagtaggtggaatgagtttaacaaaagagttgtttttaaggtaggaaatggttagagggtaaggttttgaaacaattggtggtgtaaggagggtcccccgattaaatgattgtgtaatgagaaaggtagaagagttgtttagacgattgtaagagcatgtcgttagaaggggtgctaaggatgtcataacttggtggttaccaaaggaagacacctttacaattaaatccttttacttctccttagcaggttgtcatctgcaagggttccctataggcattatgtggaatatgtggattctaataaaagttaggctttttttcttgggaagtggtttgggaacaaattataacttttgatcagctaaaaagaaaggattggtgtttatcaagcagatattatttgtgtgaagtttaaaaggaatcgataaaccacatcctccttcacagtcctagagcaatcatgttgtgacatcttatttttgctctttttaatgtttagtaggttatgcatttctcaatcaaggactccttccttagctggcaaggtgccttagtagggaagaaaaggaagatcatgtggaaaataactcctttgtgcttattctaaaccttatggaaagagaaaaatcgaagagcctttgaaaattcaaatttgatggaccaagctattttacggtcatttatgtatatgtttttggagtgggttaggatgcttttaggctctagatatgcctttattgattggctaggctacaaataaggcaagggtgttgtttttttgtgtatcccctccctttttgacctaatatgcatagtgtatatttttgggtgcttttcaaacgcttttaaaataattgattttgcctattagaaaaaattgtcaactaaatttaagactccaacacaacgttactaacaagaaaattagactccatttcaacgttaatctcaacaaatgaaacaaaattctctgttgaatggattggccttagactcattgtaagctaaattcatcaccctgaattcctagtttctttctgatttacaatcaaaatctatcttaacctctaagactggtaatattcatctcatataaacttccaattcggactagaactagtcaaatgctattttatagataaaatctttttagcaatgtttcctgtaactttcacggtgcagttgcaaaagtagtgataattcttttccttattctttaactcagaggtaaagtctctaatccttgataatcgtgaactggaaaaaggaacatgagagatttcatttgaagggaaagttatttcatcatttatcagttttagaagtttgtttattgcaaaaaacagacgtgaattgataggattaggatgagttttggtgtccagtcgaacctatgcaaagaaagacctctcattttggtcaagtcttaatggaaggtgagatataccttgataatattaatgtagaatggtccgttccctttaagtgaaatcagacgttcagtgttgtcgtatgtcctaacaatgctattctctatcaagggaatcatgtagactctacttttgaaggatccttagagatgtctttctaaaccaggtaaataaattgtatcaacagaatgatattgttacttggactgggatggagcatactccttatggagaaagatgtgctagccggcctgcaatgtttttgttgaaggagagtcgaacctttcatcacgttttctcggaggcaccaaggttccacccagttttcttttattgatcatatttttaaagcaaattcaattaggtagtggcgagtgcacagttggatatgccgtgaaatggaatgttccatttcttgttggtaggaacttaaggtgaaagccatcaaagaatggaagaattggagaatttggagacattgaacacagatatgaataaaatcttatatatattattttttgtgattgactagattatttgctcctgaagacagggactgcataacaaccctggccaacctcccatcaatccgacttaacatgttttcaaaagaacaccagtaattccacaactatcgttcagctataaaagcatgaaatgaacacattcatattgctaaattaatacatggactacttctagatgctgtataatacaaagaaatgattccattcccatgggatacctaaaagtgccttcaggaacagtgaacagttccattaatcccttagttctctcctttcaaattcaagccttgcagctccttatatatgctatctaatctaattagccacctatcctcacttcccttactaagagctagaaccttttacgcccatacatttgttgtttaggaagccgggtctttctcaatgtattgcaagggacctgaaagagggaacttggctggctattaaaccctagaaatatctgtgaagggccccatttgctttgtgtcattgagatcataagaaattctcaaggtggaaaatgtagttgcagtcataaggtcgtcttcttcagtagttgaaagaaaagcttctatggatttttttctggagatttcatccaggataacttgatctttcttggatggtcatctgggtccaagttattcttccataagggcagatccagaactcaagatgtcggtcattgcacttggcttcctattttgggggcctctcataatggatccttcaaagaagtgattgaaccttggcgctccgatgactgacatgcatgtccttttcaaaacttactttttttcctctctaggttttaatcctactgcaatgcatgttctattttattgctgagaagtggtaccaaccaaaatgatgatcgtcaagttcaacactgaatagactccaaatattcaaacccagattgctgcaccctcacactcacacatctggaagtagttcctcacatcaaaaaatcaattttgatgccatatcatgtaagagccttggttgatcaagtttttatataatatgcttgtcagagagatgatcccgcgacctcgattgtgaattcatgattctatagaaatgaagggtaaccaaaaggaaagagcaacaaaccactacccaaacaaaactgaagccctaaagggctaggaacccaccacccaaacaaaaccacagagcaataattctaccgacttcccgctagatttgacaagtatctccctatctcaaacactgccattcttttcggctaatttctattcaaacctgagatcaccttaaaacaaagcccccggcatttcaatcatcaagttaaaaattcagttgtacttcagaaaagataattatattttcacacacaaaaagggacatgtgtctagggcgttttccatgattctttgatgaaagacaagcttgacgtgattgtctatgaccgagtcagggtaggttggatttcatttctttagggttttaggaggtgaacagggaattatagctatagcaaagggagggataaaattgaggataggaagaaaagaagaaatagaagaaactccatgtagagtatgactaaaaataattgacttttgttattaaaaaatataggaatgcaaaattatcactgtttatcattgtttttgtttaaatcaattagccttgttcatcaccttcaaaaaactccatgcaagtcaacaacatagaaaaagaaatccaactcatatgattatttactagtctcttattcttttccctgaaaccgtttttttttttttatatataagtattcttttccttgaaaccttaatcctcccctaaaattaaactaaaataaaatagaaactttattgaatttttggatgtttaagaaaatgatttttcttttttttttagaatatataagttcttaaattaattgaaaacttacaaaaaaaaaaaaaatttaggaggggaaaaaaaaaaagagaggtaatttttagaaaataagactttctaaattctagtaggagtccaaggatccaattcgctgaaaaaattttaagtataagtaatatgaataaagtaaatgatgaaaatgttcatgtcttatgattcccaaacctcatgttatcatttgcacccttcatcatcccacatgaatgattttattatgcatagacgttaactctctttatgttgcttatagaaatagtttcatgagttgtttctcttcattaggccatatgaacaatattttttgaaaagtaaatcaataataatttgttgatgacatatgcattacatgaagataaaagaaatccacagataaaggttatcaaggttttaatatggtttgattaatcaaacttacatccatggataggaaagaactaattcactacaccatagaaaacttagagggaaaagagtaaatagatactagttttgagtcctcaaggatcttatgttcaatctcataactttttgttttcttaacttagaatacttacagacatatttctagtatatttccttagtcatcaccaatatttattttgataacaaaatatcaacacaaaaacatatcaaagtaaatatgtgccaaataagaagttgggcatttcacaatgatctccatattggtccaaatgctatagacctatcttacatatctcaatgacacacacttctctatacacgtgttctccacacatctcgtcaatacttgcaaacacctctagtacgtcattgtcaaggcagtctctcaatgtactcaaagatttttctaaaccacatctactagaatttaagttttaagcaacgaaatgttgagcaaccatccactatttccaatcctaggtccacaacatgaactttcaaacaattactgcataccgtgacacccctatgtgctatgatgaacactctttattcaccttctagtagatttcctagaaatgaaactattcaaacacttcattgtttccacttttggagatccaataagtgtgtgatattcttatgggagacacttttcaacaatcttggtaggtgggcagctatcttgctcctcagaaaatgatagctcaagaaatgaacctcatgatgggtgaatatgtcttgaaatgagcatgatgtcaaactagatgtgtaacaacctactcctaatcatatacatattgtttgttttgggctgaatagtcacaattttaaaatatgtctacatggttaagagaagttcttacatatagtgtgtgaggaattttttttctctatttgatgtaagatatcacaatcacttcttatggtgtcatacacaatttcctcctcatatctcataggattgtgaaaccaaacaaatagatacccaaagacccacactgaggctaggggtcaattatatcatttgtaatgatcttttcccaattgtatggatgttaactatttctaaatccaataggctctcacaacttcaaaattacgcagctaaatgaaactcatatatgaattttttctcctattcgatatggaatattatatttttactaaacaaaataaaattgcatgaaaaagaaagatattgtgcgttccattccaacttccatggatttgtgtaaggtgacttgattaattaaatgttgcatcatcaaggggttctaaggattgtgttgctcagccatgaggagagtgactagaagtttccatttagaaaaatgatgataaaatggtgtgcaagaataatgactgcatgaaacacatagcccttgggttttgtgacaggagtggttactcatatcaaggtggagaaatcatacaggccttgaatatccttataattgctgatggacaggagaaatgattgttaaccaggcacagacacgatctttcacatgttgagcgagtctgttaaacttcaaatctaagaaaaaacagagggtctcgataatattatcatgggtattatgtaggctcttcttaaatacatacgtagcattactatgacttcgagagatgccttgttagttccaggtatgggataatagaaggaacttatggctctgggactgccccgaaggagattcttttatactttcattttcatacttttccagatatggaacaatagaaggaacttatatggttgtggtaggttcttaattgattttaattacgtctcactagttgtgatccttcttaaataacctttagagtccctgcaactaaccccccataagcctgtgcatatattatatagtaactcatctatccagaatgaggaaaacagaaaatgcatgtggccactaactagaaggcccctatgggatgtatgtatcatttcataaacttgtactgcaggctttggaacataacaagatcaatattgttttcacttattttcatatgggagaacttgtgtgtctttggcatttaggagtagatttttttcaagaaaatgtttaaattttttatcaggcacggagaactttttgctagatttaaaaattttccttcttcaacagc

SEQ ID NO: 12593 - DNA, 2256 bp, Vitis vinifera
  Intron number 3 from transcript GSVIVT01017678001 (locus G SVIVG01017678001) derived from phytozome v7.0 (chr-ID chr5 ; pos 2570424 to 2572679 reverse strand)
cgtaagtatttgtcttatcaccaatttaataatttattggaaatattctcccagaactgattgattgatatcatttttattatcatgcagagctgctattgatgatcgccaatgtgttaatgattgttattagaatattgcctttctcatcaccttttcgacaactatgcaaagttagtagtacctaattatctatgtgtgggataaatggtaaacaagtagatgggtaattaacatggttttcttgaggtgaaatgacaatagttttttttttttttggtgtagaatttaagcctacattggcggatgttaggatgccttgacatgagaatgatttcaccaatcccctcttggatggatacacaattactgtgaaaaatggcaaggcgtttactttgaagcttagaataatatacaacacttttttgctaagaactcaagtgcgagtgctgtagatacctattggtattctctgttttgtttttttgtgtataatttttgtatacttagggtgtgcccccttttattggtgctcttttaatagagtctctcctggattatccaaaaataaatatgaaaaaattgtgagagagactcataaaggaaagtgagctctaaagatttaaccaactgtttcgcatttggttgggtatgtgggcatccaaggcaggaagaaaaagcaaggttctttctttggagttctggacactctgcactcttttctgttttaagaatgaattatacaaatagtaggtgagttaaatttgatgctaggagggatgatgtagaatttaggaatcttggaggctaggttatatggttatttgtggaagttctctttgtagcactcttcttttggcaggctttcattaggtaatttttgctgtagatttctggttgggaacccttcttggacagttttggcgactaaaacagtataggggattaagtggggtcactatggaattgttttgaacttttgacatttatatcatacttgggtcacccctgagaggtattaagttgtgaaatttttatcacagttttacaacgcccaggcatcaacttgagttttacaaggttttgaagtacaactgcagcaagactttaccacttttatgccctagttgaatgaattcatataagtttttggaattgtatgaaacagcacaagcagtggtattcattttagctttgaaaaagattgctggagaggtagagaggatacttataggatttattgacactcgaggtatgatgataacaactgtgtggcatgtgccctgtgaggtcaattttcagaacaggatcataaagaacaatgtgatttgatgcatttcactcccattgttgtggtattcttaccataatattctaaggatgatccttaaagaaggtttcaaaataaaatataaaaaataacagaatctggagttttgagaacctgttttgatttctgagccttttcaagatttggacaaaaactatttctcattgataaaaaattccatgccttcatcacatttttgatttttcaagatttgattgcatttttacaccagagatagatttgctgctgaaactgaaatttgaacatcagtcactatgaagatgagggttttataggtatgggagagtgagagaaggctgtcatgttgccaatatcaaacggactggaagttttaaataattatctgttacataaattagtattactgtcttgttgaattgcatttattttttgtgttttctcttgttttggctttgcctttttgtgcccattgtatgtcatatgtactctttttttgctctctctctctctctctctctctctctatatatatatatatatatatatatatcttttattgcctttaaaaaaaaaaagaaaaagaaatttatggttcttaaaaatccaatcacatatttatgattgtgtcttttttgggtctgttttgtggttgcgctgttttcatgatcttttcttgccccaacttcatgtgtacatccatgtttcatagctgtggtgctagaactccaatgcatctaactgaattctaatatcttgatcttcaggaaaatatccttgaaataattagaagtgatgtcattcagttatattctttttttaattgtggtttttgtttgtgttaccactttttgagtctagtgattggcctactaatttgacttcacagattctgtcttatataaattgcagcaaatagctcagatcaaacaaaggatcaggatctc

SEQ ID NO: 12594 - DNA, 4610 bp, Vitis vinifera
  Intron number 7 from transcript GSVIVT01025200001 (locus G SVIVG01025200001) derived from phytozome v7.0 (chr-ID chr6 ; pos 3403042 to 3407651)
gagggtgctgctaataacttatcaggtcagtcttgcaaaacattttctgtagtcaaccttgtccttagcattaaacacaaacatattcaaatggaagcatgcaatttattcaatgtcatggaggtgaaaaggttgtcaccagcttcttcccaggttgggcagtatcagatcaaggaaaattaaaataccccgccttcttgcaattacatctttttttttttaatatgtatctaccattcgaatgcgtctgtgaggagattttagaaaagcattaaattgttgatgtccaaatgcacttgcttcatgtgtgcctattactcacacaacatgcttctatgcaacttattggatttcccattgaattgcttgtaacacgttacaacagggcaagtgtccaagtattccgtggtttgcataattcttcacttacatgactccatgtgtcttacatttgccacatgtgcgatttacctgcatatctcctttttaccttcaaattagggcaaaattacattcaacttgggtgcttagcccttgggtagatgatccagtgtcttgaatgcctacacagtgaggatgcccatataatgtggatgtctgcctattgtcaattgtaataattgttagtgaagtggtattctttccctcaatgcattatgaaggaaagggtcaactccctcttgatggtagaggtgaattctcagaggccagaaggacctgacctcttaggagcagtataggggtgcaaacaagtcgggtagttaagtttgagctgcctagggcttgggcttgggctaacagctttaaggccatatttggccttgtgtcaagctcagaattaacatcccaagctcaggcctgaacctaggccttagcctaacaatcttcagccaagcccaatgttacctagttgaatatttgtaaatggggagagttgctttgaagaaaaaaagagatggggaaggttgtcccacactggtcagaagaaaaaagaatcctcttcttctagacaaatcaactcttacttcctcctagctcaccataagaaggttctaccgcattgattgggggaagcatctcatcccttttcctcatagaatcaacttgtatcttttccaaaataaccgtccaatacctttagttaaaggtttgttcttccacccatttagtttaaggtattaaaatctcgttaaatcaacattgcaataagtaattaatgttataatattttaattaattaatgcaaacatattctaatactttatttagttaaaagttttaatcttctctaataaatctacaataaataattaatacaatttaaaaataagcatatcttatctttggacaggcttaagcctaaaaaatgagcctaggcctaaccctaaggtggttaggatgcctcaagagggcctagtggttggagtgtaataatagcctaacaatttgagtttcaccaagcccaagttttaggtcactgggctgttctaacacatataggagactggtagtgaggacctaagctctgagaccatatatacctaacctcagaggtggtatgggtctatccctttgaaggtagtgcaacttgaaccttttagaggttgtatggactggatgcgttacaggaaggcctaacccctcaggggttgtatggacttgacttcttgaggaggctgtcaatgcttctcatgagtgatggtgtcttatttcttccttgtaaagataacttcctaaattcatttctgtatgttttcacttcaattatctccatatttgctccaagatattccattttcaatggcacccagatattattatgcatgccttaactccggagcagggtcccatgtgaactttgtgcatcttggtagcaagctaggccctcctatcagaaagtacctggaattggttgaaggttttggtttggcaaatgcagccgaaggcttatcagggtgggatagatctaatatatatgatttgattgagagtttgagagggtggatcgtttgtcgtgtcctaggagcatgtgtcaccatggtgcaatttgagccaataatgccttgatgcatcattttggtgtctccacattgactaggattcttccagcccaaatgagttgttctctttagtcttccatggagaaattatcttcaccaagagaaattgtctttcattaagagagttttttttttttttttttctcctctgtttttccccaataataaatttttttctctaatctctaagcattattagcttctggttcctctcctcttttggcttttagtccactttgttctcttacactgtcaacttgtaaagaatagttccagttggttgccctgactcccaagttggaaagtagacaaggaaagtttttattaatataaaaatatctttcatttcatccgtgtcaagctaagtatgtggggcaagtagttcaggtgtcaatactcaggagcatgctttgaatagtcacctcttataactttgtctactgcatttacaaacagaggacagagctataagccgtagggagatttccgctttttgaattgtagggtgtgggcagcaggctagtcagtctgtagagctggttaaagtcagaaacactttcatctcaaatatcttagggaaatcaatctttttgcttaggttagttatgggtaccagcactcttgatcttgttgtagaaaggcttttttgcttcctagtacttctgttcaaattcttctttcttgaagatttgaatctaaaggcttgtaaacaaaagctctttatgatccaagtgaatgtttcttttcccttatccacggtccctgttcttgattgaaggccaagctttgaatcatttaaatacaaaatactgggaacaagaatctcataacctaactgacagcaagtgaattgtaaaggataagagttttcttgttcttgttatggtagctgggaaattctgtaattggattaattagactagttgaatctaaagttgggaaggaggaataaaataccaaactcgcttacttagaaaatcaaacctttccatcaataatcaagcttgagcactctccagaagccctagtaaaaccggataagtagttccttctacttgcttgggatttcaagaagttttccttctttctgtttggtttgcagtcaccagtaactagagctgatggcaggtgctacagattgcaaagagacttttagttcagtttgcactgtcaagtgctggtgaaagtcaattttgatcactgggacagttagaagtcacagggtgactttcaagcaataagtaggcacagttggaaagtggtgcactcaagcctttatggataaataggtagtaaagcagctcttctttgcagcgaccaatgagtcttaagttctgggagttgcagatccatttttcttctggtagtggaaggtgacatgtaggcccatcatatgtgaagctacaaaagtacaattcaattatctttattcaagtagtatcctaaaaatacttttagggaagccctttagtgaaagccagatgtggagatgtgtaggctagactagagtctgatctgaaccttcagtttcacctgccagttgtcataatggaataaagatctttgattagtgtggcaattgttcacatattcaatgatatacaagtctacacaaatttgggctttttggccctcacaacaaattgaagtataatcctaagaaaagagagacaaattgccttttggttgatatccttttggcttttggttaaatcatatttatcatctttgtcaaattttatatttgtctctttcctagcaagttaatctctattcaatgtctctaccttatctgggctattaccttggtcaaactcttgtccaatcataaatttctagtttgttggtgataccaacttgttatatcatatgcatggatcactgccagtttgtttcctctttttggttactatctagtaaagaggtccttagatttggtattgttggtcatgcttgcatcatggagtacttgctttcctcttgatttactaattgttttttagggttcatttcttgtgaaatggttctatcatgagaatattcttgatcaatattgaaagagagaaacaacagttctatgagatttggggaacttatgaaattccaaatagcattatattttttttagtattttttactaggcttctatgggcctttttcttagacttccacaaagtgtgagaccatttgtttaacttgatatattcctgtaaaattgtatttatgttatactcttcttctcttactagcgttttcaaatggaggaatggttttaagacctcatttttcctggttaacatatgcccagtcttttaagacattgttattcaataaattctgttatttcaattttaaaaaatgtacagccgttacaagaagttaagaacttgcagacagagcatctctacattataaaagttgtatgtattgtgctgaagttgggtaactaatttaagtttgagtatgatgaaaagatcttagcttttttctcagaatttctctatttgtgcaacagaacaaagcacttcttttcctgattccaagtctgac

SEQ ID NO: 12595 - DNA, 12390 bp, Vitis vinifera
  Intron number 1 from transcript GSVIVT01031789001 (locus G SVIVG01031789001) derived from phytozome v7.0 (chr-ID chr3 ; pos 4375351 to 4387740 reverse strand)
agcaagttgctgtcaaagtcatccctaaagccaaggtttggtcttttcctttttttcctttgattttctctttgtgttgttatttgcttttctgaagattcgcatatgcgaatgacaccaaatttcaaaagacaccaaatttcaaacgatgatcactgtgtgatttattagggttcaattgatttaagttatttgatatttttccttcaaatatacatgcatgtgtgtatgtatatttctttattttacttgtctatacatttaacgtatgtgtatatattccacttagctaggaagagtgacgacagaggaggaactatcgcatgtttacatatttggcgccttcaaatatttttacgggaagaatattgtttgttctttcatttttgcgtgatactgtaggagctttagagctaaataattttcttgattggaagtttgtctgtgagacttatcggttaaattgtttatttttgggtcaatggtagggcatgcttccagtctgcatatattgaaaaacacccccagctactctcttgatgcctttacctttgatttgcatattttatgtttaaattgcattttggtctaacagtacagttatgaatcatcaatctgtttaattggaaattgatggaaggggtcaaggacgtaatcagaaagaaaattaatgataaaaatgttttgtcttcacttaatgacaaaacactctgttgttatataagttttggctgctgtactaagggatcaaaagcagatggtttatggtcatgattgaacctgatcatttgaaaaaaattattgtcccaaacagggtttggatcatggtctactaagaaactaagttcagtgtacaatcactcaaatgaggcccactactggaccatgctcacaggtcatggccatcctagcctgactgaagcttgtgatgggggccacatgacatgattgggagtaggtccatggtttgggttatatctccctcctagctagtggacctactcaaaggaaatggtgatgggctagctgcactgtgatgtgcatcaaccagataggagcattactccaaatgattggcacattaaattgactatatgatttattttactcctaatctcagatcaaattgaaggtgtttcatcaattatttgagcgtatgcatgatggtctattcatagaaaggggagtatatccagctaatgaagataaggagctcagaaacctaaatcaaggcccaagaaagccattgtgcacctattttcccttccttagaaaatgattttctaggatcatttattaaccagttggaagaggaaaaacttttcaatgagagatgctgtgcatgtgccaaaaattgtggatgtaaccaaacacaaagatgctagaataggacaaattaattttgttgctttctcaaaggtacatgcatgttgtggtgtttgtggtttcctttagtttttgcacctaagttctctaaatgcagtcaaaaccatggaaaagaggttctagagccatagcagacagtaatgatgaaatattgaattttttctcataaatttatattcttataatctcaagttaattgacaaagccttatcagtgtttttaaaggcgttggtggggcgcgccttgaggcgcgccttgaggcgaggcgcagcgaaaacgcgttgaggcgttaaaaataaagcgaaacacctgaaaggcgtacgcttttctggtgaggcgtgactgaggcgcgctttgatcgcgcctttcacgcttttccggtgaggcgtacgcgtcgtcggatctgatgtggcaatgaaagatttaaaaaaaaaaccctaagaatacctaaaaccccagtcccgactgaaaacaaacccaaaacaaaccctacctcttccagtcaagcggcgacggagtgctcaccttcggcggcgaccaattgcagcgatcttctccggcggcaatccctctcatctccaggtatgttgcgaactccctcttccatggtttctccctcttcgttcctcttccccggtatcctttcccccacgctctccttaatttccaccattttttaatggggctagtggtatggccccattgctcagggcttaggtgcaaaagtcagagaaagcgtgcggtaggcaatctttagtggcggtttaggaactccagcggcggcggataatataattattggtataaaacaatattcttctattttatctgtgaggttgacaaaggttcgggccgataatcctttcaaccggaaaataacacttacttttaaatattaaatacgattttcttaagaaaatggttgtctaattgttaaccaaacctcacaccattgaaaaaaataaattaaaaaatataatttttttttatgtaatttaatgatcaatgtgatttattactaataattttttttttaaaataaaaatcttccatcaatcacgatcatactttttaaaatataaaattataaaatataaaaaagtttaatataataaggacaaatttattataaaatataaaaagattaaacatataataaagcagattaatcattcattatatttgacaatacaataattttgtgattaaattaggcaaagtatgttttttttatgattctaatgaattattttcatgtttttatttatgctattttattttatatattttaaaatattaattaattatataaagtaaggctcaaaaagcttacgcctcaacgcctcgaggcttacgcctcgcctcacgaacacaaaaacgcctcgccttacgctttcgcctttaaaaactttgagccttatatacaaattacttgggatttactacagatcattcttcacatagcgttaaacaggcctagttgaagatgcaacaactatcaaattgttttgccatacttgctgctaattaacatctacaaagcaaagtatgaatcgaccaacgtgaatgcaaataattaatgagatatgtgagaaaaattattttgatattgtaaaataatctcttagctaccaagagatttatgctaagatttcctttagaagctaagctagggatgtactgtataatttcattgctggctttaatttggcatacttttctgccatgactactttaaaatatttgctaaatctcaatggttgacattgtgtgcttacaagatgttaaggcccagaaaatgtcaactgagttggtgaggagcctaggggtgggaagattcttagagtggggagcagtggaagctaggggaatggcaggggatataattgtattttgaggtaatagggtgctggatttgattgagatggaggtgggaatcttctctatttcttgacagttcaaattttgtaaggacaaattttttggatgttcacaagaatgtatggtttcttttataagaggaaaaaggaagacttgtgggcagaacgaggggacataagaggctttggaatgtcccttgttgtgtgggtggagacttttatttgataagattcttggtagaaaggaagaaccacattgggcctttgttatcaatgaggcattcctcgaagatcattgagtagtagagattgagggactgttcattgattggaagtccattcgtgtggtgcgatggattgaataattattatgcatcaaggttggattgtttcttagtatcagaagactaggaagattgggaagatcattttaatggtctatattagagtgtgttgccaaagcctatatttgactataggcctttttgttggatgcaggtggaatgaggagaggcaaaaccctgtttagattttacaacatgtggttaaaagtagctggttttatagagcttctaaagaaatggtggatgaattataacggaagaggctctttttagtcatattttggcctctaagctgaaagcgttgaaacaagaccaagatttggaacaaagaagtgtttgggaacgtctttgttggaaaagtaagtgccttaaattagattggtttctaggacactaatgagaggaaggggtcctttgtattgatgaagctaaggctagaaaggtggaattggatgagtacaacaagtaggatagattgaaagaaacttgtcgaaggcaaaagtccaaggagttatggttgaaagagaacaataaaaatactagcctttcttataagatggctaacgcttgatggacaaagaaccatatggccagagttaaggtgaatgatgtttggttgatagagactagcagaagagtcctatatgaacaaagggttgtctaatgcctatcaaaacctttttttttttggcattaggggattgatattctagtatagattacttgtattttgcctcattggggaatggtgattttagggagtttggaggctcttgtggaagtcttcttggctttatctagtttacatggggagaaagcccttggtctcaacaactttactcttgtcttttagtagcattactaggactttgtgaaatacaaggttttgggtttcttcggggagttttgtgggcaaggccgcaagccacttttgaaagaagcttaaatgcctcatttatggttctaatacccaaaaaggggaaaaacgacttgaaagactttgactcatcagcttgatgggaggtttgtataagaccctaacaaaggttttggccaagaacggttgtgtctcaatcataacaatcttttgtagagggaagatagattttggatgtcatccttattgcaaatgagactatgggttcacactaaggagtttgattggtggtattctttgtaggcttaacattgaaaaggcttatggtcattttagttagggtttctttattattgttatggaaaggatgagttttgatgaaaagtggataggtcagataaaatgatgcatttccttttctagattttgagttcttgtaaatggaactcttgttggtttctttcaaagttgaagggatgtgagagagggaggtccttgttttggctatgaaagcttttagatggggaaaaatgtgtttccttgtacacattttaaatttcatgcaccattaaatcaaagacctgagatggtgaaaggtgtaactatatcattcaaaggtgtagtatttgtgtggtcaaaggtactcacaaaatcctgattatttttaggtaaatatattaaatttggattttgcaaaattgggctcctattttgtttttgtttttttttttcaagtgtgtggaaacacacttttctccttttaaatgtcttctgaaaaaggcatgcaaggggagtttcatcttaggtttcaaggcaagagggaaagagagagtggaggtatcctattttctattagccaatgaccctcattctttgtgctactagccaagagcatttggcatacctaagttggactctaatgtggtttgagacaatatttgggctaaacattaatttactaaaaaatgagttaaacctcataggagggttaacaaatgtagatgagctagtttggtgtggatctgtagggtaggggtactttgcaccacatatttggggctccctttaggtgcctttttaaaatcatctttagtgtgagatttggtggaagataggttccaatgaagacttgcaatgtggtagagactatatctttcaagggggaagggggggactcacttaagttaaaaatactttattaaatctattgatttaccatatgcccttgtttgttagcccaaaaagagtaagtttgaggcttgggaatgttcaaagggatttccttttgtgtgtgtgtgtggtggggagttagagaacaaatcccatgtagtaaattggaaattgtttgcatggagaaaaaatgttcgggtcttgatattaggaatttataggctcaatgagaagtgttgtggaaaagatttaaattagggcacttagaagggcgttaatgtttctatgatataagggataattatggagtgggcttgtggaacacaataagaaaaggatgggatgccattaataacaaatttagtttcatactgggagatggaagaagggtaaagttttggaaaggtaggtggtatggtttaggcgcattgtgtaactacttcaaaagattcttgggtagcaaatgtgtaggagcaatgggattggtgtgcctcttttgtaagacaactacatgactaggagctcaaaagaatgggggattttcttttaaggttgcaaatgaaaatagtaagcaagagtggcgaggatatggtgatatggttagaaatgaaaaacagaatgttcccaatagaatcttaatactcatttttgataccaagtagatatggtttggaacctatggatgctaatgaaagtgggattctttgcatgagaagcaacttagggtaggatcctcatcatagattaactgaaaaagatgggttggacctaggtgaatagatgtgtattgtgtaaagataaggaagaatcaacagatggggtggcttttgatactcttgataggcatgaagcaaaaaaattggagaaattggaagagatttttaatgcttttttggagttgactggggacacaaccccaagtctagatgagttctcaatggcatttcaacaattttgttaggattttctaaaaagaacaaaggtaatggggttttttcaaagagttttttaatgaagcaagtttaagaaaagtctcaatgctactttcttggtgttaatccctaagaaaggggacgtaaagggtttgaaggactttaggcctattagcttggtgggaagtttatataaaagtcttgctaaagtgttggcaaggagattaaatatggtggtgggaaaagtggtttccaagtttcaaaatgttttttagagggaagacaaattcttgatgcggtgctaatagttgatgaggcagtagagtctatgttgaaaagttggggatgttgtgttttgtgcaaactatatatggagaaggcttatgaccatatcaattgaaacttcttacaattaatttttgaaaagatgaagtttgggcagaaatggataaaaatggattaaatggtacattttgattgcaaaatttttagttattgttaatggcaccctttatggatttttttaaagctctaggggattaaaataggggggatcctctttcccccctacttatttgtcatagtaatgaaggtccatagtttttttctaaagagggcaaagaaaggaggctacttgtcaggttttagagtgagaggaggtatctcatttgttgtttgtagatgacacccttgtattttataagactaatcaagatcaaatggttcatttatgttggttgctcatgtgatttgaagtcatattgggtttgaaaattaacctagaaaagagcaagttgattgtaattggaagggtggacaatgcagagttggctatgaattagggtggaggataggagatcttccatatttttactttgggcttccattggaagcttcttttaaataggtggtcacccaggatagagtggtagagcgattttgcaaaaaactattagtatggaaaagacaatatatttctaaagaggagaaggcttgttttgatatggagcacattctctagcttacccatctattttatgccattgtttcctctgtaatattagttagaatttggtttgagaagacttaaagagacttccttttgggaggaggggctttagagaaaagatttcatttagaaaagtggttaactattttcacaaagaaaagaaaggtgggtttaggcattcaaagtcatcctttgcttaataagactttcttggacaagtggagttggcgttatacaccaaaaaggggagccttatggagaggaaaaagaaagggggattggtcttgtgttgcaagagctgggtatggtgttgggttatgaaaagttgtcaggaaggattgtgatatcctttatggtaaaatttcattttatgtatttttttcccatcattatacactttagccttatcaaaagaggcttgggtgggacctgataggggagaagggacagtggaacacatgtttttctagaaatctaaatgtttcggagctggataatatggagcaactcttctctaaactgctaggttaggctgaaaagagaggaggtgggttgggcaatgtggatgggattgaggaatgattgcttcttcatgaagtctcttgatgctgcttgagtgtgggaattcaattacttttctgatgagggtcatttggaacccatgggttccatctaaagtaagcttctctgcatgggaagcttgttaggggaaggttttctctagatcaacttcaaaaaagagggtggactctagttaatagatgttttctttgtaaagtcgaaaatgaatcaattgatcacattttattgcattgtgccagttctttgacagttgctcttcttttcgcttgatgtttcttgggttttctctgccatagttaaagagacttttaggttgacatgactcccttgtaggaaaaagatgaaggaaggtttagagagctaccttgttatgcacttttggacagttggaaagagaggaatcgaacgtcatttgaaaacaaggagtagttggttcacattcttaacagtattttccttagtacctttttttgccagataaagttgtatatagatgaaggctcaaagtctttaataaattttgtttattggttaggcttttgcggaggaggaggaggggggtggggggtgttttgtttatcatttagcactctttgtatacgtcttgtgtactttggtccattatttttttgcgcttgctaatacaatatattaatcttatcacctatcaaaagaagaatcaataggccaccttttgcttcattgtaccaaaacaagaatctagtgggggtggctatttttctctttggtcatgtgagattgggtgatgccaactccagttaaagggtcccttttaagttggcaaggatcctttatggggtagaaaagaaagaaagcatggaaagtcattatcttgtgtgtttttttggactgtttggaaggagaaatagtaggtcttttaaagacatggaacaaacagatcaaatgctaaaacattcttttttatgatttcttttgaagtgggtaagattgggcttaaatgacgcaacagctgattggttgggtgttgtgtaaggggagtaaaggggaggagttattgcttttgttatattgcttctctctttgtgcttttgccttttggtgcccttttttggttggtgctgttaatacattttttgcttgcttatcaagaaaaaaaaaatgctaaaatactataacgttgtgctgatgggattcttagaactccaatgcacacacaacacacacatgctcatacgtattcatgtgtatatatgtgcacatatgtctgtgtatatatgtgcgtgtgtgtgtatttatttatgtgtgtgtatctatatttggaatgacccaagtcaaaaccttgtttaaaaccttgtgttctattttttttgttgcatttaaaagattagctccaagaaatatactaatgctatcaaggacatcgtgtgatggagcaatcactagtggaatgctcattaatattgacacagaagggtttcttcttattgtagtcttaaattggaattattcttgtttgtgcatttatttattgattgtaaaaaaacatgaaatgcaatttttttgtaagattatccattagtaccatagctttaaggaggatgttgcctccacaattgcaaatgggagagtttaatgagaggttccatcaagggaggccaatcaaacttaaatgggttgatcttttgtcggaggaaaaaaagtagttatgctttatgaagcaatttttagtaattgagaagtggcatgttattgggatgctggtatgtggctttatttatttcatcagctggttttatgtggatagcttctagagacattctagaggaaatgtttatgtcttttcaaagttgtgggaggggacctagcgacttatttgctatttctgtggaattatgctttgttagttgacctgtcagtttattttcttgagatatctacctgtatgaagacagtaggatctttacgatcattgtagagtttacaagttctcttgtcagcattatctcactgggttggaggatgattacttatgtcattagatcaaagatattattggtgcttagtgggggttcctccacctgtagtgctcctcaagatcaaatttgatgggtgctaatcaggtaatctaggtgaaatgaatattggaggtttacttatggatgataggggatccttgtctgggtttccactttagcctagtgctactgatttggccatagatgataacttagtcttattggaacttggaaggccagaaagaggctgcaatagtgggagtttacaacctcattctggatgagggcttgattatcatcttccccctacttcttggattaagagagcacttggaggtgcaattgctggatgcagtgaatcattggtttgttcaagggcaggattgtttctttgtgtggatgtccaggttggtcaaccaagaaactgattggttggctaaggggggaacctctttcatggggtatcttggacacttacttcccattaactccttgggtttgctttgtatttggtgtgtggagtttggggggccttgttgttggtttctcattttttctatgtttaaagtaactctttttcttcatcctatttcctttttattgtgatataatttatttttttcctataaaaaagagagaacaaactggtctataatctcaacttatttgaggacattgagatgaagaagagttaatactgggaaacataaatgttcatcaattacaaaggatttggcaagtccaagagaggggtaattctatggcaaaacgcgagtatagcgttaatatgggttgtgtggcgggaaagaaacgctaggatatttgaggacaaggctaggaatgcagggaatctttgggattccattcatttccttgcgtccttttgggcgttttgttcagcgggttttaagggcaccccccttaacgtactacaactcgattggctatcagtgtgttgttcaaatagttccaatgggacggtctagtgttttgttattttttcatgttgtttagttttcttttggagggaggatttctcatcctccttttgtacttcttttctatcaatatattcttgtgtggtttcctatcaaaaaaaaaaatactgggaaacataaatttgaacacaaggtgtgaaaacatggacttgatgtaaatcaccagtgccactgctgtgtccaatcaaagaagcataagttgaagagagaaaaacaaagggaaaaaaaatcaaatacaagaaaaaggaaaaattgtatctttataccttttaggtcattgaactcttctgtaagtgaaacaagtcgctgaaagatggttggatggatgttgcccttggacttagctttcaagaacagctgtttacttatgataagagatttgtaaataggccctttcatttcttgcattttgaatgaagcaagtatttgctataacttgaaatccattgcttgcattttgtactaaaatgcacatgatatggagttttaacaaatcagtcatttatttgacaatgccttttcagacaaatatctttaccttgctttgggacacactgaaaaaaaaaaagaagctgtctcttggaatccacaaattttgtgattgaacaaatttgccatctggataccacacccactcctgcacctgacacttatccctgagtccagatcgcatagaacatatcttcatttaggaagttttggtaggggctcattaatatgaaatttggttgtgatggttggaatggttgtttaaatttaaagaattccaagcattcatgaggaggctgacatggaactagtcagtagttagatattatgacttgattctgttaaatgtaagagaaaggctgaaaaggatatttgcagtgttgttggaatattatactctacattaagagttgattgactgatttttgtagaaattagttctataaagttgaaggattatagtcatagttggaatctggaaattcaatcatgagaatgcatgtcacctctgtaggatgtgatatattattaataggagaattttattttgaaaattatttgggctaacaattgctctttggtctgaaaccaatggttttctatatactaatttctataattcatggatatatgattatattgaatagttaaaaggttcttctttctccttttgagattgctatccttacacttattatctcatagtaatatattctttgttcccag

SEQ ID NO: 12596 - DNA, 8508 bp, Vitis vinifera
  Intron number 1 from transcript GSVIVT01028970001 (locus G SVIVG01028970001) derived from phytozome v7.0 (chr-ID chr1 6; pos 17001573 to 17010080)
cctctgcttcttttggggtcagttgattaactttaggttaaatctagtttttgaaaaatttgagggaaagaaaataaagaggaaacaaattataattctacacccaaaaatataccttagcaaaccataactttcaagtaatcaattatatgaactcaacggccccccacttgttttaaacattgattatatgacattaaattcttacattttgaatcacaatttctcccttggtaaaagtcatatttatggaggtcttgggaagtttgtctccatgcgtttaccatgaactataagcccttgtatttgatagtagtgaagactttggggttagttgattaactttatgctaggtttggtttttggaaaatttgagagggaatgcataggaaataaatataagggaaaaaaaaattgtcattctaaacccagaaatctgcattagcaaatccatagctttcaagtaatcaactatatgaactcaaagggcccctccacgtgttttaaacatcaattatatggcattaaattcttgcattttggattgctgggcatgagtcatctttgtggaggtcttaggaagtttgtctccatgcgtttatcgtgaactataaatcattgtatttaattatagtaaagacttttgggatcagttgaatgactttaaggttaagtttgatttttggattgcttggcatgagtcatctttgtggaggtcttaggaagtttgtctccatgcgtttatcgtgaactataaatcattgtatttaattatagtaaagacttttgggatcagttgaatgactttaaggttaagtttgatttttggaaatttgagggagaatgggagggaaataaaatagtgaggggaaattgtcattttgtgtcatctttacggaagtcttaggaagtttgtcttcatgtgtttaccatgaactacaagtccttgtatttgataattgtgaagacttttggattagttgattaactttaggataggtatagtttttggaaaacttgagagggcattggaaataaatacaaagaaaaaaaattgtcattctaaacctagaaatttgcattagaaaacccatagctttcaagtaatcaactatatgaacttaaaggcccctccacttgttttaaacatgtattatgtggcattaaaatattacattttggatcacaatttctcccttggcataagtcatctttatggaggtcttgggcagtttgtctctatgcatttaccatgaactataagtccttgcatttgataatagtgaagactttgcgttcagttgattaactttaggctaagtttggtttctgaaaaatttgagggagaatggaagggaaagaaattagtgaggaacaattgtcattctacgttagcaaaccacaacttttaagtaatcaattatatgaactcaaaaggcccctctacttgttttaaacattgattgtatgacattaaattcttgcattttggatcccagtttctcccttggcatgagtcatcttttttgaggtcttgtaaaatttgtcttgatgcatttacatggactataagtccttgtattaggataatagtgaagattttggggggcagttgattacctttaggctaagtttggtttttgtaaaatttaagggagaatgtgaaggaaagaaaataaagaggaaaatataaggaaagaaaaagtgaaaaaaaaaattgaaaccaattaattattttagaaggttaatttcattcatcttctctatggttttggatagaaacatctaacccttattggtttaaaatttcattaaataccttttatatttttttcatttattatttttattcacctcatcttttactgaaaataagagaagtatttgataaaattcaaaccaatggggtcaaatgattttcttttatatttttcatcgtaaaactaaatacaaaaaaattagtttccttaatatttttgctcatatcaaggaagcacgaacaacctctaacaagtgccaatttttccattcagcaactccattttgctggggtgtattggaacaagtagtctgatgaatgatgtcatgttcttccaaatacttttgaagatcagaactctgatattctccaccattatcactacgcaaaacccgaaccttgcattgtactgagtttcaatcattttatgaaaattttgaaacaacaagttcacttcatctttggtcttcatcaagtataaccatgtcattctggtacaatcatcaataaaagtaacaaatcaacgtgagctactcaaagttgggactttggatgagccctaaacatcagaatgtataaccataaaaggaagcagacttttattcaaaattaacggaaacgaagcacgatggtttttagccaattcacaaatatcataacggaaaccagaaatatcactctttgcaaacaaactaggaaacaatttttttaaataaccaaaggaagcatgtcctagacgtcgatgccacaaccaaatttcagactttttcttctcctcctcagatccatttgccatcaaggcttgttgtaacttatttgaatcctttgaatgcaagtccaagtaatagagttttccccgcttaatatcacaaccaattgtctgtcttgtttggatgtccttaatcacacaaaattcaagccaaaaaatgacaatacaagataaggctgcagtgatttgagaaactaacaaaagattgtaatctagagatgaaacaactaaaacagaatccaaattcaaagtatcaataagagtcaaggatccttccccaatgactggggttgtgttaccattggctgtggaaacaattttttgtgaggaaggtctaaagggtgaaacctgtctagaatcaaaagtcatatgatctgtaacaccataatcaattatcaatgcactattaataacaggtgtaaaagtatttaaaaacttaccaccatgatttgtagcggctaccaatgcagaggctttctcagcaacattagcctttgtttttatttcgacaacagttgcaatcgaggttttcttggaatccttatttcgttgatcacgattattatcaataataacaaagtggtgatagcctaaacatgatctaaaggtccatggttcaaacccttggttcttccttgttttcctggtcataccaagagtcattgctttgaaattgtgggatatccagactagtaagatcagtcttattgtagtgaatgcatttgaaggttgacttatcaatattagggcttgtcttaggatggttgatcgttgtcggactaccatagcaacaaaatatccaggatttcaattccatggctctgatactatcttcaaattgataaatggtagttttttcatttattctttcattcgttcatgtacagagtatatatagagggtaatcaccattctaagaatgggaaagaatgatacaaggaaagaataatataaggaaataacaactaatatcctaatatctcaatattcctaatatctcaactttcctaatatctaaacattcctaatatctcaacactaaatgatacaaggaaagaatgatataaggaaaacatttctaatatctcaacaaaatgtcaattgttaagagtgttttaaaggagatagttttgacgtggaaatggagaaaattaaagctttctaatagtcaatttggaggtggttttcattatgttattaaaaaaatagtaaagaagataaaatataattaaaattagttagatattttggtattttaaaattatatactctttatataaaaaagttagaataagtgtaccaatatttaaaaaagaattacaaattggagggagaattaccaaaaaattgtaaatttttcttcaaatcaaactatactaccatattaaactattaaattttctaaaaacttaaatttaaaggatttagactcaatatacatatcatgctccttaatagatataacatttaaaaataatttattgattttaaatgttatttctattttcttttccttttttttttccctattttctctctaatataactaaaaagtagatctatatcatgagctttatgcatcattgtaaatctatattgcatgatagaggcaaaaagattttcttttgtgggaaattaattagctatataaaattcaaaaattataaaattgatttgcaacaaaattagctattttgttttagaaaaaaattctaaaataatttggagctattaggcttaaatcccatttgagcgtcatctttatccatttcttggatattttattttcttttcaccattgaaaatcttccaatataatctttctaaattacacattttttttcctttaacttttctaaatattttttcattaacaaaatatttcaaatcaagcaactcttctacataagatttactaatttttaagaataatttaaaacaaaaaaattaatccattgttccttatttggattttttaacacagttccatcagaatcaaggacttcatcaacgagttgtgaatgatttttgatatgatgttctaggccgagactttgaatcgatggcagaatttaagccttctagaggagaaagtttatggtggacaacgggatggaaatcaggctagagcattgatgaaattattgaatggagagtttgtgtccttcaatagataggcctttgaagaggcaagctttgataacataatgaatttagagatttgaaaaatgaatgcaagaattattgttgcttgttattttattcaaagtttctacaatattttttatataccaaaatgcaatggatagaaagtgaaaacaaggaaagaaaggatatgattcttgagttaaaaatcatacccatgattttaggaaattgaaactataaggagataattaaggatagtcaaaaggctagttggtttcaacggtcttatgcttgattttctcattgatgtgttggttttcaattaaaaatataaaataggttataattaaaaataaatttaaaataatattgtttgttcattgttttctggaacaatttttaaaaataaggaatgatttttagacaagtagaagttgttgtattcatttatttctaaaaacaaaaccaaaatatagaaaaaaactaatttaaaaagtacaaaaagcaaataaagtagaatacaatttctttccctttttattttctctccacaaaccaatattgaaaatcttctaatataaactttctaaattacacatctttttttgaattttctttaactttttaaaatgtttgttcattagcaaaaaatttcaaatcaagcaactcttatacataatatttactattttttaaaaataatttgaaacaaaaaaaaataatccaattaatactaagaaaattatagaatatcaatcactttgttatttttttttcatacatgattatattttttcaaaattttcactaataaaatatattggaaatcaaacaagatttaacaaaaaaactaagttatgagtttttttattaaattaatattcatattttactaaaaatgatttatttttaaatttattaatagttacaaacctattttttattttaataataaaattaaaataaaaattgttttggaaaaaaatgggtttttttttttatccattagaataatttttatttaagatagaaaaaatggtttactttttctttacccacatatttgaacacttcaaagtcatttcccaattccctacctgacgtttgaattagattctaaaagcgtaaacacgcaaatggaatcttggatctattggtgacttgttccaaaaagattaaaatatatttattcaaatgaggttttttttttcatcctttgaaaaatggttttaaaaataattgtaaagcacccttatttttagaaaatatcattttttttaacatattttttaaaataaatttaagaattcctttactttacccatatattccattaatgactttgcaggcttcaaagtcattatccaacttgttgtttgattccaaaagcataaaacactgcctctctaggttttctacaattaattttttttttttaatctatttggatctattttgcgggatgagaaggaagattttggaggtcatataaataaataataatcaagttttctcaaaaacattttgcttcttccacaataattttttgagaagggattagtgacaataatttttgtacatttcatttattagattttcacctaaattaatttttatttatttattattattattattattgctttgtatacatataatactacactaataatgtttttttgagcattattgtctcttttaaattatacatattaatgaaaaataattttgtttttcatatttttgttatatattagacaatactaggaattgggaaaacaaaaaaacaaattcataattttatgtttactttgtgaaggaagatacaaaagatgagaaattagaaaatgtttaaaaactagtatattttctaatgtttattcaaactcctgaatgttaactccaccattgaattggcttccaataattttaatgctatgcttggttctaaaagaatactaaggaagaaaaaaaaaagacaaaaaagaagaaactaagttctatttggttctcgataaagaagaaaagtagaaggaaataaaaaataaaataaaatagaaagtttaatttaaagtaagtaaattatttttattagctatatatttccaatttatttaactcattttaactattatatataaagatcaaatgatatgaaaatacataaacttttaattaatttgtattatatttgattttatttactatgtttttatagtaatccaaagataagaaaacattttccttatttttttatagtacttttctaaaaatcaaacataggatagaaaaaatgatttaagtgattcaactttctaaataagtttatgctatgttgactcatatgatatggaaattttcacacgctcaaagtggtataagttgtatccaaactactacatcataccccaaatctaatataagattttaaaaaaaaaaattgaatatcaacaaattattttaaaaaatttattattatgtttggattagaaaagtactaaaaaaaggaaaaaagaaaaagaaaaataatgttttcatatttggtttcactaaaaagtataaaaaagaaattttaaattagtttcaaattatttaatcattagatagaagaggaaaaataagtaaaataaatttaaagaaacatacaaaaataatttattaactttaaatatatattttattttccttctatctatttccttatattttcctcagaaattttctgtgaataaacataaccaaagtatttaacaatttattgctcaaataggctaaggattttttatttttatttatttttaaacatttaagatgctttttttaagcgatgacatagttttaatataacatttgcagaatatgggactagacatgaggccaaacgccctttaaatactcccacatgagagtaggtagtatgacccttgcttttccttgcctgtgctctgcttctacttctgcaatcatgagaaactccaattcaatcatggtgtttctcttgttagccatcttaagcttatgcaaaccaaactccttggcctgcaatgaaaaggagaaacaggcccttctccgcttcaaacaagctctcaccgatcctgcaaacagcctctcttcttggtctctcactgaagactgttgtggatgggcaggtgtccgctgcaacaacgtgtctggtcgcgtagttgagctccatctcggtaattcatacgacccttatgctgttaaattcaatggcaggtctgctttgggaggtgagattagtcctgctttgctagagttggaacatttgaatttcttggatttgagcacaaatgattttggaggtgctcccattcctagtttccttggctctatgaggagtctaagacatcttgacctctggggtgcttcatttggtggcctaatacctcatcagcttggaaatctctcaagccttcgccaccttgacctaggaggaaattctgggcttcatgttgacaattttagttggatttctcttctttcttccttggtatccttggacatgacttggattgaccttcacagggatgctcattggcttgattctgtaagtctgctcgcttccctttcagagctaatcttgcccaattgtcaacttaataacatgatttcatcacttgggtttgtcaattttacatctctcacagtcctgtatcttccttctaacaacttcaatcacaacatgccaagttggttgtttaatctcagtagtctttcatctctggacctgagtgacaattctctacagggtcagattccgagcaccatatcaaatcttcagaacatacactatctaaatttatcagtcaat

SEQ ID NO: 12597 - DNA, 3340 bp, Vitis vinifera
  Intron number 1 from transcript GSVIVT01012152001 (locus G SVIVG01012152001) derived from phytozome v7.0 (chr-ID chr1 ; pos 997232 to 1000571 reverse strand)
ctggtgcattcacttggtttctgttttaatgctttgaatctgaatttcacatgtttttttgagagtatatgtgtaagttttaagggggttttctggctgaaaattgattattttcataagtggaatgaagtatctacattgtgctggcttgtactgaaatttgaatcaaagagcttaatctctttcctttttgaggcactgataactctttgacagttgtatatgtacacaacccatgcctgtttcttgataatttggaatgaattaaatttgatgttgaaaatgaatccgatggagaggtttctgggttgaaggattggaggtgttgatggttggtacgggttcattgatttacagaattgggaatctgggccaataggaattggattgggaaaaatctggaaattgcttatttgttggatcaagacacttggggtttcaaatctcaatctaggaatgtagtgttggaaaggtgtattttggtctataatttgatggtttagttgcatggtcttgcaacatttcggggttaaagaagaatgctttcaaggagggaattagggtcggctacaggcacatcaaggaaatagatatcagtacccgaaagagagaattagaaaggctttgtttgagagattcaaatcatctgacagatgagagtgaagcatttgtattcttttgttcaattcaataatccataaacacacagaatgtctttttttcttttgaataattaatccctctcgacagtgagatgaattaatgcatatatacctaaaagataattaagttatctcatgagagatgcttgagatatgagaattcagatgtgatagttcaagggttgcagtatctgaaagagatgctttgtgcatattctgcatctaaaactattttgaagtgggtgttttctaatgctttatctgttaatcttgtctgagatatggattcaacttcaagaaagtcaccacctttatgacaaggaaacatcatgaggcctaatgtttcttttctcttaaaacacttctttgaggtttaacatatttcttccgagaacttgtcacttgtaaaccatcattggtaataacatgcacaactaaggaaaacattcctatatctctccaaactgttcttgcctgagattatatattgaacttcacagagcaggcttcatgagacagacatgactgggttatcttttctagatctatcatctgattcctctttttttcttccttctatatgcaaataagttcctcttatgtcatagtacttttgaaggtttctgacctttttcttaatcaccactagtagatgtgtgtactggctcaagtcccttgagcaacatagcagatgttttacagattgtaatgataggacgactagttattattggacttcatcttattcagaagtgaaatccccgtatcaattcaactcaatcaagtcattttccttgacaacagaaggtgtttctcttctgttgttttgtcaggaaaagctgctgtctcatcttttgcttgtagattgttaataaaaccgtcgatctgattgcctttttttattgaactatttgactggtaataactcctctttgttgcttgttatgtcatcttgggtcaattcttattttctatgaagcttctgttcttccctttttctagggttaaagtgttgtctcttgatcagtttaagccacattgttgatcaacttgagccatatgaactagttaagtcagaacactaccattctgccattttcagattaggattactatttttttttttgccagtagagtatgtcttaattgtattttatcttctggttcagcgtcacttgttccaatgtgcttggtcagatagtttgatcagatagcctatcagacaagtgtccaactgatgagttgagtctgcatgcattttaatttttgcttcattcctttccttaattcaatttagtaattgcattgtgttttcaatagtggaaattggtttgccctttctgaccaattagtgtttaagaggtaggagttgagagtagaaaaagaggaaaaatctctagcttttctgggaattatttgatcacttcgatttctctctttttagatgcaaatgctattattgatgttgtggagaccctttttgaagatttggacctgacttgacttaattctacttttattttattttattttctctctctctctctctctacatatatgtatatatatatgggaaaaaccaaactaattataagctgagtctatgaaactctatggattaagattggccatattgaaaatatgatttcaatacatcttgggccatttggttgtggaagaaactggtaagtgagcttaggtatgataaacaaaagaacttaggaggtgtttgttttttttacttaattctaaatgaactttaatgcttgatagtgttaagtattagattgtttgtttttttaatattttatttctattaaacattaaaaagtaaagaaaaaccaacatgttgctttttccatttagaaaaagccaaatgtttcggttttttctattcaacaaaaagtttataataagtcatgaaaaagtagaaaaacaaacaacctaaagtttgaaagcaaattgctttaagcaaaaaactgaaaaaacaagcgccttcttagtatatgcttaaaacttggaattcgaacaccacattggtggaagttgttgatgagaaggatgagatcacaaccaataaataggaaccaatgggattgtacgccacttggaatcaaggccttagcttgaagttatgattaaacatgggttgcttgtagactgtaattaattcatggaagcttgtgaggatgtatggaaaagtagaattaaaatgtcaagagaagtcaaagtctaaaagatagaggccacatgagctttggtcattacaaatgtaacattaatctatgaaaatgtattacagaagtttaaaaccatggttgggatgcaatgctacctatcacagcctctctctcctttcactttgtttatccgttgggaaacacccagcaacttgactgggagggccttctcaatttgtaacatcattataataaaatgcactaagatataaatattgtaggctatttaccagtagtttgcgatttgacagaggtcttttgttgtttctgtaattatttctaaccctaatgtgaaggcagttatgttggatttaaattgttaattactgttagcatactctgttgtttttacttagaacaccttgttgcatttgtaaccatgctgttaaatattcaaacgcagggactgttggatctgttgaagaagctcgtttttcc

SEQ ID NO: 12598 - DNA, 9042 bp, Vitis vinifera
  Intron number 3 from transcript GSVIVT01023138001 (locus G SVIVG01023138001) derived from phytozome v7.0 (chr-ID chr1 2; pos 22158101 to 22167142)
ctcctggggctgttgctatcaactggattctcaaggtgcacatggcatctgtacatttgaaattagcaaataatctaatttcattttcaaaaaacaagttttgttggtcttctaacatgttattttcctttttttgataagtactaacatgttattatcctattggtcgtgctatattaatattagtttttctaggaatgcccttgtaactacaattttattatcatcgtggaactatttttgggaagcctgattgcttgccttatttttttcctgtggaatctggcaatagtaatctcataaaagaaaattaattgatgcatgtttagtgtttgttcccttattttaatggataaagagttgaaagttgaaaaaggccaaaggggccacaatcaatgcatacagagagtattctcaaactgtgccatatcaagactccaaagaaaagcaagagacaataagattctttctcccaaagtatgacccaagttgctgatggaggcacctcccgcctgaataccctacctcaggccatgcttatacctagtgtagtaaaacttccttcaacttggaaatacaattgaaagttctgatatattctctctccagatgcagccagctggaaaaggagggatggtacccctaaatctttctcctgtttttcttcattgatttaccacgtcaattgaggcatagctcctcctatggctgttttgcttattatcattttttataaatatttcctggttatcattacctctcaacaacttgtgtaatttagtttcctttgtatctttggccttgttggaagattatatcatcttggtcccttgtagaggagagtatggtatctattattctcttccgatcacaaagaatgattccacttttagtctgctattttaggaccaaaaccttaattacagtggtcctgcctgctccaactcagctccagtatgagatgggttttgttcatgaggagaggagctctcttatccatcatgggtcggaataaagtactgttattcatctgcacctttgctgtctttatttttatcttttagtttttctgattcaactgaactcaattcactaaaaccatgactcgggagatgagcctacaggttggggttcatagatgagcttcaggagatgttatacttgtataagtttttttgttccttttgtatagccctccttgtatagtggatgtttcttcgagtcttttgaccagttttgtatatcatggggaggatttctcatccttctcatgtttttattcacttttaattaatacatctattgtttttgatcaaaagaaaaacaaggaaaaaaaaccttgacttagctacttgggttcagtcatgtgaatcctttctcatttatcttcatattgagcatattgtcgtaaatccttggcaatctatgtctcttctcattactttgaccccctctttttaggcttcctttttatcatttctttttatttcagcttgaatcaattactcctccatgttggtgtaatgatgggtctttgtatcacatagccaactattttagatggctgtatctcatgttgtctcaaaagtgtcaccttgaatttctagtgatgaatttacttttgttctaattttttcttacattgccattcatccatattgatgtcctatttttggttaaatttatgcttaatagataattttctataactttgaattagatgtaggcaatgttttaaaaggttataggtggtgttgaggcgttttgcccaaatgacttgaagcataagctttgaggtggaacaaggtgtaaccgtccacttaaaaaaaaaaaaaaaaaaaaatcagaaaaatactaataaaatcacatgaaaattaaataataagaaaaccatataaattataataatcaaattaattataagtaattttcaatatatatatattttttttgataagtaaacacgacatatattaacacaaggcaaaaaagccacatagcatacatggagtatacagagtggcaaaggcctcacaaccaaaaagagacaaaaaacataccaacccttacttggaggctaaccactccaagaagcctattagggagtgcgtctccactccactatacaattttgcttagccccacacattacaaacaaaagaatttttaagtttctgaatagctaatccccccccccctaaaagctagtctattcctctcattccaaaccatccaaaaaataaataacggaatgaatctccaaatttctttcctctttttacccacaaaagagcccttccagttgagtagaacctcctttacactttctggaaaaacccactgggcaccgaacaaaccaagaacaatcttccacaacactttggccacagtacaatgaatgagcaaatgatttacattttcctcttcgctaccacataaaaagcatcgattaggaagctgccatcctttcttttgaagtctatcaagggtaagaaccttcccccaagcggcttcccacgcaaagaacactaatttagttgggactttatccacccaaatgccatttttggggaaaatagagacaatggggctgatcaacaagctgtacgcattcttgaccccaaactgtccgttttttcctcctttccaaaaaaccgagtcttcctccaaggtaaccctttggccccttaatgcttgaagtaattcacctaccaaattcaactcccaatcgttgaaatctctgaaaaaccttaaattccagcctacttgactagaattctggtcccacatttctcccatcgtggcattcctatggacagccacgacatagagctgagggaatcttagggacagctcagcacccccacaccaaggatcagtccagaatctgattttggtgccttttcccacattgaaagccatattatcccagcaccaatcagattccttcagaatttccttccaaatcccgacaccaaacgccccatttgccttcttagtcctccaaccaaggtcctcttgcccatatttcgccatgaacactttcttccacaacttgtccttggcccgagcgaatctccaaacccatttaccaagcaatgctttgttcaagaggactagcttcctcaagccaagccccctcttctccttacctgcatacaccatctcccaatttacgaaatggacttttctttccatatttcccccttcccacaaaaagtctctttgctacttttctagccttcttgccactatcttaggcatacggaacagggatagttgatacaaaggcatactagccaacgtactctttatgagggtgattcttccacctttggagatatattgccgtttccaaagggcaagtttccacctcaccctctcttccaccctatcccacacggaagatgccttatttggcgcctccaagggcaaccctaagtagactgagggtaattagcctaccttacatccaagctccacagccatctcaacaatctcttccacctcccctactggaataatttcacttttagccaaatcaatccttaaccctgatgcagcttcaaaccaacataagatccagcttaaatgagtcaagtggtccttctttgcctcacaaaaaactattgtgtcatccgcaaagagaaggtgagaaatattggcagccggcccactaccctgcctgatgttgcacccagaaataaaaccccctccacagccctcctaatgagaccactcaacacttccattcccatgacgaacaagtatggggataggggatcaccttgccgtagccccttagagctagagaaaaacccagtagacactccgattaccagaactgaaaacttggtagttgagatacaacttcacatccattccctccacttagacccgaaccccatttttttgcaaaaccctcatcaagaaatgccaattaacgctgtcatacgctttctcaatatccaatttgcaaattaggcatttctctccctttttttgccaagaatcaatcacctcatttgcaattaatgaggcgtccagaatctgcctacccatgacgaatgcattctgatccggggaaaccacttttcctatcacttttttaatcctattggccatcaccttagccaataatttgtacagcccccccaaaagactgataggtctgaagtcccccagttcttccgcccttccttttttgggtaaaagaaccagaaacgtgttattgaggctcttgaggaaagaattttgcttatggaactccttaaacatctctagaatctcctctttcacgaactcccagcagcattgccaaaaggccacagtgaagccatccggtcctggagccttgtccccattcatgtccattagagctgaataaacatcatcctcagagaagggaagctctagaatttccgcttcttgttgactgatctgattaaagtttatcccccctatatccgccttccactctgagtcttccgtgagcaactgtttaaaggcgttgacaatccctgtccttacttcttgctcctctgacaaccacaccccattgatttttattctgtccatggagttcctccttcggtgtgccattgccatacgatgaaaataacccgtatttctatcccctttccttagccataactcccttgataactgtctccagtgtattgcctccaggtttacccacttagcatagccctctttggcttcttttttactagagatttcctcctttgtcagcctcctcactttccacctgatcccagtattccacttgctgaagagttgcagatttataacattccagtctcccaaacacatccctattccaggtttttaaattctgtttagtcacctttagctttgtagccaacttataactagcccttcctctgaccgacatcccctgccaccagctccgtatgaggtctttaaacccttccactttaagccacatattttcgaacctcaatggtgaaggacctcttcttatgccaccctcctcaattagaataggaaagtgatccgatatggcccgaggcagtcttttctggatcacattgctgaactgatcaagcgaactgggagacataaggaatctgtctaacctggcccaggattgattatagagacctccactccaagtatatgatcctccttgcagggggaggtcaacaagctcgagatcatctataacctgaacaaacctcctcatagatgaggtaatcctcccttgtctacttctttccccttgggatagaataatgttaaagtcaccccctacataccagagttctccccaaattcctctaattgccccaaattcatcccgcaggctctcccttttctctttggtgaaaggaccatagactaggagtaaacacccagactacctcgttttcaacattcctgaatttacaggagattgagaattggccctcctcccaatccaagatttccagagatcttttatcccagcaaatgaagacacctcctgccgatccagaagcatctaaagctttccagtctaagaatcttcccgcccttaaacttctcactacccctttagacattaaatgaatttttgtctcctggatacaaaacgagtccaccttctgtcttctgaccaaagacttgattattttcctttcagaactgtcattcgcacccctcacattccaactcaataatttgagattcattatccaatcattagttgaccccctctgcccttaagatgacagttcttcttaatttccccctcataattgattgaactctccagcctcttaagctccctttcgaatttcaattttgccaaattacctttgctgtgtatcatttcccaccttttcctgatcttgatcaaaaaaacccaagatttccttttccaggccttctgttggaaatcccaaaaagttactaaatttggccagattgctttcctcccaattaatatccttctcgcctctgatttcttagggctcagcccgagccgaattccattccaagttgtctgcctcgtttgcggcacaattaacctcaaccaaaacctagcaacccttaccactcaccgtggacccttctgcaactgccaaactcagcatatttccttcctgaagattctccatcctcgccctagaatggtcgtaacactccccctctggagtccgaccaaaagaaaaaggagaagaatgaaaaggcctcgaaacccttaaaccccaagagtttaaatcagacccataccctgaggcttattccactaacgcacagtctgtcattgaactttgggattccggctgctgcttcctcctttcatccttctctcggcactttaaaaattccatctccaggttacacccaaagcaagccaggtgggctggggaacaaaacttcaaagggagccctctgtcgtggggttgggcctgagaaggcctaggactgcccccaagcaagactaaaggcccacaaggtgaaatcttcgacccatcggtggcccacccctcagatggcccaacaccaccagacgcagccccttttaaaatagctaaagggccttgcgcggggggcccatcagcccacttcaaacccacgagaccctcagccaggcccgactgggtcaacccagcacccgaagatccagaataaaggcgggtcaccggccccgcccgatatgggctcggtgttcaaactcttcactgcctacccctcttacctgccccccagtcacatcatttgagcgaagctgctcctcgggcctcgtagctatcatttctcccacacgcaacccagtgcatgttacaccgtcatccctaacctccccatcctgttgcctaggccaaactcgatagtcctccggtttcttcctcagtgatggcgagatctcccaccacagagacaaggaatagatcccttcctcaacctcgatctccaacgaactcggcaggtcatcaccactcgtttttactagaatcctagcccactcaagctcctccatcctttccatctgaggattgacacctaaaaacccaccgcacgcttcccccactcttctcaaaattgacggaacccacaacgaaattgggagacctagaatccttacccaagcttcctagattctctctcagttgagcaccctgattttggactccatctctccaaacccatctgaagccctcccactgatctcttcccaaaggcgaggacgtatctagcttcctccacaaattcaaactccagaagaacacgtccctttcccagccttgccaaacttaattttcctttcaatccccatgcacctgccactaaccaccctaatctctccaaatcttcttctcatgctgaactagggttccaatttcctaccaagcaatgttccaatctgctcagatttttacttatttcctccccctttacctctactctaaccctcgtaatatccctgctccttggtccctttgccactttcacatacgaccttcccgtggccctctcttcttgcctattctccttcttatcaaaacaaaatcccatatttcataaggactccaccatggaagcccatccccccttctcccccttgcctttcagaatgcagatactaaatctcctcttctccatatcggtaacccctaaacgaaggaaacaccctgccctgttggcttctctcaccagggagtaacttctccctttttccttccatccccttcccatcttccttctttcccgtcccttatgcactgtatcaaaccttctgtaaaaaacctcacgctcgccggccccagacgggcccaagacgagacccctcccttgctttccacgatgttaacttggattttgccttttctctcctcgactcctacttcaaacaccttcgattccaccacaaagctactccccttccttttcccacgattctccgctcggctttcaccctcattgccattgctcgcttgctcactctcactctctctcatcgcccgtgaatattttctaatttaattcctctttgtctcttttactctctcatgcctttatcgaataatttcaaaaatgtcgtcattatcactagcagtatcctccaatgtaattgttttattgtcctctcattcagtgttaatgttgcaactcatttttctttatcatccgttaattatggtgttcctttttcctttatctattaataataagataataatcatatataagctcaatcactacaatgacctatcctttgtttcttcttctcaatcttttcttttcctttccatttgaagggttaattggtagccaactaagcctttatttgttaaaaggtctaaaccttagtcttagatgcaagagaaaatttataaatctaaccaaaatattgtaaaagcacaactcattgaaaccaatgaatattaaggcttaaaactcttataaaatgtatgtaaaaaacccataaaagctctaaacccatcaaaaccttttgaatatttgagggtttagccttaatagccttgaggcttgaacctcaaggctataagcctcaacaaggtgaggcttaagccttgattaccctatactaaggctatagcttcaaggtgtaagcctctatagccttttaaaacactggattataggtcactatcaaagttgtcctaacatctcatcatgaagatgtgaatcatttttataaatgattcttgtttatgggtttttgtattatttgcgaggttttattttgaacttcctattgtccttgacctcaaacattttactacttgtatctaggaaagaaaaatttatccctaatccacatttatactgactggccagtcaacctgttgtgtaggcttttgtcaatggtccttgaccgaaaagtgttctatattagactctggcactgttcttttgtaccttgccttactttcttggcattttttgttttgctttatggccttcttttttcagtttgaatttagcttcatggaataattgcatttgaaatgatatttgttgaatttaaagttacattatatgtgcagg

SEQ ID NO: 12599 - DNA, 8584 bp, Vitis vinifera
  Intron number 1 from transcript GSVIVT01035304001 (locus G SVIVG01035304001) derived from phytozome v7.0 (chr-ID chr4 ; pos 212963 to 221546)
aaggaagagaaggaaaagaagggctcaggctttaagtgtttttgctattggctttgggcttgatggagatgggctctttttaataaactggacatgggcttaggcttatagatttgggcttgatggagatgggctcttttaataaaatggacgtgggctttaggcttatagacttgggcttaatggatatggatattattattattattactgttattatcatgcttattattattattatcattcttattatcattattattattattattattattattattattattattattattaattcatactttcaaaatccttttattatcattattattaattcaactttcaacatctatttattattattattatcatcattaatccaaactctcaaaatcctactattattattattaacccaactctcaaaatattattattattattatcattaattcaactcttaaaatcttattattattattattattattattattaattcgattctcaaaatcttattattattattattattattaattcacattttcaaaatattattattattattattatcattaattcagattttcaaaatcttattattagtagtattattaattcaattctcaaaatcttattattattattattaattcaaactttcaaaatcttattattattattattattaattcaagctttcaaaaaaatattattattattattattattattatttttattgtttttcaactttcaaaatcttattattattattatcattattactaattcaatttctcaaatctcattattgtcattattattattattattactaattcaactttcaaaatcttattattgttattattattattattattattaattcaactttcaaaatctacatcctcgcagttcgatttctcaaagttcatttctcataattactattattattaattcaactttcaaaatctacatcctcgcagttcgatttctcaaagttcatttcttataattactattattattaactcaactttcaaaacctatattatcgcagtccgatttctcaaagttcatttcttataattactattattacaaattcaactttcaaaatccatagtctcgcagatcaatttcctaaagttcattcctcatattctgtgccaaaattcaatttaagtatcagagctctaatcttttaaatttaattccaaaaactccaattttcaaataaactccaaaaatccagtcttcactcgaatagttttaattccattttggtttctaaataatcttttgtttttcttgattttacgtaagtagtaatgaattcttcataattgtaaaacccagaatttgtaagactaattcatgagcaataattggggctttggtgggggccctatgtctgatccctattgattgtcaattgttgtgcttaatatattttgcttgatcttcattttgcactccgatatgcatgagctataatttgtattcgttaattgtgtactaatctcatttcttgatagtgctttgtagctcgtggcccaggtacgcatacactctcattctgatacttcactatacgtgttccgattctcatatgtgcatgatcattcaggatattcattgatttactcatcaactgtcacatcagcttcattttatcagtagagacccgactttagggacttagaggggtgctatggtcttcactgtaccttcccgataagtaacctgacccccgagcccaatccggtttttcgtagatcgccttttccaaaaccaggagtcgcacttagggtttttctttcttattttgtttacccttttaaaaataaaacaaaaataagtggcgactccaagtcaatttttcttaatcaataaaatcatttttcaaaatcaaaatcgagctcgccatcgagtgggaaacgcatgagccgaaatgtggggtccacagaaatgcttgttgaaacttcagttttcaatcttgatcaatgttgtcccttcccttagctgtgcattattccaatgccagtttttctccaaaaacttagtccacagacaagattagattccgtgtggaattaatgttggatcctgttgtgagacttgaccatcaaaatccttctttccatttgtggggtactgcccacttgatcactactttggaaatttgactaacacacctaaattctcaaagacccaaaattggtctttatttttcatttgtttcactttctcccaagaatacttgtctttattgatagattagtttaattagagatcatcaaagaaaaagaatatcacattttatattaaaaaaaaaaaaagagtattgaatatatatattaagcaagatatcatcctcaaaaagttggaaatgtaatctagaaataaaacaagggagagtcttaaataaattgtttccaaaagagacttgataactaatgttttaggggtgaatcctttatgtatataaataagaaagataaggttttgctttttatgaataaattaatatttacgtttaatagtgattttaaaaagtatttttaataattttaatacataaaaatttctatctttttaatattaaaaaaattaaaaatattttttaaaatcaccgtaaaatagactctagcgatgacttccaaaagttgcttcatttttctcctcattcatgtgcaccttttcaaagtattcagtggagattggccccgtcaatcactttttccataatgcatagctggattacgtcaccatccatttgctaagttgtcatgccttttttctacaccaactcaaaaaccccacccgactgcgactggtatggttttcatttttttttattttttttatttttaaccaatataaataaggcatgaacacatccattttcatatctgtacctaatgttaatattaagtaattctacttaaaaatacttttagtttatattattattatctgtaatacttttattatttagagataattacttaatatttaaatatataaataagaaaaaaaattcaaaaaaacatccatcaatatataatataataaattattgtctttaaaacctaatttttagtataaaaaaggtattttatctcactcaaagttactcccaaatcaactcttaaggattgtttgaaattgcaaatttaacttttatattgataaatgaaagaggtagaagtaattgttatgtttgaaaattatatgtcaaaaatattgttattaaagagaaagataattctaaaatttttagttaaataaaaaatttctaatatatatatatatatatacacatatttaatgcatatgaatttctattcacatctaatcttcacgtaaaagaagctataaaaatgttgtaaaataattttttagaactaacatttttatgtgatttttttattcataataagttacagaaaaaaataaaaataaaatgcttaggtgtgattagaacaacttcgtgttcaacacatgtatcatctaatattcctatataaaaatacattcaatttaacatgagtataattacttattttattatttattaatatatattaaaattattttaattttttatttaaaaaaaaaaaatctatgaatgattgatatttccataaaatcaaaacgtgatgtagactaatcggcgcctagcgttgacccaaagtcaagtcttttctctagtgtggcattttccacatttatttatgattaccaagacttgcaaaagcaacattaggaattggtgcaccccaattttctgtcatcaggtttaaaagataaaatagagggtaagacatggatttaaattttataatcagattaaaataccgaaaacaatatcaataatcaaataatttcacatgtgttttgaagttttattgtttgtaccttacctttatttatttataacattttatcttagttttatttatttatagattgattcaacaacctaaattttattatatatatttaatgatttagattttttattttatatgtatattctctctcttaacagtttctctccatcacttcatgagtttccctgaagtatcccctactccactccatgaaatatatcgtgaaaatgaagttgtcccttacctatcctaagctaaggatagatctccaaccaccatctcttgtcccttacattctttccaagttagtcataaattcagaatattctacttttgacccaatcatagtgtgagtcgcgaggaacaagaattattacaaaattataataaataaataaataactttttttattttttgttaacattcaattgtaagagcttcaaaacaataatctaaaaagataaaactaactacaagttaaaatagtgaataaagaactcaaacattttataagacatccttatataaaaaatcaaaataatgttttaagaaaaaaatagttctttctttgtgtgaaacaaagtactattattttaatattattttacgttatccataaaataataaaaataatttcaatggtttgaatgctctccaatttttaaaatttattctcatactttcaattaatatttactaagatggtgtttattttttggttttttattaaaagtaatttgttttcaaaatttaggttatttgtttttctatttttttatggcttatcataaactttttattaaaaaaaaaaagtcaaattatataactttttttaaataaaaaaaaatatatattgattttttttactttttaatacttaatataaataaaatattataaaaataaataacctaatatttaatattattaaacattaagattctatttagaattaagtaaaaaaacaaatatcatctaacgttttatttttaattctcgaaaaacaatgaaatatgtaagttaatgatgaagatttgcttttaaggatcctgttccaatactcttacaatttgcaccaaaatacacgcaatgtctctagaagtaatgatgaaatgttgttatgttggattttacgaaaatatcaataaaaatacttatataagtatacaaatttacatgaatataattattttttattgatattttgataaaatccaacatgaacgacatttcatcatcgcttccagcactggtgcgtgtattccaaggcaattaggataagtgtctttattgactattcaatgccctgtcacattgatttattaattgtttggactatgagaagacttgtgaaagcaatctttccccgttttgttcgcacaagctgctacttccacgtcctttaacagagcatggcaatcacactaagctgttgtttattgtttagactataagaagacttgtgaaagcaatctttccccgttaacagagcgtgccaatcacactcagccgttgtcttttttttttttttttttttttactttttactcaaaataatttattttcaaatttatattatttattttttatatttttttcataatttattataaactttttattaaatataaaaaattaaaatatataactttttctaaatagaaaaaataacatattgattttattttttattttttaataattaaaaaaataaaataatagaaaaacaaacaacataatatttaacactattaagtattaaagttctatttaaaattaaataaaaaaacaaatatcaccttagtgactcacttttttttttatctttttttaaaaaataaaaatcaagtttaaaaacatttttggatattattatttatttttatttttgaaaatttgtgttcaaataaggtaaaaaatgaaaaatactaatttggtatttttagaattttcttactacaatgtttttcaatcaacttaaaaatagaaaaattatctttagaattaattataaaagtatattaaaatatttttttatattattttaaaataaaaacataatcaaacacaaaacaataaaataaaaaaatgaacgatattatataataacatatagtagaatataataaataatatcaataaataacaacaaataaaattgttatatattattattattctctattatatgttatattttatgagtattataagagtatttggtaaaatgatttaataatttaatttaaattattaaataaattaaatatttgataaaataatttaatattaaaatttaaagttaaaatgattttaaatattaagttaaaataattaaattatttttaatttaaaatattttttattagatttttacttagtatcaagtttgttgggtagatgagttaatttgttagaattatcaaattcatatgtttatatttattaattttaactaatattttacctttaatattaaataataaatttattccatatatatttgtattaaatatattccaaattataaaatgtttaccttacaaaaaatgagtgatggatataaggtcatgcatattatagtgattgctactacatatttgaagtcatctactatttagaataagtttaatattttatttaatatttaaaaattacttttaattttaaattatgatatcaaatcattttatgaaatatgtttaatgtatttaataacttaaattaaattattaagttgttatattaatttatcacacacccttccgaatctttctttctagtaaacctaaaaacaagacgaataaaatcatatcattaggtctaatttttatttatttattatttttttttatgtttcatttttaaaaaaataattcctaaactattatagtgggataaataattccaaatctatcgtagtttgtgccaaatagaaaataggaaaatgttttaaaaaactatactaaaaaattgtctttccaatatacgatttttaaaattcccttttgaaaaaatgcaaagagacaatttcttgaaataataaggggaaatcacaaaagagaaaaaagaaaaaagaaatcgtctcttcaagatttcttgttgtgtttatcacacaaattccaaattttcaacatgaatatattcattcaaagttacagactgtgaagaaagaagatcatgataccatacaatctcatcagaaacatggatgaaaattttggaaaaaaacattgaaatttcgtgtttcaatgagaggtgatacatcggggggataaatattagaaaaaaatcaataaaatatcgatgaaactgtgaataaatcaccaaaatttacattttatcgccgatttttagtgaaatttcgattaaaaaagaggttgaatttttcactgggttaacacgccttaatttaataatatgtgcacttaaataaatatatattaataccatgataaaaaaatttaaataaacaaattaatttaaattattttatttttaaaactttttttatattatttatatattaattatatatataaaaatataaatattaaaaaaaagtatacatatatcatcatttattttatatcatttaatacaatcgaattaaatacatcataattttaatattaaatatattttaagattaaacatattataattaaatatcgcaatagtattgtggaataatatttgatataatttaataataaatatatacttataaaattcatatttttttattaatgcatacaatattattattaaatatgataaattatatcatacatataccaaatttttaaacaaaataaatttaaaatgtatattatatttctaattacatttcaataagatttttcttacatttttatgaattttgatcaattttagacttatcgatatattttttttcaaaatatccgtgaccgatatatttgtgattactaatatttttatttaggagaaggaaattcaagagttttaaagcacatgaattcttcatccaccactaggttatgtgtcctgttacatattttgcttcaacatatcttaagtacaaggctatataagttatatcactttattcacatttagtacccttctcactttttttttctcttgagaaaattgtctctttaaaagatgatttctcactttttttttttaaatagatgatttaaaaaatatatatattttcctccttcctacttagtaaaaactatactataaatttagaattattttttccaatataataatttaggaattattttttaaactgacgtaatcttgtaaaaaatccttctttctacggctggctgcaatagattttcctgccctgcaacgttggacacgacagttgaaggagcgtcgacttaaaagtgatgagaagatagaaaagatataaaaggaatatgcgcctactgaaaggcacctcggccccacagccccacggcccacagcccattcatattgactgaactttctagtggaccagtccaatcaatggcctacttaaaggcgcctccggcccacggcctaatggcccattcatattgagttgactttcaaatatactatttaaccgttggttttcatctttcccgcccatcttcctcccaactcatagagaagcggtaaggaactcaacgtcaccaaa

SEQ ID NO: 12600 - DNA, 2169 bp, Vitis vinifera
  Intron number 3 from transcript GSVIVT01012083001 (locus G SVIVG01012083001) derived from phytozome v7.0 (chr-ID chr1 ; pos 1579126 to 1581294 reverse strand)
ttcttctgattatctctggtgtatcgatcctttaggtttggcaccatgaaagctcgactattttcttattgttattttattttgttttaaatttttaaatttttttagctttttaattttaattttagttttttaatgggatggagagtaatgaaggtcagatgttattcatgaagtgttgcggtactttgggatatattgttgttttttaacttacacattttgaaaaaccactgaaagtctaataggaacacccaggggtgaatgggttattaaaaaatgttaaataaatatttatatatgataccaaattcttttaacccaatagatatcatggtaacccaaataactaaatgggttatacctaaaatctttagatatatataaataaagaaaacaataattggttataggtataactaccataactttcaagataaccatcccaacaacctcaataacaaactaaccaatcaatcaaaatgttatcaatatcattctaaatataagtaggaataaaagatatacaatgagatacaagatttttacttgaaaaaccctcacaaactatggagaaaaaaaatcatgaggtctaaaacttactaatctaaatccactattcgaaatcaagttacacagatttacctgataactttaccttaaagacttactcttcagtacatacaatttgattcacatctgcaacgtagcaacttcttgttgttctcaataagtccctcttttaagaatgagaggtctctcaaatgatctcaattcaatctctcaccaatctccaaaatctctaacccttttgagaatttataggcaaaaatccaaagagtttcggtatcttaagtttccaaaataaagtttgagtgaaattaatccaaaatccatttttaaacttggcagaatagtcatgactgcttgagaggacttatgccacttgagcggtccgcttgagcaggttgattgcttgagcgagattaacagcttgagtgacccctacttcttttgaaaaatcattttaaaatattttaaataaaaaaatgataccaaatctttttatacctcaaaaggcctaatatgccacaagtcaagcctctttagacgtatttgtgacttgccggttggacgaactatctaaaaaggcttctatggccaaacataaaaagggataaaattgccaacatataaacaagattcaatgtcctaacttctctcaatctagttaaaaaataaaaaattatattttttggtctataatattgttaacatgaaaattggtgcaaacttattgtgattcagtcttatgtttaaacagtggaatatttatttattttattaagtgaatatgtgattaattgagatagatttttttatttttaaaaatattgggaaagggagttggggttcttctaaaagaaaaatgtgtttgggcactgaagttgaggctggagaagttattcattgagagtgttttttctttatggttatgctttgtgaaaatgtttgacacaaattgacatttaaaccagaagacctcatcttccagctgatatgcagatcttcttatctttccttattgtttagtatactgtcaaaattgatttcttgtgcatcctaacataaatgcagcctaatgtatctatataaagacttagggtaagcaagttggggttcttaaatggaaaagtgtttcagtaatttgcttgtcttaataaagatgaagtaattgctactagagaatgttttcttttcatgattgtgccttgttgtgatatgctcttttgctaaggtatttaattgcaacaagctgaaagaatatctgcactcataattttgttcttagaattttttattaaattataatatcgaactattcaagttttcaataaccactaagttatttgtaaagaaattagcatgtacactatcagtatttgaagtgtacatgatgcactttttgcttatctttgtgctgtacatgatgtactgtttgctaccagtatttgaagtgaactcacaggcactctttctagaaagtttcttcagattgcaatgtgtatgtgcagacatgtgcttcattgttaccttgcacttctttgtgtttacttttaataatattagcttttttgaggctaaagctatctgaatatgcctgcatag

SEQ ID NO: 12601 - DNA, 4395 bp, Vitis vinifera
  Intron number 2 from transcript GSVIVT01027201001 (locus G SVIVG01027201001) derived from phytozome v7.0 (chr-ID chr1 3; pos 18414351 to 18418745 reverse strand)
tgggtgattggcaagaggaggtgtatcaaaaggtaatatgttctttttttgctcatctgattgcacccaccagtggaggacttaaagggtgtggtgcatggtttattattattatttttaataaaaatagtgttgggttgggaaccaactaggatttattataaccaaatttagttgctagaataacaaaaaacagtaagaaactattaaaaacctgcaaagggatgatgacaaagggaaaaagattactgctgtcacactaagtaggttttagaataaattccttcaaagaggaaagattgacccctttttagggattgacaaagatctcaagttcagtagcaaaataatagaaaatcttatatttattcttgaaagaagatattacaattcttatagagaactgcccacaacttgttctactaataatcaatcttgatccttaaacacatactaatcttgacatactgtcataacttaatagaagtttcatagaaaaacttaaaatacatcctgtttgatgctaaggtagcatgaataatgctgaaatagaaatgtgaatagtgctgcaatacagccctaagctgtaattctattttcatataaatagtaatgctatatatcagtattttaaaaccggaccggactggctggtccaaccgccgatcggtcactagttcggtccagtttagttgtttaagttgggtagctattgaactggcattgaactgttgaaatcgacggttagaccgatgaactggacgactcgaccggtttcaagtgtgaactgaatggttcaaaaaacccctttcctcccccctttcggcacccgcctcagctgccgtcccccccttccttcttcccagatctgtaattgcgtctccaccctccctctcttcctagtcacccctctcctcccccctttcggctcccgtctcagccgtcgcctttttcccagatctgcaactgcgcctccaccctccctctctttccagttcccaacgtgcacccctcactctccctcttttcccagtcctagcgtgcgctccctcccctccccccaaaacctttcctttttttttttagttaaactttcttccactttcccacctccagcacaaacacgtcccatttcatttccaggtttatatatatatatatatatatttatatttattctcatttacctttttagttcatcttggattctccataattatttattttattttatatttgttatttttttaactctatgatttttaaaacttgtgattttaatttaaatgaatgaaaacatcataattttaaataaatttctggttttaaaataagtttttgatttaaaaataaatttaaaaaattttaattttaaattaaaattttgattttaattttaatttctaatttgaaactaattttttgattttcaaacaatattatgattttcaaataaaattttaatttttaaataatatataaattattatttttatttttataattatttttaattttaataatatataaattatatatttatgatatcattggttcgaccaccggtttgactggtgaaccatgaatcgataacttttttagttcaatgaacggtctggttttgaaaacattgctacatatccattaatgttgacattgccatgaaaagctacttaggttttagatctgcctaagaccaaattcatgggacatgggacacaagtttgctagttgaagtggtcaaattttcttgtgcaccacatggtaaaccacaaaatgaaatatcaatgtggtatggaagtataggtccatattaagagagtatccttgagaacttggattagatatgtgtttatttatttattggatttggacatgcttgtttagtatgacatcattattggacttgtacctataccacttagtttcacacagtcgcttgggaacgtggatttttggaatatttttttagttgtatctgcacttgattgtcattttagttgcaacaagcttttacacgtgtgcatgctaattgttagttgtaatttctctctaattgatatactaattgttacacgtgtgcatactaattgttagttggacccctcctttcttaagggcgtttaatgattgggaggtagagttggtggaatgttttttgcaaaagatccaagtctttagggtgcaaagggaggtggaagatagaatgatttggatagcttcgaggtgtggcacctttacggttaggtctctttattctattttggagctcagagattctcctttgttcccttgtggtagtatttggtgggcgagtgtgcctcctaaggtggctttctttgcttgggaggcttcttgggataaaatcttaactttggaccaacttcaaaggagggggtactcgttggcaaataggtgttttctatgcctctttgaagtagagacggtggatcaccttttactttattgtgcaaagactcgggttctatggaatcttcttttctccctctttggtgtggcctagattctctcttgttcaatgaaggaaactcttcttgggtgacatagggcttttgtggggaaaactcgtaaaaaggtttgacaaatgacccccttatgtatattttggacagtctggaaggaaaggaatatgttagcatctggtaatgaggagctttcgctccaaagattgaaaaattcttttgtatgtaatctttggtcttgggttagggtgtctatatttttgaaccctccttcacttgtaagcttttttgattggttaggctctaagtaagggcaggtgatgttttttgtttctatcccttccccttcggtttgagcctttgggctttttttgtatactccctgtatactctaagggcactgcttttggtgcttccttttttctttatatacatcttttttatctgtaaaaaaaaaaaaaaaaaattgttgcaaattcataaattgttttgaaaacttagcaatcttccacttggtgacttctccttaagtcttggcacttagatggtggagatttggaagggtggaggctatgactctctctctagaacatatgagagaacaaatgaataacaaaagtttgaaaccctaacccttgaaggagcatttattgtcttttccatgagcttaagtgacttgagcctacctcaggcttgggtcacttaatctaacccaaagaggacctaaattatttattaacttaatagggttccaattaattaattagctcaatttagagatacagttcattaactcttgtgcaacattgagaaggggacaatcgatgaaagtcttagaaggcaaatgctggtttactgtagagttgaaatccttgtgatgggggatcaaccttgggttctcgatttcgtattctttatagagttacattagttaaaaattctcctatatcatctgaactacgggcgctttttcccttttacttgaaactttaattttcatgtaaaccttatgacttagagatagaaggtctcgaaagtctcttgtccattcgctctcgtgtgaccctatccttgtcttcccaaatgagagagtttggtcattatcgtctttagtcgtattcatggtaaaatcgttcttcagttcttcttagccttatgtaatcaatcgactctagttcttctttcttcatcaaaatttatatggaaatcaagagtttcatcaaaggttaaggcatatgcttggttagcagtcaataaggggatcaataccaatgacttgttttaggtgggaggacctttcaaagcccttagtctagatcattgcactttgcatataggaaagtggagaatcgattaattgcttttttttttacattgtccgatcactttggagttatgacaaaagttatttagattagccagattggattggattcctcttggaagtatcaatcatataatgaccattgattttaagggtttgagaagcactttgagaggcaaagttttgtggcagatcacttgtcttatgctgatttggatagtatggtgggaaaaaaaatgcaatgaccttttactgttgttgttctttttatgttattttaatattttcttattttaaattattattattattattgtttttggttttggttttggtttgaaactacattgaaaaaaatgagtttatctgtcttcttcttgtttttggtcttgttttcaaactataccgatgcatagaactgatagatttgtgaatttgacaaaaatgagtttatctttcttcttctgttggtcagcttatttttgtgaactaatagatgcgtcaatgtgattctataaagtattagctcctgaaaacatgaagttttaaccatttatatctttctgactatatttgcagataaaaaga

SEQ ID NO: 12602 - DNA, 1400 bp, Vitis vinifera
  Intron number 7 from transcript GSVIVT01015448001 (locus G SVIVG01015448001) derived from phytozome v7.0 (chr-ID chr1 1; pos 3790714 to 3792113)
ttaagtacatcggttggatccttgaggtaggttttgtggccaagcaaattatttttatttacaagtgctaaacccctgcttcacccagttggagcaagagaaatggattggaaatgcctggtatctttgagttttttagtgcagctgcttataaacttctaaatggctaaccagataaaacagttcatcagaattgcaaattggactgggttcaaccaggactattgctctttctattttgattgaaccagataatgtactgatcagaaaattcactaaaagctggtttgactgatcatgcctgttgatttgctagtttgtcagatttaatttataagttaaaccttatgatgattgaacagtagtttaaaattccttgaatcatgcaaccaagaaattttttattttgtactattattattttttttttcacagctttccttaaaaattcagctttgtgattaaatagctgctattagttgtcgaacttaataagacaacaatgatgccttcccatttcaataaatgttttggtttttatgaagttcatttcaaccacaacagtttgggtaggtctctgtgtgtagctgtccatgtgcaaaaacacttgcttgctttctggtaatgtaacataacaataatccaaatgtttcttttatgcttgtgatatctgtcctctttggacttattgctagaagggacacttcctattttccaaagcacatggctgtttaatatttaattgggtattccttggcctagattttttgcaaagtcctttgaatactcaaggacatccacagttcattttgttctatcttcaaatgacttgaagtatattaagttgtggggcagttggatgtcccatgggaattgaattatagtcctcccacataagaaatgaatttactatggttttgatagcatttagacaagcttggttgtttcttcaaactagttgaaatagagcatttttacaaattcaatgaccattggtagtgatgtctgcacgtcgccttgcccactggtgtgtgtgatgtgtattaatgtgcattcatgttattgacccaaaaaaaaaaataataataataataactaaataaaattggaagaaaatagttgtttgaaatctggaagaaataggaaaatataaaaggaaatagttggggttactcctgctagtatgcaatgttttaactgtgcaccttattcgcctcaaactatggccatgtttctttcatctgtttatacttttttccttggttgtgattttcttgtatcttccaagtctaagagtactctgcatttcttttatttataatttacacacaatttgattgaaaggtctcatgatggttgttgcagagtgctccactgccaatcttggagagtcacgagct

SEQ ID NO: 12603 - DNA, 3552 bp, Vitis vinifera
  Intron number 2 from transcript GSVIVT01010760001 (locus G SVIVG01010760001) derived from phytozome v7.0 (chr-ID chr5 ; pos 22350997 to 22354548 reverse strand)
ctctcttccttagaggtaatattgcgagtggtctaacttctctttaatcttgaacaattaacaagtggagaaccctgatatttttcacactattagttgttatatctccatttgtaattttgttgtatttctgtacatgtacaatgttcaattcttgagtcagaagaaccgttgtgcatcattctcataaaaataaaaaatcattgtgcatcaacgttatgaaaattacttggatgttctggttcttggatacttttatccatttatatagttgtagaagaagatgaagtaatccgcacataccacttaagacacttctttgaaaaaactcttccctcttatgcaagtgaacttctattgattggcataattatttctatgggaaaggaagatatatattttgataggaaattaagatatatattaaaagaacctaataaggaggcacagcattggaacctgtgaagtatagagactgttgaaaggtaaaaagaaatgcaaacaacaacatagaacaaaggccataactgggcctagcctttcctcaacaatcaataaactccaaaaatgaaagattatctgcctgcaaacagtccctagactgttcaaatggaactttgaggaaaggatcttttgaagcttgttccaagttcactagatcctcaaaaatcctctgattgtgcctccttcaaatgcactaaaacaatcaaaaaggggctatcctccacatatttgtgtgtctcttcctcaaaaaactaccatgccaacaagtctttcatctttaatgacatcacccaagcaaccccagataaagaatatgacagataccataaattgcaagccttctcagaatggataagaatgtgattaacagattccttctcactcttgtgcaaactacaacaatttgccaagaactatggccttctcatcaactaatcaattgtcaatgtcttctttgtaatccacctcctaagaaaagaaaacaacctttaaagaacccttgaacctctaaatttcttcccagggaacaaaaggagcttcccgggaaacaaaaggaggcacccgaaaataagcttttttccaaggcaggttgttttggacatatgatccatgctgtagaatgtgttggaaaacattcctccatcttatgttaatatggcatgctccctttttctcaaccaaattaatgcagttatttgactttttttttttttaaataagtttttttccaaagcaggttgttttggacatttgatccacattgtagaatgtgttggaaaacattccttcatcttatgctagtatggcatgctccctttttctcaaccaaatcaatgcggttatttattttgactaaagccgcatccattgaatgcagttttattattattattattattattatttttgataatatgatcccatgtaagcattttataaaatataacttgcatataatgtccacggttttagttcaaatttttttaaaataattttaaaagaactcacatccattgcattcgactagaaagtacagcatgcaattttatatacaaattacagaaaatcgcattcaactaatgcggtatatttgaattttttaagagaactaaatgtggtcaagaaaggaagccaacatggttgatgtggcataaaatgtagtagcacatgagaaatagtttttagcccgtcttacaatgtgcactaaaatttaaaatatcctattatggaggaaaaccttgtggggaaagagacatacttggttgtggatggcaacttctttgtgtttgttttgttgcgtatggaaaatgtataattggagaattttgaaagtttggatcaggttttggaaaaaaacttcctaaaggattttgttgggaggggttagcggtgtgtgcttttgttcttgttgctttttttttcatctcttccttggttcttttggaaaaaagacatattcatttattgaatggtaaatacaaaggacaaacaatatgtccaagtgtataattgcttatcaaaaggtaaaataagtatcttagtccacaaaagaaatagaaccacctgaacaaacaaaaggttgaaatagtaatctacccacactaaagaaactttttactggtgctagggagaaagctcttgtgagaaatcatggaattgtatttcttgtattgatggaggaatttacaatgaacatatagaatttacagggaaaacaataaagtaaaatgatcctactgacaacctagaatacattgaatgtagaaactattaatcaactatacaaacaaggaaggaatccctaatttgaagccctaatttataactacttttcagtcctaatttacatcttatacaagctgtattgattgtggatggcttgcacaatcaaacaagttgggacgattttcagcagtaactgattcaggatccccatggatctgccaacagtcaccaacaaaggagatggagacaagttctttgctccttgcttggctaagtagtctgtagcatgattagctggatgatgaacccaagagaaggagcatcctacccactggcggagctagcttggcccaagaggggcacatgccccccctaaaaaataaaatcataatagcggttttgaacccttaacctcatttaaggggaaagtatgctttttgctgcactatatacagttatctctcccttttttgcccctcctgaaataattccttctatttgtgcccctctttgagcacattcctagccctgccactgatcctatctcactagcaacatgtatacttttgttggtccaatttctgaattaaattgagttgtttgattcatctatttgtatttatatttttgtaaaactaaatcatttttattcatgctagtttacatcttgctttgtttgttgcaattgttttttttttttttttttgtctttttgataggcaaaggaacgtatatatataatataataacaaaagagtacaatttttggcaattaaagaaatgatgtcggcaataagttagtacttaattttatttccatatgaatcctgatacttaatgtagcatgtctattgttgttggtgttccaggaaactaggcatctctctatagcattgtgaggtcactttttttaaatatttattattattattattattattatcattttgtctttttgtatgtgttggtgtttgagtataattttaaacttcatttaactacctaaaacaaccatgagctaatttcccttcacaatgtagtttacttaaactaaatgagttgttgttttgaacattgatccagactgagatggccttggttctgattacttggggttgctgtcttaactaccacatactataaatgtcccaatcctttctgcacttttagattatttaatcatcatgcacctatttatatgttctttttctttgtatgaattttatagtagactcttttttgatcttcaaaaatttagaatgattattattgtttaaaaattttgcagagaaaaagtgtgagctcgatatcctctggggataa

SEQ ID NO: 12604 - DNA, 4924 bp, Vitis vinifera
  Intron number 22 from transcript GSVIVT01019707001 (locus GSVIVG01019707001) derived from phytozome v7.0 (chr-ID chr 2; pos 2590242 to 2595165 reverse strand)
gtgacaaggtaaacatttattaactgtctcataatttctttaatcattttccccattttatactgtctttatggtgttgataaggtaaggtttggtgtgagtccctctctctgtaattagtatgaggtttaaatccactgctaatgacataatccttttgaccactcttaaaaccatagaaaagctttattgaacaggataataggattaacacccagacccacatcccttgatggggtgcatggatggtcctacttaactacattatatttagatccgtgctagcacatttccaaataaaaccctgacagttttattggcagtactaagcagaatagggactagtgatgggagctaactggggtggatatgtctatgctattgatgagagaacttcatttcccatgctatccatatttggcttatcctggattcttcatatgagcttgattttgtttggtccaaatcaattttagagtttgttattatttagtgcaataaatggaaatgctatattgcagacatgaggtgccttatcttatatgattttctaatgtttagaagagatgttttagtggaaggttagcttcatgatgtacttggtttgaaatgaatttcttgaaatgagtttcagccagtaatctttgggacactgtcgataatgcaactttagggaatccttttgagcacaggcaagcaggctataaccttgatttaatttctacatggaaaccaccctagacatgcagtaacacttctaagctgaggcttcaaatcccctctcatgaagtttgctacttgtaatacagctgcagcttactcttctctggaatgcatgtatcatatactaatacatttaaaattttttaagaaaggtggaagtggtcaacgaaaacataaaaaaaataatttgtatgttggtgcacctccttttaggtgcttttaacatatctactcattatcttatcagaaaaacataaggaaatatatttgctttgcgatgctaagtggccataatctgagtacaatttgagcaggttattatgtaagtattgccatgttactgtaggtggcagataattagtttgtgctagttcttttggaaaaatagaaaaatcagttttaataaatcttttttttgataggtaaatgcacagaaaattttatatataaaaagagaaaagggtgcctaaaggccaacccaaagcatacagggagtatacaagagatgcctaaaggtaagaacaaaaaagaagaggggatacaaaaaatctcacctaccctcatctagaacccaatcaataaaaaaatttgattaaaggtaaaagtccttcgtttataaacgacttagtccaagaccaaaaattacatacaaaagagtttttcatcatttgaattgaaagctcctcattttaaaaaacaatcttgtttctttcctttcaaaccgaccaaaagagacataatggagctgccatccaaacctttctacacttcttgcccacaaaggaaccatgccaaccaaggaggatatctctatttgaaaacggaaggacccacattacaccaaatagcgcaaatggtaactcccacaaaaccctagccttggtataatggattagaattggattaatagactcctctttagcacaacaaaggaaacatttgttagctatgagccataccctccttttgagttgatccaaagctaaaaccttaccccaacaaagcttcccaatcaaaaagcctaccttagtaggaacacacgggctctaaattatgctctcggaaacaatattgcatttctaggttcaagagcactataaaggaacttaacagaaaatttcccatccttaggtggtgtttgtttttttggctttttgctgaaagcaatttgtttttagaatttaggttgtttgtttttctactttttcatgacttattataagctttttactaaatagaaaaagccaaaatatgtagctttttctaaatagaaagaatgcattattggtttttctttattttttaatactcaataaaaataaaatactataaaaacaaacaacctaatatttaacactattaagcattaaggttctatttagaattaagtaaaaaaacgaacaccaccttagtctctttccatagcaccctatcctccatatcaataactagtctctttccttgtattgtcaaaaggaacctctccaacacctccacctcctaatcattgaaaggcctagagaactgaggattccaacccccctcctcaaccatagagtcctaacactccgctacccacgcctcttttgaagccactaagacatacaaagaggggaaagaatcgcatagggcatcattcttgcaccatttgtccttccaaaatttcactcttctatcatcccctcatagagaacatagttttgttaaggaataaagacccttcctttatgatttccttccataaccccacaccagacccctccttcacttcttaggtacaccacccccctttttcctccccaaacttcctactaataactttcttccaaagaatctctctttctaccgcaaagcgccaactccatttacacaatagggccttattaagtgtagatagacttctaacattcaagccacctttccttttatcttaacaaacaattacccactttacaagatgaggcttcatctccaaagctctcttgcccgatttgctctaatctcaatctaaccacccttgacatacgcatcaaagacatgaagtaaatgggcatgttagacaaagtactccaaatgagagtgattctctctcatttagaaatatattgtcttttccacaaactagcctcttctgaaacctctcctccaccccatcccaaaccaccacggatttgtgcggtgctcttaaggggagccccaagtaagtggaaggaagcgcccccttgcaaccgagctcaagggctaaaatctctatattctctactatccccaccagtaaaatttcactcttatccaacttgattctcaacattgagatgacttcaaatcatattaacaaccaactttaataagccatctgctcctgggaagcctcacaaaaaaccagcgtatcatcaacaaacaacaagtgagtgatttgagtcccatctccactcctttcccttatcgtacaacttggagtataatgggtgatgctttcctcagttagagatgttctcctaagatggcatagtttcttttgtttagaagaagaggaagaaagcttggagagcaactcatttatgcttacttttgtccatatgaaaagagagagatgggagaacatttaaaaataccaaaaaagttgatcaatcaatcaaacaattatttgtgcatagttctttggggtagtttatagtgtatataggagattgtgcattgtctatgattggttgagctttaagtaaagcaaaggtgttgctttgtgtgtaacccttagctttgtttggccccttgacaccttgtataatgtgtttatgctttttttttttttttttgataggtaaaagtaattgtattaaaaagaaaagtatacacgatgtatacaaggaaacaaaaagcaaaaaggcgcaggcacacaaaaacaaccgcaccttatgaagctcctaaccaatctacaagatcaagcatagacaaggagcctttcccaatatacaatcttacccaattccaaaatagatgcaaaaaagaactttttaaagaatgatccgaacattcacaactctcaaaggctctcctatttctttccctccaaatagaccaaaaaaggcataacggagcaaccttccaaacctttttcctttttctaccaacaggaaagcctccttaactcaagagtaaacctctcaccaaagagtggatcacccattgaacatcgaacaaagcaaaaataagctaccacaatatacgagcttttggacaatgaagaagaatatgaacactgtttatgcttttgcacgctcttttgttaagcgttgttaatgtaattgatctttgcctatgaaaaataaaaagttgacttgtaaaatgtgttgtttattatttttctttttttttatctgtatcatgtatcataagtttctttatatattggaagcatgaaatattaaataatatataaccaatttcatgaaagatagtaggatttaaagagttaaatttatatcatatcatatgaaaagattgaatactagagttttgaaacaagacaatttaacaaactatgagttattagtataggttcatcaccaaatctacaaaaatgaacttttgaattttagatatgatttttagtactaaattctaactaggcatgtgtgcatcagtttgttgctgatatacatgctttgtattatctccaagctcgaacttttcacattcttcattattctttgccccatttttcctcccttcctcctccaaaaaaataataatcataatcataatcataatcataatcatcatttaaatgaaaattctgtaatattcattttaacaataaattttcttcacttccaagagaatgtggcttttcatgtaggattatttcacctttctttttatgattgatttctaaccttattatatatattaaacaattaatgtaataaatagtaataataataataataattttttttttaagaaaaaaaaattgaatttgatttttcttaaagattatgaaaaataattaaagttatatgtgttgttgtatccttatattgctcattttcataaaaattatattgcattgttgtaatgtattaagttattgttcatagcttctcatagtgttctcttttgtagtcttactttcattctcatatttgtagtttattgaattgttctctttttgtgttttttcgtttttagataaaatcaa

SEQ ID NO: 12605 - DNA, 1782 bp, Vitis vinifera
  Intron number 5 from transcript GSVIVT01007729001 (locus G SVIVG01007729001) derived from phytozome v7.0 (chr-ID chr1 7; pos 9863642 to 9865423 reverse strand)
agaaagaggaatttgatcactatatcagagttcaggtaataatttgattttaattaattaacttctggttagatgcaaagtctaccactatgcaagtattatcaaacttggaaaggacttgcaagaatgatccaatcctctttttctttttcttcttcttccacaacctatgaccagttgatggatccgcttgtgtgatttctagttggagatatgtgatttctccataagaaacaattaagaagtggaaattaattggtaaataccatgagtaagttgggaaaacttaaataatttaatagcaaatatcgcttttgaaaaaatatgagaaaatttagtgaagaaataattggaagttagggaattaatcggtaatataatgactaagctgggaaaacttgaataatgaacatctcataaaaaaacacttgaatggtaaactgccatatgatgagtcaggagaagagtggtaattttgttattctggaatatttaagatcaattttgtgattttacacaagaatggaattatttacaatagatggcttgctcatgataacttggatatagatgtttctacatatgcacatctggttagattgattttaaatttgatttctaattttttgttttcatttttctaatatttgttttttttataggatatgctaaatcaggaaatagaaagatttgtctttcataattttttttatttaaagaaaaaaaagcttataataaacaatgaagttattttttttaaaatatcaaaatgttggttagattgattatatcagtatagaaaaaaaattaactaactgtattattaggtttgaaagctattaggacttaaaaaaaaaaaaaaaaaaattctagaatctgtacaaacatttatattctaaagggtccagataaagtgtaggatgatttatgtatttacaaatcataaacaaaaccttcccctggtgcaaaggtcattaaatattgtagacgtttttgtcttgacttggtcttctttatctttctgagatataaatactaatttatttgatcttgatttaaaatggatgaggacaaaagctttaaagttgtcttgttgcatgccctgcattggaatcttttgtcatgctgtccaccgaagatggaaattccactcaaatgcatgtgtttgtcatttttttaaagatagctgattcaggatcaaaaggtctgccatatttggtgactttcatatctattgagagggaggattttggtttttagggtctgccggtcaagaacataaattcctggataggcatatatcaggacctgtatcttgaataagtttttaaaaaatatttttattcttaaaaaatataaatagataaacttttgtttcctgatatattatttaatagtattttatttttagaaataaattttactccttgttgtaatccttttgcctacaaaaacaaaaaaacaaaaacagaacagaaccccattacttgtgttattcatttacatgtcaaacatttatactagacacaatccaatatcatctcttatcccatcatttaagacatcctatccaaatgactaatattaagaagacaataagattttactgatcttgtatggcaagtgatcctaattacaagtacttaggttcatgtctatggttccatatttaatctgtactgagttgatgcaactgttggtttttgtagctttcacatccatttctcaattagtctgttttatgcaggaagaaaacatcatcaagggtgtaagggaactgaa

SEQ ID NO: 12606 - DNA, 7046 bp, Vitis vinifera
  Intron number 7 from transcript GSVIVT01027798001 (locus G SVIVG01027798001) derived from phytozome v7.0 (chr-ID chr5 ; pos 7860808 to 7867853 reverse strand)
atctgaaggaacttaccactttggggctgctggaggtgttcattttcctcccttaagctattactcttatcaagaagtcactatctgcatgtcaattattttgttttagcaaaatcttttctgatgtgtgaattaatacttatatgcatatttatcaactaaaaagaaagaacaaggtaattaaaaatcttactcaaacccatttataggacttgcccaaaacccgatatatactagctggtatagaaaggcattaatggttatatgaagatccttagaggatagaagagtggggattggtctctcattttggaaaatggtgctaattggttggattgtccttttgtcaaagaggaagttcataaagcagtctttcaactagagaggagaaatgcttagagcaatgatgactttttcctagcttttttgcattaggattggtgggatgtggtggaagagaatttattaaaagttgttttattgcttaataattatggggttattaattagagcaccaatgctattttcacatcttagaatttcaaattttttacccattaggtaacgagtcttcacaagattatagctaatcttgtaagttaacttctggaagatggtcttgggtggggtttttcacactagtcaaaggagtttgttgaggatggttctccgtaaaggctcgacagtggaacttctagaaaatttcgtgaaagggtcagtgggaatggaggccggggagagatcaggggaaaaggtcacctttgaggtgaattttagtagttgtttggtaaaagagcactcctccaattgtatatcttgtaagttggcaaatttcaatagtttcttaagaatgccagttgatggatttgaaaaagagatcttttcccttgtgtggcaggctaaggagagggctttctgttttttcattgggggtgaagaggaagttaacctcgatatcttggtttgagagggacctcagcaagttgggatgcttagtcaattataaaagctcaacaaaaaagaaaagggctacaagagtagcaattaggatccaacataggttgcatgatggagctaaaaatcctgtcttggaatgtcaaaggagcaaatgatgaggaaaagtatatgataataaagtcattgataaggtctcaaggggttgatctagtttgttaacaagaaaccaaggttcaatagatgttcgttcaactggtaaggagtttaggagtaggaagatttttgaaatggtactggaagttagaagcttgatagcaggcattttggttttccaagatagtagggtattagagttaattggtaaggaggtggaagcattctttattgcttgtctatgaattgtgaagatagctttgtctaggtatacttaagagtttatgggttggtttaaaggggagaaagagtggatttctgggtagagttgggtgccataagaggcctttgggatgacctctagtgcttcagaggattttaatatggtcaagttccccatgaataggaggaattgccttagaatgttgtttgatatgaggttcttttcagaggacatagaggacttgaccttgggatccttcgctagttggagggctattcacttggagtggtgttcataatcttttgtcttcttcaaggcttggccatttcctagtgtcagatgattggtagaatcgtttttctactttaatccagagtgttttacctaaagcaattttaggtcactaccccatagttttagatggaggtaggataagtagtgggaaaacacactttacattttaaaatatgtgccctaaaacaaaaggcttaaaagattttgtgaggagttggttgatggttataatgtggatggcttgtatggtcatattttggaagtgaagctaaaggttgtcaaacgagatttaaaatcttggaatgaagaaggttttgggaatgtctcaacaaaaaacctagaggtgctaaactggatcaacttctgggactcaaagtagagagcagttaccttatctcttgaaaatgttgaggccaaaaggttagtggtgattgagtttagcaagtgggccttgttagaagaatctatatgtatgggggcaaaaataaagagaaatttggttagaggggggggggtggtgtggataaaaacaccaaatttttccatgaaatggtcaatgcccaaagaataaaaaacttcatgtttaaagtttgagtgaatgcaaaatgattgcttgggaagcaaatataaaggaaggggagtttagggccttccaaaatctcctatctgaaatgggcgattggagactcaacattaatgggatgagctttgaagttatgctatgtgctgattctaggaaattggagttacctttctttgatgaggaatttcttgttgccttgtctagcttgagtggggagaaagctgtaggggccaaatggatttattataatattttggcaaatgagcttggggagttttttgataattgttcctttgagcaaaatttaaatgtcacattcttggtcttgatccctaatataggtgcagtagagaacctgaaaaattttacattgattagcttagttggggggttttttgtacaagctactggaaaaagtcttggctaaaagactaaaaaatgtggtgggtaaaatagttttagtttatttgcatgcttttgtggaagacagacaatttctagatgtagttctaataataaatgatgctctagattcaaggctaaagagtcccaatagtggggtaatttgcaagttagacattggaaaggacgatggccatgtaaattggatctttttgttaacgatgttggataaaatggactttgatcataagtgggtaaggtggatcaaatggtacatttccactactaaattctctattctagtaaagagtgtcctattcagtttctttgagagctcaagggatttgaggtagaaagatcctctctccccttatattttcatattggcaatgaaggctttcaattgaattctgaggagaattagataaaaggggttacatctcaagtttcaaagtgggaggaagacggggggaggggatggaagtgtcacatttcttggttgatgatgataccctatttttttgtgacactaattaagagcatctgtagcatccaagttagaacttcatgtggtttgaggcaatgtctgatttagaaataaatatggaaaaaaatgaattgattcttatagaagtcacaaatattaggggtttagctttggtgttaggttctaaggtagggaatctacccattacatgtctgggccttctctttggagctttccacaactttgtaaaggcatgggaattggtagaggtgaaattatagagaaagctcctcgtatggaaaaggtcatatctttcaaaaagagggacattcactttgattaggagcatgttgttaaatctgtctatttatgttatgtcttttttttttttttttttttttccattcgtagaaagttaagcttaaggttggagtccatgttgcatgggttttggtatgagtgttatatatggtgaaaaaccaatttccagtaggataacactcgtgaatgagtgtattttaaaaattattgaatagggagttgaatttttaacctaaagttaacctgtgagatatcagggataaatagaatatccaaaatcaaacataagatcaagagacacaagaatttttatgtggaaaacccccacactaactgtggagataaaaacccacgaggtctaagactgcaaagctaaatccactatatgagatcaagtcacatagaactctttgtctgctttattctaaagacttactctctagaacctgcaacttgattcatgtccgcgatgcaacaatttcaattgttctagtgaatacaccttagccttgttgaagggatgtaggtcttcaaacaacccaagattaaacactttgattccttgatgagagatcgggaatggtatgacaagttagggtaaaccacttggtgaatttcttaaccctaaagggttataatagggtttatataaacctctaggccgaaggagattgatattctaaagtttccaaatccaattttcatgattatccaaaaaatattcttccatattctggcagattctatatgagcgctcaagtgctagttaagtgcttgagcggtcctagcgcttgagcgctatttctaccactcgagcgcccctaacttttccaaaatattaatttcaactttttaattcaataaagaaattctgatccacttttagaaaatttgactaatttctgattttttttttcattagaaatatctaagaaattctagtatgatcatcaaccatctagttcctgttatgttctttattttagaagacctccaaacatcactatgtatggaaaaaagatgagatggtttgtatggttgaattggatagggtcatagttgtgaaaggcgtgcctaggctctagacggcgtgacatcaccctttagcgcctcgcctgaatgtaggcgccaccccttcacggagatgttgattaagtgtgcaaggcgctcgcctcttggctaggcgcaacgccctcaacaggtgcacctctatcctctgtcgtcgtttttttttttttcttcttcttcttttggtcatcttcttaccctttgacgacgagttgtagagtggcaaagggagaatgatgagggttttgtttttttaatttcctgagatcaaaatgacgttgtttggtttgttcttttaaaagaacaggggccaaaacggtgtcatttttggcctgtttttatttatttatttatttaaaaaattaggctccaaaatgatgtcgttttggcttgttcttcttccaaaacccaatatatgctcgttttggacttgtaaaaaaaaaaaaaaaaaaaaaaaagccccagcctcccgaacaatgtgaagaagagaagaggatgaagaagaaggggaaaaatagaggaaaatttttgggcacttgattatattatataaaaatatatatgtaaaataggatgcgcctcactttactaaagtttgtgccttaggtgtgccttgcgcctgaagctccaagaggactttgcgtcttggtgcgccttaagtcttttaaaactatggatagggcttgcaaacatgcttggataattgacaaatttcacactgaaaaccatctgagcttttagtgaataatgatggaaagagttttttgagatacaagaaactaggatgtcctagacgatagtgctataacataacatcactatctttattagaactaaagacaaaaagacaccatttttcaccaactattggttaaggttgtctttcaatataataattcactttgaaggcatagagtcctgaacacacttcaacattgtcaatcgtcttccccgaattcaaattctaaaaaacataatggtttgggaaaaatttagtaacatagttcttttcataagtgagtttactaatggacaatagattgcaatccaagtttggaaccaaaagaatagagtcaagagttaggtccttagagatgacaataaaacttgtaccagtcacctttgagagagaaccatcagccatacgaattgtatcatccccaaaacaaggtgtataattttgaaaaattgtggcactctagtcatgtgatcaaaagctcctgagtcaacaatccaatgactcacattttccctttttcttttagggcagtaagaaaattacctttttgagcaaaggatccggacccgatgaagaaatggaggaatttgcctcctgttgggactagttgaacattttttgcaacaattccaattactctttttgaacggactgaaatgttgtggtgttgggttgtcctcagtagtgacatggtgtcctagactttctctattattttgaggttgaggagtccttggtgaccattccgtatttggttatggacagattgaatgggttagaattagctctaatacgatgaagaaatttgagggagcttttatttttctctcatctttcaaattgattcttgcattgatatttatacatgaatgactgaggtcatttgccttagaaaaagaaatctaatccttgattttaggagaaagtctcataaaatcaggaaatgaaattagaataggaaacaactatatcacaactgtgatacagctctaacacagctgtaccttctggatttcctccggatttccacaaattttgttcgacttttatcgagtgtgacataaagcacatgtatctcaacagggattaacaatttgaggctactccatggcttgtgctttttcatggaaatggtatctgttgcaacacaagatcttcagataattgatatccttgctggactaggaattaggttgatggattcatgctacttcatagatgaaagctagggtgcctctcttcagaaagttttccatttgaacttcgtactccaattgttaagggttttcatttgaattatgttagagaaagaaatggattatgtgtgaaaatgtgaagtttcaccttcttagctgaatggccaagtcactgccatgggtctcttaaagacagaatgaacttctgaaactatgaacatggttgtttggcaaaggaaaaaaaaaaaaaacaaaagaaatctggtcgcacaggcttgtaattacttttttctctctttttccaggaccacttttattaagattgcatgagaccatgatgtatgaatgcataggatagattgcctatatgcatgacaaatgttttttgaacgaatgaatttccactgtggaatagcctttaaataatctcatccaatttgttcctggtagtatagaactcaaaggtacctagcggctggtttctttaacttggttgtgagagttgttcgtcttctattatatttacctcctggcaatccattttttgaggattgatttttatttttatgttggaattaattgaaattgcagattttcactttgttccctaaggcagtgacaat

SEQ ID NO: 12607 - DNA, 9520 bp, Vitis vinifera
  Intron number 1 from transcript GSVIVT01025177001 (locus G SVIVG01025177001) derived from phytozome v7.0 (chr-ID chr6 ; pos 3676377 to 3685896)
tgtggatatgatccaaaaagttgttttgaagtgtgaaaatgggaaatgattcgaaaagttgtatttacatgggaaaagaagggaatagaaaaaggaaaaaggatcattagtcttggtcaatcaaattgatcatgccccctcaacaaccctttctttttttaaggagaagcttcaagcaaaagttgatcttatctttcttttaatgcaataaaaaaaatctttattttcataataatcacaactaagaaaagctaaagataggattatcacgatttatagtatctagatgttgtcctctagtacaacacacttgactctttgtgtttttatgtctaatagattagatttaaacaatgtaaaaaaacaaaatcaatactaaaaagttataaagagtttagaattctgattttaagttgaaaatgggagaaagaaaaaaaaagatagcaaattaatctctcgtttagagactaatgtcaatctaagatcaagttgaaacttaagaccagatatcaagttgaatattaaaaccaatttagatcctttaacttggttttggattttaaaacacaaatctttaaaatttaagtaatacaatatgaactattttatttcttgtaatatatgttatagcccatcattcatatgaatgacaatggggggctacccgccccaccccacctcacccctaatgggatgggtttgagttttaaataaatgggtttgggatgagtttgaatttttttttcttttaaactccagacatgttttgggtattgttttgtcatgccccaattatatataaaattaatttttaaaattaatttaatttaattttaaattttctatttttaatatatagataataataaaatactttttaataaaataagttgtaaaaaattataattatttaattatttatcaaatatatttatgttaatgtaattaaaaattttaaaagtaattttttaaaaaagttaaatggggtgggttgggtcgagtacgggaatttctcttatttgccccatcccatctcgcctcgtttaatttttttaatgagaaggatatgagaattattttaaataaatgggaatgggtgaaatgggggtgactcattctgaacccaccccgttgtcatccctagtaaggagaatgcatcttaattaagaaaaactacacacaaaatttatcatgcattgaataaaacacacccaaaatgaaaatattcatggaaaaaagaactttattgtatatgttaagaagtgtcccaaatttctaatgaacatagattccttttggtagagaagattgtatagcatatttcctaaattagtatatgttattataaaattagatttcctttataaaaaaaaaaaactactaagaataactttataaatattttaggtcgtaaaatgaaaatgttataagatggagatgggtttataaagaccatacgaagtggacacatatgtgagaaagaacgggagacacatgttagagcaaagagttcatggtttatggtataaatataaggaatataaaaacattgaatattttggaaatctaatagttgtatctagtttttgtcatttataataatatagtgacataattttctctcattcatggatgtaagtatggttgactaaactatgttaaacccttatattcctttgtatgaattgttttatttttgtgttcttcaacttaacatttttatattaaagcttccattgacacaacaaattggtatcagaacctaaattgaagatttctaaaaaggctaaagtgaatagagcacataagaggatgacaaaaaataattttagttgaaagtggagtcaattgttctctattagggatatgatacaaaaagtatgtattatggagagatgaaaaattaacacaatggaatttgatctttgtgaagatcgttgaaaagtatctcaaatttctaataagtataaattcatttttgtaaatgatattgtgtagaatatttcctaagttgatatatgttattataatattaaatttctttattgaataaataaaattattaagattgatcgagcttacttaaatcttgcttgatcttagaacatgacacataaacacttacttaaaaaacaaatgttgcacttgcatcgtcgactctttaaaaaaaaatagttaaagaaaaacaacaatttgaaaatttggttgattaatatccacttacaccctcaagtacataccttggtctctaaacattttaaacatcttgatctccattagacaaatagtataaagaatgatttgcaaaacttaagttagaagacactaaagaatttttgtttgaaactgttaatctaaataacattcacaatatccttaacaataacaaaacaaagtgctaagctagggttcaaatctaattgtagatagaaccagggattgaaaaatcggaaaatatcgccgatatttcgaagaaatatcggatatcgggcggcatcgaaacgataatcgtcaccgattatcgatcgacggaaaaatcggcaaaaaatcgacaaaatcgtcgatatatcggcgaaatatcggtgaagcaccgatttatcggagaaaaatcgcgagtggactgacgcgctgagcaatcggaggagaatttaaaaaaaatcgccgaaaatatcgccgatatttcggtatttttaccgatttttcggaaattttcccgatatttcctaccaatccagcccgcacacacaggatacaaaatctggctcaaaaatcgtggatttagggttcgtgaaatttaaatccaatggcacaacaacaaagagacccttaaaacagatccagaaatcacagggagcaaaagaaaagcaaattttttcgttttctttgggggtttttaatggattttctcggaaatcaaacgaggatgaattttcccggaaatcgaatgggggatggattttcttggaaatcaaacgggggttgcaaaaaaaaataatatcaattagtacctgcgaggattgagagtggcagaggaagataggtcctttttaggaactctctcggctggagggcaacttcagaaaaggggagagaaaaggggaattctctcggctggagcctggagggcaacttcaaaagtggtggcccttttaatttttagatttagtagaggtaaaaaaaaaaaccaaatcatgaacaattttcctctatccatataaataattataaattatcaaattttattttaattattaaataaattaatattaataaaaaaaagttgttactatatatttttaataaaattttaaaaattaaatctcaaataaaatatttatataaattaatttaattttcatttaaaatataataaaacatgttttaagaaaaatattttaaaatattttaaataaatattatcttcaacaaattgggtcatcttcatttaacaatataatgaaatcacatcgatattttccttaatataaggactattgtaatatcatatgtattatatttatgtataaattatttttattcaataaaatcaaatattttttaactcaattctaactctatatactttcaaaattcatatatattatttttaaaattcaaatatcgaatctaccaatatatctttgtttacgatatttttcttcttaattatatatatgtcaattacacttacaagataactttaaaatgtgcatttttacttattttatcattttttgaagttttttcaagcattcctattaattttaaataattttcactctatcgatatttgtgaaaaaatatccaccgatatttctccgatatttccgatatatccgtaaaatcgaagtaccgatatatccgtaaaaaccgatatttcaatccttggatagaactagtgaaaagttggttcatctcacaaaaatgtgaatgaaacgacgagtaagcctattactagttacgatgagaagatcttaatttgaagttttttttaatagtggcaaagctttttggtagttgttgtcaccaacaaccctccattattggctcgttggtaaggctatagctttttaagccctatttctagtgacacacctcccacacaagcaccaccaacaaaggagggatgggaaaagctatatgccaaaagacaatataaaagttttaaaattttaatattttacttaaatggtatttaaatgaatactaattttaaattattttaaactttatgtcatgaaaaaatacttatgatatatgcccaaatttgacatttaaaaaaacattttattaaacatcaatcttagaaagaagaaaaactttaattctattaacacatttacctaaaaataaattaattaatatacctaaaataccgtcctcaatattctcgttcacaccttccttcttcatcctttttatctcatttttttttctttttaacccctaaaaaaaaagtttaaagctaatttcaatattttataaattttctaatttgtaaattaatattatatttatactacttgaatatattttaagtttaaaatttatgaaaattttgacaattttttttttatataaaaatagttaaaaagaaattagaagtgttttagaacttagaagtgagaaattttggaaaaagtggaaaagagattaaaaagtaataatcaattttatataaaatcaaaagtatgtttggaagtataattctggacaccctccacaagtatattttgagatgcctcaagtgtcacacaatattgtttcagataatattaattttaagggtattttcgttattttaccaaagattatttctgagttagaaaattcttaatttagtagtatatatgtaaaggcgaaacctagaagtgagcataaacacgtggaaagcgatttgagggtagaaagaaagtgcatgagtccaacccgtcccaagtccgaactcccccacctctttcaactctcagctcacgagtcacaccaaccagaacttcactcccacgccactgattccaacagaaatctttttgttttcttttggcctttctctcccctcgtcacttctgtttccatcacatccaaaacgtggagcagataacttttcatatttatttttcaatttatatataattcatatttatttttccattatatacctatttttattatctcatcaagtgtaattaaaaatatttaataattattaactatattttatatcacttattatatgtaaggatagtaatgagataggttttttcgagtaaccatcttgttgtgcctcttatgggatgagtatgaaatttaagcaaatgggttgcaagtgagtttatgattttttttgtcgaacagtttgcatattgttttgtcccatctcgatagtatataatatttatttaatttaaattttatttttctatttttaatatatatatatatatatatatatataataaatactttttaataaaataatttataaaaattataatattttaattatttataaaatatatttattttaatgtaatgaaaaaaaatttcaaaaatttgaacgggattgagtggagtgggtatggaaaattcgcaactcatcctaaacccgaaccattgtgatcatgaattaataatagtgatctatgtatgataattgataaatccaaataatttttatttttccatatcatcacagtttataacatagtaaaaaaatgtcattcaagataataatatcagtctatccaaaaaacttaatcaaatgatgaaattggaatatatcaagtaggcccaaaaatcaagacaaacttgaacccatttagggaataagaataatcattatttccaaatggtagcccttaataaaaggaggaaaaataaaatttggaaaattagaaattttaaaggaatatgatttgataattaaaatgaaattgtgaatgtgtttattaatgatttctctaaaagattcacataagaaaatcctaggataaagcatgaacttttttatttctttagtcattgcatcacaaaaacagagagttaattaacgaagtaacagattcaaaaattcgtgcaactctctcacatatcaacagtctaaaagcacttgggtttgatggtttcaggctagctttaccaaaaatattggaaaataaatggaaattttgtatgtaaaatggttaaaactctctttttatagtgggcacatgctcaaagagataaataggacttttatcaccttaattcttaaatcagataacctataattctcaaatcactataggcctattggcttatgcaatgtctgttataaaataataactaaaatattagctaatagggtaaaatctctcttaaacaaaatactttctcctttgcaaagggcatctgctccaggtagacttattaatgataatgttcctctaactcataaaatcatgcatttgtttaaaaagaaaaaagacaaatcgagttatattgtgattaaacttgatatggaaaaaacatatgataggcttaaatgagattttattaggatagttttgtctaaattaggttttcacccccaaatggattgaatgggttatggaatgcatttccacaatgtcctactatctttgcaaccttcaagaggtattaggcaaggaggccatttatctccatacattttcattctttgcattgaaattttggatagtgaattagtaaaaaaatctaagaatcctaaaaatcatattgcaattccaactcatcgaaatgaacccaaaattcattttcttacgtttgcagatgaatgtatcatctttgctaaaacctcacaaaatgcttgttctaattttaatagatttttgcataatttttgtgccatgtttggccaaccaatgaattttcataagtcttcgggtcaaatttttaataatactcaaggggctaccaagagaatattagggaagctcttaacatccccttttctaatggcattaacaaatatattggttgtccactaatttaaggttgaatgaaaaggagcatatttttctgaagtgattctgaaatctcataaaaagttagcatcttggaaaactctttcctttcaagagttcttaaaatagttataataaaggctattttggtgagtttccctcttcatgttatgaattgttttaaactcacaaaaagaaataatgaatatatagatagaatcactatgaatttcttatggctaccaaatataaggtttaatgaagctagagggtttcctatggtagcttgggatgaggtttgtagacctaaatatggagaaggtctaggaattagaaggaatgaaaatgttaataaagccttaattactaagggtggagaatctttatggatgatgataacatttgggtcaagatcacgagaggtaaatatattaaaaacaacaactcttttagaatttcaaaaaatgaaggtgatttcattgtttggaaagaagttattaatcatataaaatatattggagttgacttaaaatattatataagaaatgatagaaaagtttgcttttggacaaactactaagtatatatgttgtctattatgtctttcgtggatgaaaataatttacattacatcaattgggatgccaaagtgcatgattttataaatgaggataccaatgaatgaaatctccaatctatttctacatttattctcttgaatgttttaacaaatattaacgaagttccaatcctttcatttccatttgaggataggattttgtagggtttctcttaagatggtaagtttacctttaagtcagcgacttgggtaatgagaaagcctttgatgcaccctagataaaaaaatgttgcattggatttggaagttaaatcttttaccaaaaataaaggttttcgtatgactggttattggagatgtccttcctacttgggagtttttaattgccagtaggttataaattacaaacatgtgtcatctttgcaaacaaaaaattaaaaatattgaccatatttttaaatattatcattttgttcaaggaatttgggatcatattaagtataattgccctacacctcttttttataaaggtgacttcctattttggcttgaaataatgtataaaaactataaaattaactgcaaaatttacaaacatcttatgaaaaaaattttcattatctcatggaatgtatgaatgcatataaatcaggttttatttaagaagatccaatccaacccttttctcatcattgagaaaacttttttaaccttccaaaaccttcgggattacatgatagactcttacattcaaattgaaggatgcaatgtccctcaaatggttgaaaaatagattcgttaaattcctctaattaataaaagatataaattaaattttgatgtttcaatgaaaaataataaaaaattttcaggatgggttattagagattataatggtaccataaaaatgactcatagcaaacatataggtagtgttttaataattattgtaaaatgtatgactttaaaagatgatatattgttgctaagaataatgagttttaaacctagagattaagagcgactcaaaaataattataaattattataataaaaaattaatatttttagttctattatattattaatgaaggatatttgaaaactatcttaataggtagtgttttaataattattgtaaaatgtatgactttaaaagattatatattgttgctaagaataatgagttttaaacctagagattaagagcgactcaaaaataattataaattattataataaaaaaataatatttttagttctattatattattaatgaaggatatttgaaaactatattaagatttatatatttactattgttgttttatttatagagaaataataaatttcttaattaggaaaaataattataatttaaaatcaattatttgatggtttttttttttttttttacgaaaattttaattttaaaaattagtccaactcatctttcgatcagttatatttgtaagtatcctaatctactttcattaaaaaaaaaaaaaacagcgaatcagatcgcggatccatcccacgtgctcattttccaattctgtgacgcattaatgagtgaaagctctaagcctatgagggacgaacacgtgggaaatgacagctagtgacttggaaataaacgaatgtaaaactatcactcaggaccggcgggtgattttatctttactattcttatttcaacggcattatcgatgttggtgaaagaatccttaatgacaaaggggacaccatgacgtcgtacagctgaattgggcccacaaccccatctcgaccgactttagcggctgcttcctaccgccacgtgtcttcaataatgcttcgtctcttcaaaacgcctcgtttttaaacgtcacccatcacagttcccactgaactgaacacttaacactttcctctttcagatctacatccactgttccatttcaagccctaaccc

SEQ ID NO: 12608 - DNA, 2540 bp, Vitis vinifera
  Intron number 1 from transcript GSVIVT01005837001 (locus G SVIVG01005837001) derived from phytozome v7.0 (chr-ID chrU n; pos 22168627 to 22171166)
ctctttcgcctccatcttctctcctagaagttggcgttccagatcaggccgccggacccaacttgaaggctgagacttgagacttggagtgggctctgccctcttcggtagttggtagtttggtagtgtacgtagagtagccaagatttccaagggtttgtagctagtgatgtatcatgtactgtataaactgaggttgcatacaatgggattttcaatttttattatgctttggccttcttcttcttctatgctttcatttattttagggaaacatatcaaatacacttagccactcccaatatcatcccatatgatcagctcttaaatgacctttcaattataaaagaggccttagccctttttttcacttttcttttttggttgcttttgtgggaattggtttgccactaattaatgctattgatatgtcttctatttcaataattgagctaaatttaatataatgattgcattgaaatgctgaataatttctattcaaagtatagttgagacataaccaccacactttcaaaaatcaattgagtaaccatttcaacacaccgaaaaataatgttcatcaaatttgtgcaagccaatgatatttagttggtgataagctaaaaacaggcttgactttcatcttctgcaagttgtgttgagtcgttttgacccgcactgtgataatattgttatttttgaatcttaacttttcttaaagcccatttaatagtaattttaggaagcgcttttagtttgaatttgtttttttctttaaaaaaaaagaaaaagatgtttgacacaatttaggaaatgcttttaaaaatataaaaaatcgcttgtagtattagaaaattgttttatagaaaaacacttttactaaaaacacttcaagtaaaaacaatattaaatgggcttttagttttcttttttatagattttgattgaagaaagactaagcgagcgtttgacaatgattttacaaaatatttttagtatttctaacacattaaaatttttattttcaaaatcttaaaaatattagaaatacttcttaaaatcactatcaaacgtattctaaataaaaattaaaatgatataagagcataagactcaagagaagttaaagcgaatattattggaatataagaacataatattgtgtattttcttcgtaaattcattattctctttatttgactttattgaaatcatttattctatcaagcttcttaatattaaattttattatgattttttgttaataacattagttttaataccaatttttttggtggaataccatgatcaagaacaagagcaaaaagaataaaaaaaaaaaaacacacaaagtaaataataatttaattcattttaaaccctacgtttagacaaaacttttattattgtttaagaacattacgatcttatcctttttcaaatctcaaaactctaataataaaaaataaaaaataaaaaatcttttcagattttatttaattattaaggatacatattgtcataagaaaatggcccacacaaatccttttttttttttttttttttggtgtgcccacgagatgtatacaaaatttaaaaattttaaattggatgaggttaggcggctatgactttgatgagaatccaatttccttagcccaacccactccaccctaggtttaggataggtacgaaatatattttgatcatcatgacaggtttagataaaggtaacattcaaaacaaagaccccaaaagcttattaactatttagcatttacaacaggagcatcacacttgtagtggaaaattggaaatgatatgaagttcaattttcaaatcccactcctaaagcacccaataacccttttccactacccatcttcttagtctctttataattgtttctcttcattgggtcttctggtttgcttcaaaaacaaccttaaaatctggtaaagcaattcaggatcttatgaaagatctggtaacttccatttatcatattataattagaaacacaatcgaagagcaattctatccggtgaaccttcgacttgattcaatgtacacaacgttaaaattttcaagcttactataattggatttgatcgtttatttgtttattgaatttgaggcggacagctcagctggcagcttcttttaatctttattctcaatggattgagacagcttcgctttgctttgtttggtggacaactggccatgagcatcatctctctttagtcatgagtcatggcccatgggccatggcactagacgtatgaaatataaaagcagaccccaaaaggaggaaaagggagaaggtcaaaatggtcagtgaacactgaacagtcaaaaaccacgtgcaggtatagttgtaattaatggagaaagcaagggtatttgagacctacttccctctgtatatataaccaacgccctttaacggttcaacccacaaccatcccactttcatactcacaaagcttgtttctttacactctcctcatcaacctttggatcttctgagaaaagcc

SEQ ID NO: 12609 - DNA, 5746 bp, Vitis vinifera
  Intron number 4 from transcript GSVIVT01036585001 (locus G SVIVG01036585001) derived from phytozome v7.0 (chr-ID chr1 3; pos 18626644 to 18632389)
cactgaaggaagagaaactacaaaggcttcaaaaggtgcataatgactgtttgttttgctcctgctatctttgtgtgcaaatttcttatcattgataagtttgtgtagcaaattacatacgagtttgattagttgctaattgctcaagagtcaaaatggtaagttcgagagaaattttttggtggaggggttgagattgcctaagagagaccctcaaactgtaatcatagtcactttggtaattggttttggaaatttcctagagaagatgaatcaatgtggtccttaaaactaaaaaagaaatgggattcgggttagtagttaggattctaacatgatttggaggacttccatctgtgcccttggaaacttttatccatgagtacctagtttcctttgtgatacaacatttgtcattggtaagggatctgtagttcccttttgagaggacccatatgggatgctccattttgggagtacttgcactgtgatagattctccattgtgagaggacctatgagaggatactcccttcatgatttcttttccccgtctttttagttttgtttgatagatagaggtgttgattatcgagtttgttaaatattttaatggtatttctgcctggaattttttcctttttaagaatcttaatgatagggttgagctataatttgataggtaatgggccaacaatgtattttaagctaacttctttgaaccaaatcccaaacattgcctcattagtagtcttctctaggcttttaggtgaaaataaatagggtaattaaatattaatgaggttcaaatacatgatctgtaaatcaaaactttgatactatacattaaactacttatttgataaaaaaagcttaagttgttaacttacattgtatatcatgtcaacttatttgggcccaagccctaacaaatattgaggttaattttcttatctcctttcatcaatctatgaagggctctaatcttgcctatccttcccaaaagagcgaatctagtgtcttgacaacaattattttttaaattattgggcacatgtccatatggaaggtggtagctacatcgtcacaattggattaagttaggaaggaggtcgttaaaattgggcacacttacttaaaaagaatgcgaatctttacagacaatttctttgaatattgaatgttagagctttgatgaggaagagaattcttaagtcatgtggagctctatgtagattttgcattgggaataatctttttgagtttgttttgattgtttttttcattttctttaccttctgatataatttttccctataattttcctagatgtcctgtttagatctaaattacctaatgcctctttgaagtctctctttccattgaagaatccttttgctatggtttttcatagtctccatttgttctaatggaaattaaaatcaagatcaaaataaatcattattgggagcatgctttaacttcacgtgttcttaattttctattgattattttggtctacgcatgtgatgttctcaatttttatttatttattttatttattttattttttaaagtatccaatgatgaggagatggagactggagagtgttgtcgttaaacaaatgtgcaatgtgtgtttcaatatttctatagaatcaatagcactattgggtaaaggtaaagtttgtaagacctctataaggcctacaaggtacaaaggctcaaatgaggatgtttaagtgcatcattttcaaacaaaaaggataaagttatagatatatatactcattagaagtcatagccagcccattgagaacatggcatgacaagtttacaatgagatgcttatgtaataaggttgttttcttagtgcaggttgtattatgaagttatgataataaggtttgatttcaattaaaacaaaattttgtaataatagtaagaagtgatttggttctgaagtcgagttaaggttatcctatgacttatgatttaacaaaaatggatttgtgtaagctatctaacaagttagggtgaaactttatttagctgattgaaactattatgataaattggtaaagtgaaatttcttacacagttggtaagtgtttgcattatgaagtatgttgcttatgttttcaacatataatatgacacgattacaataaagcttttgttcagttggtttgaaaatattaaaataaaatgggaagtgcacataaatactaagtgtttccttcatgaaacatgtttattttttcttgtacatatgttattgcttgatcttccaagttgtgttgttagtttggttttggccaaattttatatcattgttttgtgcttgtaaaaaatgaatagaaaaaattatatgttattaaaaattatagaaaaaatatcattggccaaatattaaaatattatatgttattcttatactaagttgtgttgcttgattttccttttctcatttgagaaggtctcttcttgctctttagttaaggtttgggaaagtgaaccatagaaaaaatttaccaattgcatagtctcaaatccattatgtgggcatgcatgaatcagttccttacacctttgccaaaattgataaaatctctctcatcttttggtgcaaaattcatcattttcttttgaatggtggttcttctaagaagagggaagtgtctttccaaaaatgtaacttgcatctcttgccatgttcttatgaaatggggagacatcagtgttagacctttgtcttttaatgggaatgaaaacatttttaactgaaataatctcaatgctacaattttggtcttggaatgttgcaaatagctccttaaattctcaaagacatacataaggatttatgttttttaaaacatggaattgagggagtagttgtctcatattgggtttgagattaaaattttgagcatttaactggaggaagatacaagaaggggcactagtccatggtggttgcaaatggtctcttaagtgtttggcccggtggctctctagtataattgtaacattcaattgaaaagaaaatatatcatatcatgtatttaagagtgaattaaaattttattatttaattttattcacatttaacagttatatattcaattattttattattttaaaattattgtaattttttagctatatagttttcattgtatttattatattagaagttaatatgtataacatttacttttattctaaagttttatgaataatattatttggaacttggaggcaagtagctaacataatctttattagtttaagtaatataacgaaacaaaagtgtgcttaatagttggctctcctttttttttacaagaaagttttaccatcaagtcccctctaattctagtcaaaaataaatttaagagccagctcagttctttcaacattagcttggttaattgatcaagcggttggatcagcgggccagttggttcgatgttgtccaacttgataaatggctcagtaaccaaactgaacgataaagttaaccttttgaaaacgttaatatgtgatgatggagcaaatttctatttattaaattttttagaaataccataataatctttatctttaataaatcatttaaaaaaaaatatacaatttccaaacataaaattcaattgcaccgcaataataattatttcttcttttaattctagtgttaaatgcagaagttaaacattatcccaaatagggctattgtattgtaattgatagtgaagaactttaaacttcaccgactatgtcatagtggccatccaattagcctaacatgtcttcacatagtgatctatgttcaactttctaatgaattgtaaaggaagtgacttaaaacaaattgattcaaaatggttatcatattagtgattaaaagaatactcaaattatacttcaatttgcttctcctttaggagaaaatcacttaaacaaaaattttcttccatggtgaatgattctttgtaaaacaaatatgtggcttatgagaatcaaccaaaggttgtggaatagttgatgtgactatgaatagccatttatcatcctcatcaaggtattcatcataggttggtggagaatctaagtcagagaaactattctgattatggttgccttccaaaatcatcttagtcttgcctaatttgtgacctttttccagggttttggctttgagatagcttggcatagcaagcatgcaatacaacacattgagtagcaacaaaatgcatcatcttctacaacttgttgattttcttagggaaaatactaagaactagccacctaaatccttgttgattccattgaattaaaaaaagaaaaaaagaaaaagaaaaaagaaacaagaacaaagaaggctgcctttttgctttgataaaattcttatgaaattttgaaaactaattttattgatagaaagtaataataatctcccctaagccctaactaaaaacaatgtaagaataagaaaaataaattgtaattataatgacctggtgtaaagatgatatgaaaataaatcagaaacctataaggttaatgttaacctaatatacattgtggggctatatccaaacggattaagttttaggaaagttgatggattaacatgttgtcagagctatggttaaatagaggttgagttctactctatggtactgtttattcttccatctacttatctgtgatctgtaaatgctgctaacagaacttttcatatgcagatgtggggtcacatggaaggaagggtgttagcctgatatacattttaagttcatatctaacaacttaggcttgtagggaagtttacaccttaacagataaaaaacctgataggtaggaaatctagataaaataggagcagttgttagttttgtattttacagtctccaatttcatgaaaaataacttgaaaggacagaggtggatttcagttactattacactttgaatacatgtgatagctactcatgaatcatgacattgttagtaatcatgacaaaagtttcccctaaccagtttgtaatgatgttaatcaatgaaaattattttcatttctcacctgaaattctgtcattttatacattcttggttgtggtatctattctttgttagcaggttctggagggaagctagtattgccatgaactcataaagtatgaaagtcgtggcgcctcttagatgaataaggagatccacatactggatagccagaacttcatatgatttgaacactttaagaaacttattcttgtaaactaaatgtagttatgaacttcacttttgttcacatggaacattttcgtagatcccacatttagtagtcagatttagcaatggtccctccttcctctcctctgcttgcctatctatccttttgcttttacttttactgtatctgctatcactcgctttcttacaacagcaatgttaagatactcctttatagtcctgtatttatgttgctataagacttgatttaccaaaagaactttcagcctctctcttgtctctagatagttaatattttgaatgcttgtccttgagctctgttttcatccgttaacctaaggtgatagaacagctgaataatttgatgccattgtatagcagatggagcttcttttttcttcctctaattggatatctgttacttttgtcaattttttgtttttgtttttcatttttgttagcttcaagatcttgggagcacgctt

SEQ ID NO: 12610 - DNA, 5814 bp, Vitis vinifera
  Intron number 3 from transcript GSVIVT01028889001 (locus G SVIVG01028889001) derived from phytozome v7.0 (chr-ID chr1 6; pos 17800583 to 17806396 reverse strand)
gaaaggttggagaaggataaggagtttctaatggaggtttaggtgttggactggtgttttatttttcataaaattgaacagaatatactgttctctcactttctctccgcactgtacaagtattgaaaattttcaaatatgatttgcttttctgaatttcctttaacttctttaatattttttattaaacaaataaatttattattttttaaaaaatatttaaactcaaaaattgatttaattaaactaaaaagtcataaaactcaaaaacacgaaaaagtcttaaatcaaaatttattttaaatggctaggttaatttattttatatatatatatatcatacttttacaatttttttaagtaaacaaataaacattaagtaagagttaatgtgtttgattcattaacgagtctagtaatttttaaagataacttaaaacttattatttctcttctacaaatatagttaaaattgcatatgaacaagggataccggttaagtctcatttatgcatttgcatgtttgattgacaatatcaataacatatctatcactacatatgcaattgatttcaaactttaaatcacaaacccaaataggtattcaactatttgccttaatcttatcattctccaaaatcttataaatattagggcacaacaacatctcccacttattcttacaagtcctccttgcattcgttgttcttatcccttatgtctcatagcatattcaatatcggcttctatcttgcttcaacaaaagttgaattaaatgaccctcacaaattatttagtaagagattacacttaaatgatgtatcgaaatgagatcttgactaatgaattattggcttggagcctaataagtcataaacatttacattttttctattaaaagtaggcataatagaagcgatggttgtttttcatattttgtctttcaatgctagtcctttgaacttttgtttaaaataacactttgattgaaatagacttggaaatatataagaaccatattttatttttatatttataaaatatagtatattatggatttcatgatattttttatgtgattttattttattttattttattttccttcacatttcttcggtaaagaaacatttgcaggaactttgagcacgccaatgaggagattgtcgtgggttaagcactttagtgtagatgatggtagaatcaatattttcataaatcataaataaaaaaataatatttgtttccttaataaaaataaaatattaataatatttgattttcttaatttaataattaatatttatttttatgatatttattattctttttttatataattaaaaataccaaaaaagaaaaagaaaatatggtgaattataagattcttcaacccgttattctagaactttcaaagtttcttgggtttctcgggaaactttttccatgcaacattataatgtcaaggtgggctaatccttcttgattttgacctgtattggtaaagggaacctgagaaataagacacccttgggccagttgatcaaacatgcctcagctatatatgtaaaggatttttgagtttacagtctgccaagctttgctgatccatggtgctgatttccagcgcacaaccgattatcgatgcccatctgccaaatcaggcaggactttgtggcggaggaagagaagaggtcgctggactcgacggaggaagggaggaaggttaggtcgccaattttcattgggaaactagaactataagatattcaaattttctcattggtttgcctttttctcccataccccatacaacccaaccatagaagacgcctcttatttttgtatatgagacttgtcggctttattgtaagaatcattgacaataagaacacacctaaattttaattcattgataataatgtattaatatagaaataaatatggcatggtcggtgcctcgagttatgtttgtcataaaactctagcacgacacatatgcattgaacttataacttgaccaaaatttacttttttaataattatcaatattggtttttttattcttaaaatatttttttatagttattattattattaaattaaataatgtataatcttttgattcgacctcttaaggattcaaatatggcaattatgtactcttatttgacttaatcaaggtccactaggtttaatctcaactcttttgcattaataattgagttgtattaaatatatatttgtaaagatactaatgattgtgctataaatacttgagaactaatgcactattttttaataaaaagacccaaaaaaaaaaagaagtagaaaatgtgagaatttgactcaattatgacatatgagattaagtaaaggtatgaatattacgcataaagatgccttatccagccattgggccaagctcacccttttttaaacatagtgcaccaagtatatatatatatataaagttatcatataaacaaaacattaaaggaatattttaaagaacaaattaattataattaaatgaaaatttttcatttgattgattaccaaaaatataaaaattatcattaatatattaattaaatattaaaaaattatatatatatatatcatcatttattttatattatttaatacaattgaattaaatgaatcataaatttaatattaaatatttaaaattaaacatattataatcaaatatcataatattattgttgaataatatttgatgtaatttaataataaatgtacacttataacagagttataattttatttctattaaaaccaaaagtattgtggaccccgcatttcggctcaatgcgtttcccattcgatggcgagctcgacttttatttgaaaaattgattttattgattaggaaaaatgacttggagtcgccacttatttttgttttatttttaaaagggtaaacaaaataagaaagaaaaaccctaagtgtgactccttatttggaaaaggtgatctacaaaaaaccggatcgggttcgggggtcaggttacttatcaggaaggtacggtaaaaaccgtagcacccttttaagtccctaaaaacgggtctctactaataaaatgaaacaatcagggcagtggacgagtagatcaatgagtacccagaataaatcatgcacacgtgagaatcaaaatatgcttggacaattaccagagtgaaagtaagtgcgtacctgggcgacgagccaccatgcgctatcaagagagaggttagtgcataattaagaaataatagcatgcatgtcggagagcaggataaataaattgtgcgtgacaaacaaatcaatcaatcataaaatcacgtatgtggggcccccaccaaagcccgattgatcttgcacgaattaatctcacaaattccattgttctgaaattatgaaaatgacattcatgcttatgtaaaaccaagaaaaattgagaaccggaatagaattaaaattgttcacgtgaaaattggatttttggaatttatttgaaaattggagttttgggaattaaatttgaaaattggaattttgggaattaaatttaagaattggaattttgggaattaaaaattaagttcaaaaattgaaattttgagaaaaaatgtttaagaatggaattttaagataaataagtaaatagaataataataatcataacaaaaaatagtaatgattaaataaatgaatgtgaatattaaaattttggaaattgaaaattaaatttgaaagtcgaaaaattagaatttcagaaattgggaattgaatttggaaatcagaatttgtttgaaagatttattttaagatgacattttagaaattaaatttggatattagaatttttgaaaaattaatttgaagattgaagtgattaaaaaaactgaaattttgaaagttgttttgagaattcaatttgtgaaaacgtgttcgccaaaaagcaaaagaaagaaaaatggacataaatattcaagcccaccaaaaagtcttctgccatgttatgatttccatgcaagaaaggaataataaaaaaatatatataaatggctttgagagctttactcaaagtaaaaaaataggcacgaacccaaatgccttgctagaaaaaaacaatttgaattaaaaacttttaaaaagcatcccactgtcttataatcccccagccgcccaattcttttctctctctacaaaaaaacaacgaattcctcatccccacagtgagcatgaagatcgaagactgtacctaagagagaaaaagagatgtgaagtttacaaaaaaaatcttacctgaaaggctcctcccaagcacagctttttttccgtctccttcagactgtctctatctccattttctttgtttttctcctctccagatatcaccctctcccctttcagctttggtttttttctttctaaaaatccggacctctactctcttcctctgaaaaaatctcttcttttccaaaacctccaatccttaatcgccagcctcaaaaaccctcaaaaaaaatcttcccccctttccttttctctttttccagatttcttccccctcaaatctcccgctacttcccgtcctctccatcacttccaatctcacccactctcctaaaaaaaataatattttccccctccctctccctgccaacaagggggtctacaagtatcaatcaagaaaatggtgtcattgtcaaggatcatgaaccatcttcaaattaacagagttattttatttttattttaacatgagaaaatagtttccctttgatctttcttagttttcaaagtttaattgtaaaatattttttaaggatataaggtaagttcatattttttatataaaatgtatttctacatataaaatacaagaaatatatccaaacaataactaaatttttagaggagatatagcgtgttgaggccataaccaatttcccatattttttatggcaagtaagaatggaatacgattttttaaaagtgaacaaataaaaaataaaattcttccattggacccggaaatgatatattggaagaatcttttgggtttctattgcaagaatggaatgcgatttttttaaagtgaacaaataaaaaataaaattcttccactggacccggaaatgatatattggaagaatcttttgggtcttctaagttcaagaatatagaacgatatttacttatattattgttgttctgggaactgcagaatctcaatggggtttcccagagtaagctgactgatatttacttagtgcatcacaatcagtgaacatggttctagacaaaactattcttttggactataggacattttaaagtatttaataaaatatacaattaaaattaataataatcaaaaagaaaaaaaattaagacataccactgaacacgaaatagggattactttaaaaaatttataacaagtaatcaaattacactgtccaataaacagaaaaccaaaaccctaattgccctatttggaagctgagaaaagtaagaaaataaacagataagattcataacttgcttccaatttttttccttgcaaccaaacagaggctatttctttttaccgtgaaattgggcaactacttcttctttccccctttaccagaaccagatttgcgtttaggtggtagcacgatttctccatatttgaggacaggaatttccataatctgtgatatttccccaaacttcttccggaacttctcgacttgatcagcgtccactagaagagcggagcggttcccgaggtagaaggggtggtttccagacca

SEQ ID NO: 12611 - DNA, 1053 bp, Vitis vinifera
  Intron number 8 from transcript GSVIVT01038127001 (locus G SVIVG01038127001) derived from phytozome v7.0 (chr-ID chr5 ; pos 23682884 to 23683936 reverse strand)
cttgctttcaacaggtactgctttgaatacacttcatatttgtactttgaactgattttaatctttactattttaaatgatcagtgctgcttttcccacagtttccttggggcatcccaacaccagtttttggggttaaccagtaactctcctaatgtcctgatgctcctcatgcttcacataagatatcactcgatgattctgctataaataaaatttcacacaaaatatcataggagtgtttcttcatttctgcctgtgtctctatcaactggaagagaattctcaataagtgcctgcccctcttccttcttgactggaataagaaatcaatatttgtagagcattaggtttatgataattagatgctttggtaaaagtcaattagcagttatcatcatttgggagtcatattttagctgatctattggggattcatcatttggatgctatggaacctttcctttattcaagcttgtgaatattaaagaatttaaacttggggagtcatcattaatgctaaatatagtaattaatacaaatatcaaaatattgaaagcaatttagccacttctctggatgggcacctttgcaaacaataaggttgttgagtcagttgggatcgtgcttggaagaaatgtctgtattctagcatgtagctggtgaaaatctttgttttgtttccatattcattggatatttgaaatgttctgaattttgactccagttgctttagggtgtcaaatgcatgaacttctctgctctctgtaaaccaaacttctacttttccaattcacatgttaggccatggtagcacgacggacaccttctctaatctgcagaatatgaaatgcaaatagaaaaatgaaaatgaagtaaaaattatggggtcaggatatgaaacgcaaaagccgaggtgaagggtacagaaagggataatgtttccgaggattcatataggtccagtttattactcccagaacttctgttgtttgttgattttagattacctaaaaaagtttgtttttgctttttattcctcagaggaagtca

SEQ ID NO: 12612 - DNA, 11931 bp, Vitis vinifera
  Intron number 2 from transcript GSVIVT01035228001 (locus G SVIVG01035228001) derived from phytozome v7.0 (chr-ID chr4 ; pos 10837141 to 10849071)
ttaccgcatcttgtacaaaaagcgaacccgtagaagtaagcaatatctgaagcatcttcactttattcgtgtgttagttgatattcaccttataaacttgaaaattggttattttattggtaattgaaagttgctcatatcatttggtttatttcttcgggtttgagacttatgaaatttagcataattggggctttcgattaagccctaatattgtagtctaattaaattggaagggaaaaataggaattgaattttgtgagaaagtgatggaaaggatataaattacataaattgtagtttgtttgatttatatggtggaacatgttcacatgattcgcaaaatattgtggtacaaactgtagcatttaatttattattggttacaccctcaggttttttttttttttttttccttttttgatatgcaaataagagtatatacataactacatgcatatatatatgtaactacttccggtatactgtgtatatgtatatataactaaagtagcaaacacagtataccggaagtagttacaccctagtcttctatatggccttatatggctatctcttccaaatcgttttgttgggtaggattattcgcttctttcttcattgttgaattgagttgcaaccatctttttcgctatgcccatgccgtcccccacccatcccaggtccagattgtgcaaaatatacatagctaccaccaggctatatgggcactttggtctcattttgccccaatgtaaggtaaagatcatatgttgcccgcccccctccctccactctttctctggctctgccactgtccttgtccatggccatggttgtggacccgcatttttcacgtgcgtccccactcgatcggcgagactcgctttttatttgtgaaaaattgatttttaaaaaaaaagttggagtcgccacttattttatttttattttaaagggaaaataaaacaagaaagaaaaaccctaaaatgtgactccatagttttggaaaaagcatgtctttgagaaacccgagtctaagtccggggatcaggttacttattgggaaggtacctttaaaaggtagcacccctctaagccccaaagaggtctctactgacaaagttaagggaagtgtggccattaatcaattaattataggtacctaagtaggctaggtgatttcaaatattgcatgcctaacaagaaaaccaaccataagagagagtcgaagtgcgtacctgaacggcttctcaagcgctatcatgaaacataagagattagtttggaaatatgacacatggtatgtatttttcatcaaagatgatcaaacaagcatcaaggcaatcaattatggcatcaatcatggtcatgtctcatgagaacatacacattcatagaattttagggttatggggtagaaaaggctaacctgattagcaagcatccacatctctatgggaaacaagaatatctcaacaatgaatataaagcagattcatgaatattatcaagcagaatctaaaatcaatatatcaagcaaacagtattgaagtgagtatcatgaatgtcgagcccccaccaaagccctaatcaatttcgcatgacttgattccataaattccattgcttggaatcatgaagtttgttcatgcttgttgaaaatcaagaaaatcatgaaaatagttaaaaatcaaagaaaacagtgaaagtgcatacctgaaataaagtgacagcaaattgcatgttaaaatttggattttgtacctaaatgcttctaaggaaccttagagaaaaccaaattcatttttgatagaaaaaggttttgaaatccggctttaagacgtataagatcataaaaaagaagaagaaacaataggaggagtacgatgtgaggcaaggcggccaagctggattaatgtctaggctgcttttgagactgagttacttaggttgcctgatggagtggagttcgggatagaaagacccaattcgttgccaaagtattcagtgatcagaagcatttccatttataagaaaacttggttcataagctcagatggattctccccaacgctggtcaaacactgaacataaagctcaaaattcttacttttctgtattgctattatttcctgcattctgtgctattttctcatcatcaaggcttgattcatcagctcctctagaatacatacccttgctgttgcctttttctgccttttcaatactttcagcttgctgcatcctcatgaattctccttatttctggaatctccatatctgacttctcagggccattttcttgaacatataagctcctcgttgctcattgttgttaatgctcttgtcttcactggtgaagttagcaagcaatgaaattctgggttttgcatcattttccagtatttttctggagagacacttgcagaggtcccacttgggcacctttctgaagtaaccttaaatagaggttcaaggagccctgcatccagcacctctgaaatatagtaacacacttgtgttggatcatgtacactaaagaatttaacacgacctgtaaacccttttgagtatatggcctgcttactgcaccatggcttaccgaacaatacagtaccaaaatgcataggctcaacacaaaaattcatcttcggtacgagacggatttgatcagtcgtatgtgccttcacatttgagctgtctaaaatttcagcttttggcgagctgcttgggggagtacttgaatgtggaagtgaaactaatatatcagccccaaacaatcttactaccatcagatacacaaggatttccattatctactggataaggaaagtgatgtttatttaaaagaacatatgaaactgataaattataattaccaccgagtcgtaccatatctggtcgctttgggatatccgggaaattaacctttttcttcctagtaaactgacaaaaggtctcatcctcatttccggttgctttactatcacagctataagatacttgctgcaacccagttacatgctcatcggacatggtatcaagattcaaatcaatatagaaactctaccccactttactttaatagcccttagttagaccttctttattcaaattttcacattcttgaacaacatcaagagcatcccctgctttattgagtgatcttgcaatatttaatgatatgtcctttgaatgggatttcaatatggagcttaaaaaggtgttgattgcgcagagtgtttcttgaagctgctgtagctgaattttctctccagtttctggtgtgggtttggtgcttatgtgaacccttagttcatcaagaagctgcccgtacagctcttgcaaagcttcatagggatccctactttctcttcaattatttcttcaaaatcacttcattattcttttttttttgagtgaaatgggagagaactcttccatgcttgtcttctccctgttatatctaaaagcctcaacgtaagtgggggacacctagcaatcacgaaccaataaggagcgtacactctaaagatttcctccagaagcgattgctctttttcatggttttgttctataatgatttgaacaatccttccagaaattgaacttcttaagcgcatcgttttacttggagctctgctaggatgggatataagaacggcttcatgtattggcaaccatcctctttgtggaaacagtgaaaagtacaagggatttctaatatcagcatcataaactcttacagttttttttccggaccaaatattcctctagagcatgcaatataatgtccacttgcttgcgtttcaaaaacagaaaattctgctgccatgagaaggaaattggttattgacaacggtgatttgaccacaagagtccaatcttgaataggatcagagcgaatgtcttttgcaatctctgtcgcttgtatgcccaagcaaagcatcctcaaatgttgtcttcaactcaaaagacttgagatcccgagcaagctgttctgcatttagtccctcatgtgcactgccttgtgactacaatggattgtgaaggagcttcagctcttatttttcaaagatttcaacaaatctgtgatatccaacttttagctggaaacagtggtactattctgatcacaagctaagatagttgctacaatatttacagcagcatcttcacggagattagactcgcatagctgcctgaacctacctggactgtaccaatctgttaagcagatactaagcctctcaaagtagaagaactcttctatgcttggtaatggatcccagtatatgaaatgaaacagagccttaaaaactgaagcttacaagtatacagattcagaatcttcttgcttgtaagtgcctctatgaaagccttcagcctctcgcatacttctgaataccaagtaccccatgactcagactttgacacgttcacaattccaaccagaatcccacatttgagtctccttgttattaaatgttgtcaacatatttccacttctgcgtaggttgattaatatgaatttcagcaagatattctatttccggatctaccttaagtcattatgaaggggattcggtattggagtgcgcatccacagcaggttcattaccattaggggaacaacttcctatagagaaatatggctgtttagattacagcaacatcgcttcctcgttacccaacacgtgaactgcaggaatcattcttagccaagccaatgaaacacttcttttctggtaaaaaaaaaaaaacaaaaatagtgcaggtatttgttgagcacgtattcatagatcaacattctttcttcttcaatatgacaatcccaaaagtccaacaaaatcgaggtgttggagcttggatgtcaaaataacttcatctttgtgttcttggagcctttgcgaatttcttgaactaattcaaaagctcaaatctgatgtagatctttctttgtacctttaataaaccctcagacattcattagatatccgtaccagatcaaatagctgttgccttgagtactgtgttgattattataaattgtacgaaaactgttcttgaagaatggttctcttcgcatttctttgaaagacgataactacgacttcagcaatactgcctgaaccttgtgtggacttatcaccaattccaatgatggaactgtccatcagtatccataatactttctctgctcttgggtgaaacctggataaagttcctcttgtagtgtaatgaaacaaggcaggcacttgtttctctcataactaatggctttttgacaactcccaacatgatctttctaacacctcttatcagctgttcaactggtgcattcctcaataagttctcgatactcaagtaccaaaatcttcaaaccagcatcagcattttcattaatgtgcaacctggtctgtacttcgaacactttcaatcttgagcaagcctctctaacatgacactgtcagcatctttagaaagtagcagcagccttcccaagtctatgcagaccttttcagataacatgtttaattcacaagcctcaaacatcaattgataccgatccagaattccatgacactccttcaacaccttttgaaatgacccttcacccgttagattcaaatagctcctttcgatgaacttaaccaccacacaaacaggcaaaaacttcgtactcttccttactcttcgtgactgagttatagtcaaaggtgatctcctcaccatctagttgtgttttctgattttatacaattactgtaggaagacgggtttctgccatcttctcgcatattggcttcagcacttgtatcaactatccagacatcttcggtcagtagatcatattgactatttcattactgtttccttcatactgcccatctaaagattcgctttggctagtttgaccatctccgaaaacgattcgattgcagtttctggtcaatcctcatgcaaataaccagacattaataaattccaagtggccatgtccgataggacatttcatcgaatagccgttgagcacttgaagccgcaccacatttaccatacacatccataggaacaatggacagcaagtgtggggttgtcccctgtttcagcaaatgaatttacatagaaacccagcattgtgtcctcctaggtctgtattttttatgagtgacacgttcagaaatctacaaatgacaaggaggaccgagcctgaaagagcttcaaatcctacaaccccaagaaggattccaatggatacaaaacgttggaagatgtagctccatgctgaatggaaccaccaaagaaattcccctattttataagcgtcaaccacaatataattcacaatccggccagagaagtcctccttaatgctgtcccggatgaagaagtcggtggtacattccctctcttcaccttatcaatgacagtgggctcaaagtcaacagatacagcaccggggacacgctttctaataccactgtgtcattccgagacttaccatcatgacccaatcattttctgcatttgtttttattgaaacatcaataggaccatgcactgactctcgtggtctcagctcaatagttataaactgaagctttcttccccttttggatttatttctgattctcgaattctctggagttactaagaacttggctttctttgctatccaaggactaatcacaactgacccaggagaatacccagtaggtgtgcaaactatcgtgcagcaagggatgggtgacagagaaatagaaaaagatgcgaaaagaaacaaagaaacaaaacaaaacaaaacagaggaaaggtgggcttagagtaaatcatcaagcaaagccacattccattgctttgtcaatgggctaaaaaaaaaataacaggtgaggatatcagaggaggagagaacgcttcttgaatatcaatatcaatgataatcccatacattagccattaacaatagagattaaaaaagattaaaaatagaaaccaaaaacagagcatgctcatgtttaaatatattcagcaagagaaacgatcagtcctaaacctccacaacaatcaataagacaatacccggacttgcagaataatatttaagatcatatagggatgagaggatgcgaatttggtgtgaccatacctggaagaaccaaccttttagaagtattgctcggcttcaagcgagatgagattgctttctgccagtccctctctctcttcttccctagaaaattatctagaaccaaaataagcctcctttttcctttcctttctccaatgcgtgctgaaagttttcttaaaaaaaatctcctttcctgctatcttccttcttctccctaccaaaactccaatacgtgctgcccccctcctcttcttttccttttctcacctatatatatatcatccctcaagacctaaatttgtttccaaaaaggagaattttcctatttcctttcttcttctcttctctttttttaaatcttccaatcaaaagcaatcttcccaatttcaaattcccctccaaaaccttccaaggagagtcccgccttccttaaactccaatggtaagtttccttgcaaaaacatgaaatttttgaagttaaataattgcatgaatagataaataagtaaataaattagaaaatggtaaaaataataaataaataaataagttaaggaaaataatataaagaggaagataaccaataaaaagtgaatgataatcataaaattaaaactaaaaacaaaataaataaataaataaataaaataaaataaaataaaataaaagtcttcgtaggcctagtgtgcctaaacgggcctaaggtgagactaagtaggcctagggtggtgcctaatgggccaagtgtatctaaaagctgtcctaaaaatgaacgaaaagtctaagtctaaattagggctgccaagagtcacaataaggggtcagataatctctcaaccaaaatctctgaggtggctcagaaaaggtaagtcgtacgagtagtaatgggccaccaaggagttactatggggcactgaaaacgaatttaaagacatgtgctaaagggacaaaattgagggtctacaatggtgttaacctcttatacttctacttgagttaattttattcattaatttgcttgtttccccatttataggagtgatttgtttgaggaacctgcattcatggcttttccattttcttataaagtgttttttcatgagtttgtattgatcccattggcccgtttgggattcgggctaactgctttattagaaacctagcagaaaaaactactttcagccttgaattggtttcagcttgtgaatagtttgtttaacactaaattgtagtatgacccttgaggcctagctctagtggcaaagggttggggtgggtttacaggagtttcgaagttcaagtcccaatggggacccaaaaaaacattaaattgtattatggtcccaatttaagttctttgcctttcattttctgaagtcactccactttattctcctttttttggagcccctttttagtaatggattggttcagttatagtgtagctgtaggaacataaagtagaagtgtacaaaatgatctttatgggggagattgtggcagttgttatgtgataacttgcagaaaagttaatccttttcttgtagtcttgtggtaggataaaggtatttcattagttatatagttgatttttcttcccactgctttgacggcaattataggatatgtgaaaattttctgacaaattaacccttttgtaatattgaggcaggctaaaggtgtttcttgagttacttgtacttggtttttgttctggttgctatgttggtgatatggacaaaaggttttaatgtgggaggtgggggccaaaggtgggggttgtgttgtaaagagatgaaggaagaatggcagcaaggcatttttatgatacttgctttcaaatagaaagacctgtcttctaaatcaaaattaattgcccctgtttgaacatgtttattataaaaataagtagcatcacgagggacaatcatgaaactgatcttgattgaggaaccaatcaatatcttgctcttagaccccaatcttgtctgttgcaaagaggggaattgctttcgtgcaaaagccatatctagtgaattggtccatatatggataagaggaatggaggcttgggtattagaagtttgtccaaccttaacaaggctctctccttgacaaatgttgttggagatttgttgctaagagggctccttttggaagaaggtgattatagggaagtatggggaggaaggaaggggatgacggtgaagaggagcaaggaagggtatgaagtggggagtgtggaagactatcagaagtgaggccttcaacagtagaaccggtttagtgtgggcaatgggtgaaggttgaaattttggaaggatagagggtgtgttaacctatctcttggagaggctttccttgagttgttttccatagctattgccaaagatgtatgggtagctgatgtgtgagagcaaaaaaaaatgaggagttttttgcaaacctcatttcactaggtacatccatgattgagagctagatggggtggaccttttttaggagattgcaagcactatcaatttgcaaggatgttgaagataaaatggtttaattgaacttgaaatgtggcaattttttagttaaatctctttacactttatctaatggaagaatagggacttttctttctagcattgtttggaatccttgtgacttgtcgaaagttggattttttttgcttggaaagctgtgtggggaatgatattaatgttgtatcagctcaaaaaggaggaaatggaagatgctgaacatgtggtatttgtgcaaaggagaagaaacggttgatcgcattctcctttgatgctcaaaagtagtcatcttgtgacatctaatttacactctttttggaataaagtgggtgatttagttctttgaaaagaatgctctaagttggcatggatcttttgtagggaaaaaagaggaagagagctgctttgtgtgtattcctcagctttagttggccttgcggctcaattgtttatgttgtgtatgcttttgtgtgcccatttgtatattgactatcaatatatatatagaagatgataggacaaaagtattggttgtgtaacatgacacaccgtcttgaaaatcagaagagtgagaatagtctaaggaaatgttgaatccttgtcctgtaaatggagtagaaggggttgacattgataatcatggaaatggagatttaggttgggtctaaatgtttctcttgtttgtaaactagagggagggagaaatggagggaggagggatggtggaagaggatctaaaaggtgtaagcatggtagcttttattttttattttttattttttttgacattgaactaggatattgccatgttgagaagaattctttagattttataggaaattttcttaagaagagaggatgatcacaaggtatgaatgacagatttgaagaaaatgatgcttaaattgaatttctattgcacagaaaggcttgaataactgcctctatggcagttgacttaaaaaggcatttttgtattcagtttcctccttcattaactacattttttccagcctttcagtttatattaatgtcactatgtatgtagtgaaagagtcatcagcaattagtttaatccaaaatgtgatgcattgtgtcatgttgcctactcttctacagggtgattgacctccttaatgttttgttcatgaattttgacagcatactaagtgaacttttgcttaatttgctcatgcaacatagccgacattcttggtagaggttgtcataatcttcttgcacatgctaacaattcaaatatgaattccttaaatcatttatttgcagctctattcgatgtgggcaccttgactatcatgtttatgaaaattccccttgaaaatggtgcttatcttttctattttaattgtgttctccttttctcttgctgcatttttctcctcttccttccagtcattccagttgacagtgagtgtgatttccaagatatgttaacaatattggcgagatgctgttggtgttgtatctgtaagaaagatgcgtcaagacgttagaccactggattttgcattgtttatttgaaccaattcagatttgtggttgcttctctttcagctatcagggttgtgttttaaaaatttatggtgtctatagagaaggtcagtggtgcgaaaagcagcctctttgagcttgttgtagacttattggaaagaacgtaatagagcttttgtggtggggtgggtatggagatctccgtgagcaggctttcgcatcagttttctagaattgtctgtgtttttgtgttttagcgggttgcagcaagttgcttttttaggtttggtcttgaaggcatgtagcttagttttccttttttgtctggttcgttccccctttctaggtgttctggtattgtgggggatgtatctggttagggactaatttcttggccccttcagtgggtgtttgtctatagagaacggatgctgattttctacaattaggaacttcctagcatgcagagtaagtatcccttgccttagtgtacaagagaggggagcaaaaaattgagagagcatgtgttattatggaatggttaagagctaggtagcacaagtgttgtgccttttggttttcttgcttgcctataattattcaaattgaaaaaaaggaaggaaaagagaaagggaacaattaatgggttgaatctaactcaattgttggtttggttggtttatttattagctctcacttatattataatcattgaacactactttctttaatttttttctacagttgtgcagt

SEQ ID NO: 12613 - DNA, 4386 bp, Vitis vinifera
  Intron number 9 from transcript GSVIVT01030624001 (locus G SVIVG01030624001) derived from phytozome v7.0 (chr-ID chr1 2; pos 7250373 to 7254758 reverse strand)
catttagagcacaaataaaggagctggcattcacggtaattctctcatttagattgcatgtataataaagaaagttgtttgagtgtgttcttaatcaatcattcttctattactgtgcttacactattacaaataattaattattgtatgtgctcttatctgtccagagagtattttaatagcttatgaatacattaaatcaacaccttgaactacaaatggttacttatttataaatctaaatcacgttatctatttttttgtctgggagtatgacttttcagttccaactattattcaaaatttctcatcccaaccgtttggggttgggagcacaatttcctccattttggccggtaaaaaggcactcttcttattaaagcataggattttaaactattttgccttctccctttcaagctccttgaagttgcactatgcagaacatttaaagttcactagtaaacagaatgtgctctgcattttatgctgttgaaaagaattataaataatatatagttaattttctgttaaaaatttaacataaaaaggtattttaaaagaaattagaaaataaattttcattataaattttgaaaatagaaaaatatttggaaatcaaaataatgattacttttataaaaaaaaatctatcaaacacaacggggaataaatattattttttttataaatcgaatccctcatgggtttttgatttataactcaatgggtaaaatagtaataagaaaatgattttaaaatattaaagtaggaataataaaccattgcacatggtattctttttttttttcttctctcactctctccctttcaattgggtaagcacaaccacatgcacatgcaaaactaactttcaaaggtatcttggtcctcccagatcagatcttagtcaacatagaattttctgtagttgtttcagtgccacaaagatgtttagtacaagttttttgagggaataaataatttatgctataactataattaaaaaaaaaagcaagtcatctttataaatttaacacatcaataaaacaccaaaattagatgcctattaaaaacacacacacaccaaaatcagatttaatctcaaagcataacaatggtaacaatgtaaaataagaaactttagagaaaaaaaaaattgattatgaaagataactgaaaatttaaagttggaagccacagtatgctcacattcataaatagagacaataacctagcaagagaaaattataagtgtaattggaagaaagtatgaaagaagaagagtaaactgagtgaataatctacaatctttgacaaatatatttctacatatctacatcatacatacatacatacatatatatatacatatatatatatatatatatatatatatatatatatatatatgtaatttagggaggatgagaaatccttgtcttgtaacttcattttttgtaatgaaaatgtgtttgctttttataaaaaaatagaatgtttcctttataatagcaggaaagtccctacaaagaatatatcttaatgagaaaatataaaaaatttattctatataagaaactaattgtttaattattaaagatacctacttcttccaaagaatatttttgtatacaaaaagtgtaaaacacttcgtacttttattagtaatatatttaatatatgtccttcagatggcttggttatctatattttcactagtatagatgaagcttgtgatggatcctatctctgatttattttattgtgatcttctccattctcagtaatattttcttactatagccaatcattatggttgttgcttttcagtaacaaactcataataaacaagttgggccctttgagtcttgctattttagataatataatagatcctaaaaaaattctctttttcaaaaatggaagtgaaaggaggtagaagatggtttggggtagaaaagaaattcttcatgatttggattaagctaatcaaaagattatagagcagtctctaaacttgtaggttgaagtttagctattgagatagaaattctagcccttttggaaaggttgttataggtgcaatttttaggtctctccaattttctagtaaaaggtgattatgttatcggtatatcatgtgtgacaaagaaagaaagaggacgagggaagtttaatggatggtttgccaaattattgatatttttttagagttaggatgttccttttcttgggctccttgcttaggcaaatcattcaacaaatgtgttagcaagacatagagttagacatatggtttcaaaaagcaaataagtggtacatctttatagttcgcttctccgttttggttaataggactcctattttcttttagagtactagaggtctaagatagggagatcctctatgcccatacttgttcatcatggttatgaaggggccctcctatatcttaacaaaactaaggaagggggtttcttggagggattcttaatttacaaaagaggaggtgaaggaactaagatgtcccacctgttatttgttgataatacgctcatcctttgtgatgtcaataaagagcatatggaacatttgtgctggtaattcatgtcatttgaggcaatcttgagtttaaaaatcaatttggagaaaagtgagttgatctcaatctagggatttgttaatgtggaggacattgccaatatggaggacctagctagggttttgggctgttgggtgggtactctccttacctgttacttcggtcttccattgggagcccactttagatctttctaactttgggatgcatttgaaatggcttgctatatggaagtgacattatctatcaaaatgtgaaaggctaactctaattaaaagcattctttctagcttgctaatgtaatttatgtctttattggtaatcttgacaaaggtaagcctagggttggaaaaaatacgaaggaatttcttttgggggggagtgcttttgtgaaaaaaactgcatttagtgaatgggccaatggtttgtatggacaagagaaatgatgacttgggtattagaagtttgtctaacattaacaagggtctcctcagttaatggtattggagattcactactaagagggactccttttagaagaaggtgattgcagggaagtatgggatggaggagagggaatggtactgaggagtgagggaagggtatggagtgggattgtggaaggctattagaagtgggtaggagaacttatatagtagaacctgttttatggttgacaatggactgagaatgaaattttggaagggtaaatggtatggtgacatacgtctcagagagactttccctatattgtttgtcatagctaatgtcgaagatgcatgggtagtcgaggtgtgggaataggaaggagaggaaagttattagaatccttgtttcacaagacaaatctatgattagaagttagatgtggtggaggctttctttaggagattgcaagtgctatcaatttgtagggatgtagaagataaaatggtttggttgaacttgaagtatgacaattttttagttaagtctctttactccttatatgatggaagaatggagactttctcttctagcattgtttagaatccttaggcccaattgaaagtcggcttttttgtttggaaagccatgtggggaaggatattgatgttggattagcttaaaaggaggggatggaagatgttgaaaaagctgttatttgtgtaaagaataagaagaaatggttgatcatgtccttcaccattcaagagtaatcttcttggaacaaagtgggtgatgtagtcctcaatgagacattccctcttgagctagcatggatcctttgtgggtaaaagaggaagaaagtttggagggctgtttctttgtgcttattttgaaccatatggaaagagagaaataggagagcatttgataataccaaaaatatagatcaagcatgccaacatgcctttatctataattttttgaagtgtattagaatttatatagatgtccatgatgaagtttattgattgattgaactctaagtagtgtgagggagctcttttttgtgtacccctcagctttagttggccttttggcaccgatatttacacagtgtatgattttgtgcacacttttgtgtaggcgctgttaatatattaatatttgcctacaaaaaatagcagattcttaacatgattaggtgttacatactaaaggaaacgttccacctttcatatgacttctttgatggatcttttttactaccatattctgcattattagatatttagtcctaataagtttgcatttttgcagtctcttaagctccttaaggaagccatcttttgcaa

SEQ ID NO: 12614 - DNA, 16276 bp, Vitis vinifera
  Intron number 3 from transcript GSVIVT01027954001 (locus G SVIVG01027954001) derived from phytozome v7.0 (chr-ID chr5 ; pos 10015039 to 10031314 reverse strand)
aagcagcagttgatttgtttcatcaacgatttggggtaaatttcacttgagcttaaaaatggatattgtgcataaagtttgtgaaacatggcacaaagttttccatctataattgttttccataatttttgttgtttttatttattattctataggctgcattaggtgttgcttgttggaaattggcaaaattccttgagtttgcaatcttacggattcagaaattgatctccttcagagattaatgtcctcccttagttctgtgcttttctctccttctttggcagattcaagaacgtggtctttgtcttcgctaggattttttttagtgaaatcttttttcttggccatgtcaaaagtctcaaatcctatcttgttccttccggccaagttcttgtggagttcaaaagcccccttaaaggttaaggccctcgcttggttagtagcacatgggaaggtaaacaccaatgataagttgcaattgagaagaccttacaaatccctctgtcctcaatggtgcattctttgcaaaggaaatggagagtcgattggccacctttttcttcattgtcctgttaccattggactttggcacaagttgttcaatctagcagggttggtttgggtccctccaaggagttttgaggacatgctagttattacttttaaaggcttggggaactcattaagaggcaagacactttggcaaatcgcttgccttaccttgatttggatggtgtggcaagagagaaacaataggatctttgaggtaaagggagaatggaagagatgttataggatttgattcggttctattcttttctatgggcttcttgtactgaagcttttagaggagtcccttctaagtgtgttacaattcaactggattgcggtttgcgcttcaaaagtttgaagaatgttggggtttctctttgtttttagagttttattgttgggagttttctcctttgttcagtttgtgtaggaaggacctctcatccttcccttggtttcttctctttcttttgtaacttttctttctcctgtatcttttcttctattaatatatttttcttcgtttttgataaaaaaaaataattggctaattttattttgtttttttataagtgatagctggtagaattgttgaagtattgttatggtaggacaattgtgtaagggctgaattataggagttattgtatatggtaggacaattgcataagggctaaattataggagtaattaggggttagaatatgctaatcatcttgtataaatgttattgtctctcgaataaaaaaagaataggttttatccgacttggtattagagccataatagtttctgggtttgttttctttctcttctttggtgtctttgccctttcctttctttaacgattcgtctgttgtgttgtgttaatcaactatgccagttcaatatgactgaacaatcttacaatcaaatattcctcaaaaacagcaaagattttcaagtagaagcattactagatgcaaattctaccattacaaacaatgcaggatcttctctaagtggtaagagcttgcattctacaaaggagcaatttaatcttccttgctcctggatcattaattcaggagctagtgatatatgaccaaagaagtttatgttttctcattttatatgccatgttctggaaaacaaaaggtgcaggtggcaaatggatctttcacccttgtaagtggtaaaggaaatatgtttttctcattaaaaattactctcctatatgacatgttcctaacatgtcttgcaatatattgtccattagtaaattgttgaaaaactagaattgctctgtagcttttttccaagtcattgtattttttaggatctcagtttgtggaagatgcttggcaatgctaagtcaaaaaatgatctttacctcctagataccaaggaattaagaaaaatccaagcttatcaaataaagagaaatttagtaaagggagtagaagaagacaattggataatgtgtatgagagattaggacacctaaatttcttttacttgcaaaggttattttctaaattgtgaatcaatttaaatcattccaaactcaagtgtgaagtatgtgagttggcaagaagtcatcatgttccttatcctttgagtaataaaaaaagtgagagttctttttctatattatccatactgatgtgtggtgatcctcatcggtaagttgtttctttggagctaggtggtttattagttttattgatgactacaataggaccacatgggtataccgctaaaaggaaaaatatgaaactattcccactgtcaaatattttgcatgatgatcttaaaacaatgttgtacacacatgaagttgattagatttgataatgagggggagtatttcaatgagaatctaggtgctttctttacacaaacaagtattattcatcaatctacttgtgttgatactccttaacaaaatgaggtggcaaaattgaagaatagacattttcttagaggtagctcaggcacttaaagttttttaggaatgttcccaaacaattttagggagatgccacccttgtggcagtctacttgataaacaaaatgcctttgaaagtccttgattcagaaactcctattggaacattgaaacaatatctttctcctataccatgtcttagatcactttctccaaaagtttttggctgtattgcttttgttaatatcccaaagcaaagaccaatctaaacttgaacctagagccattaaatgtattttcttacactacttccccacttaaaaggctacaaatgctatcacccatcttttggaataaaaagtttgttacaatggatgctaatttctttgaaaaacaaccttatcgtcagaaaactaatctttaggaggagaaattgcgattagaagatcatctcaagcttagttagtacctttgccaatgtcatcacttaggaaaataagaaaatattaggggaaaatgtgggtgggtaaggggatcaacaaaatattggagatggtaaaactgttgaaagtgatatcggtgtcgaccacccaacctgtcaaaggtaatttagagttacttgtctactcaagaagacatgaggaaactatgttagaacaatgctttgtatctcttgtacatggtcaatcatcaactatggaaggaggtatatcttatattccttcttttttttttttttttttttgataagtaaaagaagtatattaaacgaaaagaggaaacaccaaaaaccggtgccctctaagtatacagggagtatacacaccaccttccctaactaggagcctatccagtctacaaaacttacaagagaagaatgactctctgctagggaacccctgacccaaaaccaaagattacatacaaaagaatatttcaacctttgaagcgaaaggtcctcatccccaaacgctaacctatttctctctttccaaactgaccaaaaaatacataaaggcaccattttccaagccttcttgcgtctttttcccacaaaccctccattccacccaagaagggttgtcttcactgtacacgagagagtccaagatattccaaaaagagagaaaaggaggttccataggacctgcgtcttgacacaatgcagtagaagatgatccactatttcttcttcagatagacagagaaagcacctgtttgccaaagagaaccccctcctttgaagttgctcctgtgttaaaactttaccccaagaagcctcccaagcaaagaaagctaccttgggaggcactcttgccctccaaattctttcactagggaacaaagaaaggccccccggctccatcatagaataaagggatctaacagagaaagccccattatttgaagctgtccatatcactctatcttcctcctccctttgaaccctgaaagcttggatcttctgcaacaaccgctccaccaaatcaatctcccaatcgttaaacgcccttgcaaagagaagagtccaaccaatcccatcaccaacaggattccacacctccgaaacccaagcattcttcaacatggacatggaaaaaagagatgggaaggactcacaaagaggcccatcaccacaccacttgtctttccaaaatttcactctttgcccattacccaaatggaaagctaccctgccatcaaacaacccccacttcttcctaattgctttccaaagtcctactccatttcttcccatcacatcccgagtacaccagcccctctcctctacgccatacttgaggctaattacactcctccacaacgcatctctctcattagcaaacctccaattccacttacacaaaagggcgttattcatcaaagataaatttctcacccctagtccaccgtttcttttctccaagcataccaagttccatcttacaaggtgaggtttatgggctaaagttcccccaccccacagaaaatccctctgaattttctccaatctcaacctcacttttctaggcaaatgaaagagagacatcaaataaataggcatactggacatagtgcttctaattagggtgagtcttccccctttagatatgtactgcctcttccacatagcaagccttctatgaaaacgctcttcaaccccatcccacaccgccaaagagttgaaagctgccccaaggggcattcccaaataactagaagggatccttcccactttacaccccaactccaaagccaaaccctctatattcagcacccttccaactgggatcatctcactcttctctaagttaatcctcaaacccgagcacgcctcaaaccacatgagaagccaacttagataagtcatctcgtctgaagactcctcacaaaaaaccaacgtatcatccgcaaacaacaaatgcgatatatgcatcccctcacccctcccagcactcaccttccacccagataaatagcccccactaatagcccttctcatcatactactaaaaacctccatggagatcacaaacaaataaggggaaaggggatctccttgtcttagccccctcgtgctttggaaaaaaccggatggagacccattaactaacacggagaatttcactgtggagatacaccaatcaatccactttatccatctctctccaaaccccatctctttaagaacagccagcaaaaagctccagctaacacggtcataagccttctctatatccaacttgcataacacccctcccacattgtctttcaatcttgagtccacagccttgtttgcaatcagcactgcatccaaaatctgtctatgttcctccttattctactctcttgaatcctttcaatgctacacaagtgtttgatactgacctgaacaattcctatagctgtattgtacaaaaacattctctgtccaattttttgccttctcacaggataaacaacaaaaatatggtatttaccacttatttgaccttgggtttaattcccaaaaatatgcaaaaagctcctatttatcctaagtggaaggaaactataaatgaagaaaggaaagctctttacaagaatgacacatgggacattgtttatttgcttaaagggaagcgtctagttggatgtaagtgggtgtttaccatcaaatacaacactgatggttttatggacaaatataaagtgagatgagtgtccctaaaggatttacataaacctacaaggtttgactactaggaaatttttgcacttgttgcaaagatgaactccatcagaatcctactagctcttgatgctaatcgaaattgaccacttcaacaatttgatttcaagaacgctttcttgcatgagaatctagaagaagaggtcttcatggacttgcctcttagttttgagggatggtttgccaatggaaaagtgtgcaagttgaaaaaatcattctacgggttgatacaatctccaagggtgtggttagaaagatttgcttaagtcttttgtcaaatttggatactagcgaagtcaaggagtccataatttgttcatcatatatgaaagaggatgactattattattgtctgttgataatatcatagtcactagaaatgactaggagatgcataaattgaaagagaaattggctaaggaatttgagatcaaagatttgggaaagcttaggtattttcttagtattgacgtagcaagatcaatgataggaatctatgggtatgtttggaaatgttttcaaaagtagttttgagaacggttctttattgttttactgaataaaattttatttgggaactcaaatataaaaaacagtcttctcaacttattctccatgaaaatactatgtacttacatataatacaacagttttcaaagtattctttatattttcaattgttaacttaaaacaatattaaaaaaaaaattgaaaacacttaaaatttgttttaaaaaaccacttgtttttgttagaagtttgtccatgtgttttttgagttaaaaaattgttttttattttgaggaatagaaaactgttttcaagaacagtttccaaagagggtttatatatcttaattgaagtgtttcttgatttattaaatgaaatttaattgttagggtgtaatcctatagatacccttatggatcaaaatcataagtaagaagcgacaatggaaggagtaccaattgataaggcaagatatgaaagacttattggaaaattaatttatttgtctcacataaggccaaacattgcatatgttgtaagcataggatatgaatttatgcatgctcctttagaagaccacatggaaaccgtgatgaggatcttaaaatatgtaaaggctactctaggcaaaaggttgttattatctaaaaataatcacatgcatgtagaggcttatatcgatgctgactacagagggtcaatgattgatagaaggtccagttttggatattgtgcctttgtgggaggccatttggtgactatgtggggtaaaaagtaacaggttaagtgctatggttgaatttcgagctatgaccttaggtatttgctaactcatgtgtattaaaactttactaaagaaatgcaggtagagattgaaagatctatgaggttgtattgtgagaacaaaataacaataggcattgctcataatcccattcaatataataggatataacatattaaaatagatggacgttttatcaaaaagaagattgatttatcaataaatgaataattcattaatttattgatatatatatatatatacatatatttactaatttagagagtatattatgtttctattgtagagtacttatacatgtattctaaaaacaatggatgtggtcaaaagttaatacatagaaacctaaaagactccaaaaaaataagaaatgatgattaattatgaaagatagaaaactcttaagtaagaaatgtggtatcaaaacttaatgaaagataaaaaggtttcatatatatgatggtttggagaaagaattgaattcagaaaaatcaaggtaataaaaagttacttaataccattttgtgaattcttgtttgttatttttttatgtactttatccatcgttaattcatatttccttagggccttaaggatttataaaaaatttattatcttatacatttaacgagattattaatttagtacattggcctaagttgggaacaaaatattttattatttaagtgaggttaatttatcgaacatttatttatcaagattttactataaatatgaggttgcaaacttgaataataaaatgcctctccatggatggaaaactcgaagttctcctattcaaggatgaaaatatccgtttgacagatatatcagtaacttgatttacgaatatatccaagatatatcaggaaatattggtggatattttgatacaaaatatcagtggagtaaaaattgattaaaactcatgaaaatattggaaaacttctgaaaaatgatataagaagtaataatacatatactatacttgagatatgaagaaattgatatatgaatatgaaaaaaaaaaactaataaaaggagagaaacaatctcaagcactgcattttattcatctaccataaagccaataatttgcccttttaattctactaacttggcagataggaatagaactaacttcttaaaaaataggaagcaccctttattctctcacctgtttaaacgataaaaaacagtaagtatgctaacactctccctcaagctggactatacaaattaaacatgcctaacttgtctattaacttttcaaacaatggccttggaagtcctttggtgagaacatctgcagcttgttttgtagtaggtacgtaagtcatgcaaatagtaccatcctcgattttttccttgatgaaatacctatcaacttcaacatgcttcgtcctattatgatgaaccagattgtgtgagatgttgatggcaaccttattatcacagtaaattcttaaaggcagcttcaccattacctccaactcttctaaaagaatttttagccacaacacttcacaaattccatgagctaccaatctcaattctgcttcggcagtacttctaactacaattgtttgcttcttgcttctccatgttaccaaatttccctaaacaaaagtacaatatccggaagtagacttcctatcatcaatagttcttgcccagtcagcatccgtataagcttctatgcttcttttaccatttttcccaaagaaaagaccttgaccaagtgtttctttcaagtatttttaaatcatataaactgcctccatgggttcctcagttggagcatgcatgaattgactaacccaacttactgcaaaggcaatgtcacgcctagtgtgagatagataaataagctttcccaccagatgttgatatctcccacgatctattggattactagcctcctgtgtgttgatcttcacatttgaatcaactgatgtttctactggtttgcacccttacatcatccccggttaatatatatatatatatatatattttttttttttttttatggtcaggggttggggaaggcaaaagggatcatttagtgaggtgggatattgtgtgcagaccaaagacaatagggggtttgggtttggggaatatttcttggaggaacctcgctctactagggaaatggttatggaggtatcctagagagggttcagctctttggcatcaggtcattttaagcatttatggttcacactctaatggttgggatgctaacactgtagtcagatggtctcatcgctgtccttggaaggctattgctcaagtctttcaggagttttctttgattactcggtatgtggtaggaaacggggatagaattcggttctgggaagatttgtggcggggggaccaacctttgggaacccaatatccaagactattcagagtagtcgtggacaaaaacatttctatctcttcagttctcggtccatctcggcctttcttgtggaatttgaatttccgccgtaacctgtcagattctgagattgaggacttagaaggcctcatgcggtctcttgatgatttgtatctctctccttcggtcccagatgccagattatggcctttatcctcgtcagggcttttttcagtcaaatcattttttctagcattatctcaatcatctggatcttctcagaactttccttcaaagttcgtgtggaattctcaagttcctttcaaagtgaagtcctttgtctggttagtggcacacaagaaggtgaatactaatgatatgttacaagtgagaagaccctacaaagcccttagtcctgatatttgtatcctgtgcatgaagcacggggaatcagcagatcatctatttcatcattgttccttgacgattgggttgtggcacaggctatttcagttagctaagttggattgggtttccccaaggagcatatatgacatgatgtccatcaaatttaaaggcttcggtaattctaagagagggatagttttgtggcaagctgcgagcatagctctaattcgggttgtgtggtgggaaagaaacgcaaggatttttgaggataaagcaaggaattcagagtacctttgggactctatagttttccttgcttccctttgggccttctgttccaaggcatttaaggggattccccttaatgtgattcaactggattggatagcggtgtgtactccatagggattggtccttagtgggtgttcgtttgttttttgtgttttttcatgtaatttagttgtctttggttggaggatttctcatccttcttcttgtactccttttctatattaatatatatttgtatcgtttccaatcaaaaaaaatattatatcgtcaacatagactataagaatagtaattttgctattcttacgtctataaaacagggtatgatctacttgagcttggttgtaatcttgtctccgaattgctttggtgaagcgaccataccatgttcttggcgattgcttcaaaccatataaagccttctttaatctgcatactttaccatttttcctttctttatcaaatccaagaggcaactccatgtagacttcttcttccaagtctccatttaagaaggcgttttttacatcaagttgttgtagaggccattccaagtttgtagcaaatgacaataaaaaatgtacggtatttatctttgccaccagtgcaaatgtctcttgatagtcaatgccatacgtttgggtgtatcattttgcgacaaaccaagccttgtaccgctcaattgatccatcaactttatacttaatactgaacacccatttacatcccactagcaccttttcttttggtttcggcacaacctcccacgtaccatttttttcaagagcatgcatctcatctctgattgcttttctccaatttggattctcccatgccaatgaatattattcagaattttcatgacagccaagttggaaactagagcttgaatagagtcagacaaatgttcataagtaacaaagttggatatgggatgctgtgtacaggaccaactccttttctcactttggaatgttttggtcagactgttttgtttccatacctgattccgggttggattcttggctgtgagaagcatctggtatttccatattttttgaatgtttctttcgtgagtaggatatctcaattggctgtagctgtcctcgccttgtcgattgaagctccttgattgtaggcatcggatttgaaatttgaattaatggattgattggcagatttgaattttgaattggtggactgatatttgaatttgaatttggagtttctccaagagaaaattcaggtgaattttgaatttgaattggcagatttgtgatcagatttttagtggatggacctggacagcattcagttgaaatttgaatttgaatttgaattggctgagttgtggctggattttcagttgacaaatctggacagatttgaattggaaaaactgactctgaattgacagaatttgttggacgaaaatcaggagaaaattcccaaaaatactctcataaccccaagtttgaatttgaatcagcactagaagacgaattcaaagaatcccaaaaaaatatctgctgcatgtatattctccccttgaagatagtttttggtaaaaaacagttggttttcaaaaaatgtaacatccctagacacaaaatactttcttttttttctggtgaataacaccaataacccttttgtgtagttgaatacccgagaaaaatacacttataagaatgaggatcaagtttgctttagtttggatcgagattatggacaaaagaagtacaacaaaaaattttaaagtccaagtttgaaaaataccgtgaatctgggtatgactcagaaagacaatttgatggtgtttggaacttcagaacatgagatggcatccgatttcttaaataacatgcagttaacacaacatctgtaacatcccacattggataggggggaaagttcctaacgctatataagtatggacttctattaaccctgtagacatgttttaaagctgtgtgaacccttttgtgtccaaagcggacaatatctacacggttgggagcgggtcattacaaatggtatcagagtcgatctctgaccttagtgtggggatttgtttggccccgcaatcccatgggacacaacgaggacgttgtgtctgcattgggggggggtttgtaacatctcacatcaaataagggggaaagtttctgacgctatataagtatgaatttctcttagccctgtagacgcgttttaaagtcgtgagggcccctttgggtcaaaagtggacaatatctacacggttgggagcgggtcgttatagcattccccaaaaaacgtgttgaaacattggatgtgaatagtaaagaacgagcaacctctaaaagatggtggttttttctttaagaaataccgttttgctatggtgtgctaacacaagagctgtgatgtataattccatgttttatgagaaaatccccaaggatcgaactaaaatattctgtaccattatcggtatggatcattttaatactttcattgtattaggtttttatcattgaatgaaaattttgaaaaacaatcccaactttagatttttcctttaaaagatacacccaacaaacatgtgtgtgatcatttgtgaaagtaacaaccatcttttattggtaagacttaaaatgtgtgaaggtccccaaatatcactgtaaatcaatatgaaaggtttcaaagcacaatatggttgggaaggaaagaaaacacgtttatgcttagctaactgacacacttcacattgaaatgaataatgtttttgaaataatgaaggaaaatatttcaaataaacaaaacttagatgtcctagtcaacaatgcaataacattatttgttgagatctagaaagagaagaatttcctacagtcaattgaacatgaccacccatagaagatgcactctcaaaatggtaaagaccatcaaattccctagcactgccaatcctcttcctcgaaatctggtcctagaaaacacaaacagaatgagagaaatttactacacaattcaaatcctttgtaattttgctaattgacaaaagattgcatgacaagttaagcacatgaaggactgcctgaaggctaatattaggattgattttaacaactccaacaccagcaacaactgaaaaagaaccatccgcaatttttacttgatgattaccaagactcggtgcatatgtcgtgaacattgttcacatctagtcatatcgtctgttgccccacaatcaatgatccacctttttccgtaagaccaccaaacgcagtcataatgataccattttttgccataagtgatgttgaggacgacgatgaagcaaataatatctttcgaatttgctctaattgctcttcagagaaaacagtggatatttcagaggtagcctttgtcttagattcaatcatcacctaaaatcctttaccatcatggccatgagatcggcttggagtccagtgggtttgccatgcaatttccaacaggtatctttggtgtggtttggtttctgacaatggtcacaccattttttattccctctggactcagcacggttatttgaaccacgagcagccaatgttgaggtttcaatggtcgaaattgttgagcctcctagcgtaacacgtcgacgacactcctcacgtcttatttcaacaaaaatctcttcaatttgaggcaatggtttgatccccaatagtcttcctctaacatcatccaaccctttattgaggccagcaagaaaatcatatatccgatcactctccaccatatttcgatatagtatagcatcatctgggtctttccatgctggcgagttgaaaagatccaattcctgccatagtttggtcaaatcaatgtagtattgagtcacatcatactcctcttgcctcagatttctagttttattgcggagctcaaacatttgagatgaactctcaagctctgagtaagctaatgtcaccgcgtcccaaatccttttagccttgggaatgaggatatacgtattagcaatgttatcttccatggaatgaattaaccaagccatgaccattgaattttgagcctcccaacttggataggaaggatcatttgtgcttggttttttaattgtgccatccaaatagcctagttctgataccatgaaaaaaaaactaataaaaggatagaaacaatctcaagcactgcattttattcatcaaaaccataaaaccaacaatttgcaatgatctgcccttttaattatactattctactaaattggcagataagaataaaaactaacttcctaaaaaataggaagcacccttcattctctcatctgcctaaacaataaaaaacaataagtatgctaacataataatataatttatgatattttataataataaaaggtgatatttgaaaatgcattttaatgctaaaatgataattttttgaatttgaaaataaatttaatactaaaatgataatttatctactttataatatatgtataattattatatttgtatttaattcatgatttttggatttctataataaattaattagaatttgaaaataaataattaaaattgatgtatttattaaaccttattttaatattttatttttacaatatataaaatgtaggccataatattaagtgaaagcatgttagcccagtggtgcatgggttgatttttgaacttgaaagaccaagttcaaacctcctggccagcattttgctggctttgaccgttttgacccactgaaaaatctttgacctgtgctttgacccaccaaaaaatgattttgtatatatcctgattttttaaatcttccaaaactttgtataacatttgcataggaaaatagttttatataccatatttttcatcatttgaacttgaacccccatcccataatattgagaaggttggtcataaaccatgtaataaggtgataaatgttaaccacatttgatgagtcactatgttgagtctttatagtcatggactcaattgaacttcaatatgaaactcatattaaaattaaactaataatttaaattattcaaaaaacttcaaccaaagtcccaaaattataaaattttgagagaaataaaaaataaaattagaacaatataaaatgaaagaggctttcaattgaattgtggatgaaatggaatgagaatgaggtattgataggagttttactctacacagtttcttttgtgttcgatgaattaacagtgtatccttatgaattagaagtgtgtagaagatggctgctaacttctgttttagagtgtgtgggtttccactaaggaacaggcctcatctgtccacccaagctggaattgactttgataatttctgattgtattctgtgtggtcatccacattcttcactttcaaattgttaatggtgctggagactgaccaaatttcaattattgatccattatactacattgagcccctcatgagtgcaagccctttaattctacaactggcattttaacttgtgaacttgatgagttggaaaacatttttgatgtggaacactggtggccagtagacatggcatagatgtcctgatgtggcaatggggctgggtttcctcatggagagagagagagagagagagagaatgtgaatatttgtttgcatgctcattagggtgcattggcgcacacacatttaggatcccataattgaatttctgatggaaagttaataaattgactgggtccatcagtcccaatgattttgaacttattgttttttttttaagtcaaaatctcagtgtggttacaagcttttacaaagtcagttttttccaaagggatccattagacttttcctctttatctgtgttgttaaagggagacaagttaatattcctctgtacaagaatggactttattatagccaatcactgccacaaatgttcatgtcctaggagtgtcacagcatgaacgctgctttttagaagtttctgtgctactcagtgaattattttatctatttgaacattatcctttgttgttttccattggtattcacttgtacacagcatagttctttcctctcaaattggtctttttaaaatcttttccatgtgaatattagattttgatatttattgtaataactgtcattctag

SEQ ID NO: 12615 - DNA, 1223 bp, Vitis vinifera
  Intron number 2 from transcript GSVIVT01036385001 (locus G SVIVG01036385001) derived from phytozome v7.0 (chr-ID chr1 8_random; pos 4502171 to 4503393 reverse strand)
actacttgctgaacccaaagaaggtatgggctggttgagtctactttcttaaagactcatttggaatttttattagaattatatctgccaacataattttatgtatcatgcattcatgttatcgaaaagccaaaattatttattttgggtctaaaaatgcacagcatcttgtagaagttttctactaattataatttagagttcttcaatgttgttatgatatcagtatcatgatattaatggaatccaggattataaatgggaactgttcatgttgctattattgtggtgattaggctgtggactcactttctgtgggaagtgaacttggaatgtgagaggtttctggttgtaggttatatcgagtctttgttacaatatatgtggatacaccatttgtcttatctctatattcatagacataaatcccatgtagcctttaactaggaatctcatattggatttacatcaaagatgacagaacagttatgatgcattgtgaggctataaaatccctagtcatttggacaattagcatgcaagtaattgagttaaaggtttttgaggtcgaaaaaatggtattagttcaattacagtaagaactattttcatactatttttagggttaggaagattatatgtactatatatcaaaagtttggggattattttttctttagtttcaaaataagtgttttgagtgctgatgatacctttctttctttctttctttctctctctctctctctctctctctctcttttttaaaatttttttaacctatcaaaaaaaaagtaatcaatactcagaatacttatttgcatgggtttgcctatacatttttcattgccggtattgtagaatgatggtcaacttgcatgaggttcatgtatttgttacaaggattgagaacaaacaactatgtagacaatattatgatgactacttctacaaaaataaaatgaatttgaatcttgctcagctgcgagaaaagtgagatttttgtgtttatcccggaaggcatttggatgatgatcagaaataagataattctgcattgaacttggtaactacaaactacagtggatacaacacaaaccgaaggataagaaatccttttacaaagctggaatttgtctttttcaggttacttccttttccttgttttctgtaactaataactttgtaaaatttattttatgcagtacattcctggaacaaag

SEQ ID NO: 12616 - DNA, 886 bp, Vitis vinifera
  Intron number 3 from transcript GSVIVT01020599001 (locus G SVIVG01020599001) derived from phytozome v7.0 (chr-ID chr1 2; pos 3942967 to 3943852 reverse strand)
gctttgctgttcaaggtactgcttatcgaattacttgtctgtgaatatgtttatctattgaattgctttatgtttgtgtttgggtctttgagcaatatgattggaacataactgttcggaaagcttctcctaacgacaagcgagtgaaattgggagctatagagctacaaactgaagtaggataattgcaggaaatttgtatctatcctatgtgcctatctgtatgtttaatggttaatatttcatgccatacttatctggtgcctggggtttgagggggcttatggcccagatagggccctcgtgaggaaggcaagaaatattcatttagtgggccccaagcagtttgaattaaagtttcttgagttgagtttccatgagtgtgttttaaatgttagaatggattttattattttgattgggttttatagcacaattttgttcatatgaatgatatgttttctcctgattattttattcttaagagtatttgttatgaagaaatatttctctatattctgtgtaggtgtttatacccaacccaaagacgggggaagaaatcttggctcccactttattagcatacgtgctcactctgactctcttcttattttaaactgaagattttggttagctacaaataataaaaacttttcaatgtcacaatatagtttacaacagcaaaatattctaccttttggcattctgataagtggattagtttttattctttgtgtgttgtcaaatcctagtttgaactgcaatgatgtaaatattactttttctttttgcttcttgttagtatgttgtcatttctctctccgtcattacttttgtgtttttcatgttaggatccaagcaagctttcagcttaccgggacaaaag

SEQ ID NO: 12617 - DNA, 2585 bp, Vitis vinifera
  Intron number 5 from transcript GSVIVT01032460001 (locus G SVIVG01032460001) derived from phytozome v7.0 (chr-ID chr1 4; pos 27641604 to 27644188 reverse strand)
ctcaggtgtgtgctcatcctttttcacattaagttcaattgattgtcattgacggtggggcttcgactctttgcatgtgccttttgtagatggacccaatacccatagttgttaactcatagaacttaccgtatattgttttctatttttttgtattgagtatcccatcatatcgtatatagtaagtttttttatataatgaaaaataaatagaaaaaaatatgtatatgtatgcatatctattgaaaacatgaaagcataaaataatatataaccaattttacaaaatatatttggatctaaagagttcaactacgttcaagttaacaaaatatgactttaatatacaaattcatcacataatccacaaaaaaacacctccctagttgatcaaaagaaatttccacttatgactttaatatatagattcatcacacaatccacaaaaataaactttttcaatttttagctatatgatttttagttccaaattctaattaggcttatgcacttattgtgttgttgatctatatatatatatatatatgatggtgattagtgaataagatttttaatttgaagaatatatattaaagttagactttttttagtattaatttcttttttggtggtgaaagaatgatgatagacatcataaagaaattaatattaaaaaatgtccaactcatagttttaaaaggctcaaggcgcactaaggtgcaaagtagtcctggagcctgaggtgcaaggcgcacctaaggcgtgggctttagtgaagtgaagcgcaccctaatttacatattattttcctctatttttcctctatttttcctctatctttcctccttttcttcgtcttcttcacttctccactgcacggttgaggctagggcaaaatttgggagagttgttgggttgaaaacaaccagaaaagggggctggaagggaaaacagggccaaaacgacgtcgttttggccccaaaaaattaaaaaagaaattagagcttttctctgccctctgcaacctgaggccggagaagaagaaggagaaggaggtaggggatcgagacacacctatggaccgcgtcgcgccttgcgcacctaagcggcgccttcgtgaaggggcgttgcgccgcccagagcctaggcacgcctttcacaactatggtccgactttaatacacatttcaaattaaaaaatttattcactaatcaccatcatatatatatatatatatatatgtatgtatatatatattcttcaaagttccaacattatcatgtttgtcatcattctttccccatcaaaaaagaaattaatattaaaaaaagtcttgactttaatatatattcttcaaattaaaatttttattcactaatcaccatcattttcaatgtcaacattcaaactatttgaatgaaaattcttcaatattcattgtataagtaaacttacttgacaattaaggactggtgaggttttttggctttatttcttcttgtatgcgaggtcttacctgccttgtatactccctgtatgttttgtgacttttttgcctcttgttaaacaattcttgtttatctatcaaaaaaaaaaaaaagtaaacttgacttctaatttaacatttgaaaacaagaatgtagcttttcaataagattatttaacctatatcgtatcgttatatcatatcatgtatcgtaagtttttaacaactatgggtgtacctatggctttatgtgtcttatagttgaggacttctttgatgttgttgcttcacagataaggatgaatatatttgcattttaactctgttttgatggtcattggaattctgcacagtaatccacagaattgagtaaatttcttttgtttaaggtagttttggcagccaattacccatctacagaagattggtgcttcagacctgatcaaacattagttgctacctatgggagggaccccagtggtacccactctcgttctctcacttgaatgatatgttgttggttctctgaaccccaatgtgaggattttgcacacagagaccagtgtcacaatagtttgcaaatttgtgaaaggccctgagttatagtgattcatctagtttgtagaatgccactttcaaaaaaattcatgtaatggatatgtggatatagatatagataacatcacctgccccatgactgcagagaaaccggattgaatgatttgttgatgcctgaattgaagaaaactggaaaaatgaatttgtcattttacatggttgaatagtgtgtgaaaactgttcctggtttcttgctgggtttttttagtattggctctccaatatttttcagccttttttttggtctttgatgagttctcaaaaatcataactttttcatgtttggatgatttttgaatcccagaagtcaccatggtatgaaaatattggacatatgttttttattctatcaacgaagagtgattatagattaaatgttactccaggtgtctattggtcacttggggcgttcttgttagtgaccaaactgggatttatccattcctgatttatttggtctgcaggtagaaagacacttga

SEQ ID NO: 12618 - DNA, 2949 bp, Vitis vinifera
  Intron number 1 from transcript GSVIVT01033339001 (locus G SVIVG01033339001) derived from phytozome v7.0 (chr-ID chr8 ; pos 21361313 to 21364261)
gtcagtcttccacaaacgagaggagcctgtacgaggtatgtgaaaatgtttccgatccccattttcatggtaggagatttcattacttgttgactggtgtttgggatttttttttaaattttttttagggttttggatgatcgtctttcttgatctggacttttttttttaagattattttattttttgtaactggtaatatcaaaatgtatggttgaaatttgttaatgaatgaacagatgcataagacaactttcctgggttaggtgcgacagttagtggtttgattgcaaaaggggtcgatccaagtgagtatgagtagcgtacacagctcataaaagaaagagaaaacattttagtgagggcaaatttaattcggaaaatccacaatcataaattcattaaataaaatcacgggatcctaatgaccaaaagaaacaagggtttcagaatgaagtttcttagggtttagtgccgttttggcaggaagttgtggaacttatttaagggagtttcattaccaactcttgggagctggtttttgaaggtattcctatttcgccaattctttgtgactggaaaggggttttattttttattttattttatttttatattttttgtgttgcatgcgatcccttcattttgtatgctttttaacccttaatcaaatccaactccagcaaggctatcgatttgtagaaaatcctggccggtttggagttagggttttgaaatagtggagtggttcattcatcaagcaaacacaaagcataaataatgcctgctttttttgcaaaatagtaaatggcacactacagaatttgtttttagatgaatattttggggaattagtcattttccatctaaaggattataggagctgcttacccttcaattattcaataattgaaggccactcagagtgggattaactaagccacaagaagttgatgtcttgtggtaactattattctgtggaaggcaattgcagtgctttgattatggattaagaattttagcaaagtggacagctggtctttccaataccttggttggactccttttctggattcctgggacagaatctctcccaatgtgggctgatcttgcttgtaggttgccataggtggttagatgctgccttccagttttggtgttgctttcatttgacctttgcatggctatgcgtatttgttcctatcttctgatgcaaattattctcattggaatcatgtctccgttccctgcaagggggggaaaatgcctgctgtgaaacatgccatttattgtggttgctgattagattcaatggtgtcgttgttttgcatggttccagacatttatctggtgacactgatttaccctggactgagagcaataaaatatcccatgctgttgatccaagtggagggcattttacagaaaatcttctcacatggtacttggacagagcacttgaatgtgttctcttgcagaggatatttcttcttgcattgcctgtttgtctatgcctttccattcttaaatgataaagggtacaagcttcaaaagggttgctttggccctgtttagaaaggatttttattttttggaaggggtggggatgtgtgggtgttatgatgtatgatgagaaaacaagagcttctagaaggtaaatccagtttcaactcttgaaattctttaggcttaaatcctgattcatttcaagctctctagttctatattttggagttaaattggtataattagcctttgattggtattttgataattctagtttaaatcccttgtatcaaatgccaaattatgatcagcagagtagttcctgcatgtctacccttgtttagatcaatttcatatatggcttaacatgtttaatctcactctagcaaataattattattttttttataagcaaaaatgcatataaattaaaacatgccaaaaggatgcaccacagtacacaggatgtatacaaatattgcctaaaagcacaagaaacaagagagaacacaaaaaacaataccctctcttaacaagaaactaaccattctacaaaatctatgtctatgtatatctttacccaattaaacaaattactaaatattgatccaaaggctcttttccttccaaacagttcaaaaaatagacaaaggagctgctctccaaaccttattatcccttttacctgcaaaggaactaggccatcccaggagagcctccttaacgatagcaacttccacccattggattctgaaaagagcaaacagcacctgccaaaggaccctgtcttagcacatagtaatgatcttatgactgttgtaaatctattgtggtttgaggctaagttgctgattttaatttctcatctgcgattccttatctcaagtttcatatccaagctccatgttactcccttttttaatgtggaatcagtaggttagtgttcttgattttactgggtctttagaagattgttttggcttggtttagttttcatgtttgtcttttctaatagctgctattctttgtttggttctaccatcaagaatccttgggaagatgatgttgatgcatgaaagttaactacactacattaaaaacataattaaagggattttcttgctatgaattatcagaataaagctgtctttgacttctaattaacatgataatggttgtttggtgcttggtcctcatttatttgtcttcctttattcgatgtccccctgtttactttaatagacttgattgcaatgagttgcatgttcaaatttcatttcatattttgtaaaagatctccctgttctcccattctccctcttcttggtttactgatgtactttttttttattacaataaaatttcaagtggagcaagagatgctgaataataaccttgtgtcttacaggttcttggtgtggaaaagacggcatctcagcagga

SEQ ID NO: 12619 - DNA, 10113 bp, Vitis vinifera
  Intron number 1 from transcript GSVIVT01001344001 (locus G SVIVG01001344001) derived from phytozome v7.0 (chr-ID chr1 3; pos 23779884 to 23789996)
agggctagagagcgaacaaggtaaactgcttattatgttttcagggacatgcttgctttgattaggcattgtttttggtgtctcctcttttctttttatacgacgtttctttacctatcaaaaaaaaaaaaaaagattaggcattgacttgcagcttcacctctttatggactttaggggattataccatatcaaggcaattagaacctaccaaagaccaaatgcaatagtcagaataagtacaggcatcaaaaagttagatagtgatagacatgctagaaattatgaggctttttatgtttccctgactagaacattataaatgttataaacatcataactctcagtctacactaataaattccaatctataagttgtatagtggaattaaaaaaaggtaatccatagtatcaaatatcatatccaacataaattttttattggcaaacagaaaatatatcagaaaatacaaaggggtgtcaccccagtctatacaataagtatataagcggcatctaataatgtaaagaaaaaagcctatcaataataataataatgtaaagaaaaaaaaaagagaccaaatatagaaataaacaaggaccaccaataaaacaaaagaaaggaaaaaatgcaaagggcccaaagcaagggtcaaaagaaaggctttaggccatcccctacctctcaatagttattagctcatttcccataaagattccctctatttaagggatatggttttcaattcagcccactacctgagaccttaaaaaactcttaaatttcattccaccaatgtaaactcaatggacctattctttcacttcattctgttatgcagagaactgtgccatcttgtcaaagaatcctttcaccagtttaggcatcacataggagactccaaaacatgaaatagtggaagccacatgtttcaatctattccacaagagggtgattaatggatttctcattttctttgcacatccaacacttgttattataaccaatgtttttaaaactggaccaatcactgaaatagaaaatttactaggtcacagtttaacagttggactaatggttgaaccatagctgagccataatgctagtgtgacatcataaatatataatttttacatattattaaaatttaaaatagttataagtagttaaaactatatagaaataattaaaagacttaaaatattttatctttaatattattatattaaatcgtggtaaggatcaaatttaaatgtattaagattttttattttattaaattgtaaaattataatatttaataaaattataatatttaattattaagaagatatatcatttatcaaagagtgaaataaaattttattattattttattcacatttcattaactttttattttatcattttttatttgaatttcattagctttacaattttatcattttattatttagcttggtacaactgcatgtctaaatagtgaatatatttagtgtatgcaaatactagaacaacaagggcatttgcgtagtggtaaccggccacaatcctctgaagggatggctcagattcaaaacctctctatgcctttcgttgcatttttggggacaagaaaaaaaagaacaaaggggtcaaattgatggtccagttagccagttttctagtctgaccggctggtccactggttcaatgctgttctaaagccaaaaaaggcccacttagtgaacccaactagagacatgacccatcagctgttcaactggtctggtccagccaactagacaccttctttgtgtgctacaacctgaacaaatccaaaagcaatcctttggcatgatctccccacacctaagattataccagaacctggtcctcagtccaattgccacagatatcctagttagagcatgacagttatctcacccccatccaatggccctccctttccctccctagaacaccaaccaccttccttcttgtcaaacttgtccacacaactttcctctatgatctatctgaatcagttgcaaccttctacaaccatttaataaagctttgttaagaaaaaacaaacttctattcctaacatcagcaccaacccaattgctttcttagttggtagtgggtggagggtgaaattttggaaggatgagtggtgtgatgatgtggcactgtgtacttcttaccttgctctttatgctattgctggttctaaggaggatcgggtggcagatgtttggcactcgacaattgaagaggggtgttgggcccttcgtttttctagggcccttaatgattaggagctagatttggtggaacggtttctcttgagtttgcaagagaggagtgtgtgtagggaacaaaaggataaagtgatttggacaggatcgaaaaatgggaagttttctattaaagccctatattcgaccttggagacagaaagtacaatgccatttcttgttagtgtgatttggaattcttgggttccctcgaaggtgggttttttttttttttttttcacttaggaggcttctcgggctaaggtgttaactttggatcatttaaagaggagaggatggtctttagcatatagatgtttctttcgtattgaaaacaatgtttgaaatatcgggatatatcggagatatatcaccgatttttcgattatcagagggctctgacacgataaatagcatagatatactgatcatctgatttttaggaattctctctttttcgttgatttgtcggtgatatatcgaaatttcagtgtgggcatttttttcgaagccacatcaacacctttcaatgggtttcacctaaaaattcgatttgttcgtgcattggactaggagaagacgacctagtaagtccaagcccaacaactcataagcactactgctataagggcgacgacctttaaatagggctttgttgtctttcaaattattgatgtgggacactatactttacacttaaaaaaaaaactcatttcactacacataggaccaagactcgaaccgagaacctcacatttgtgaggaatgccctatgtcattacaccataacttcatttgtgtatgaattcatatatatatatatatatatatatatatatatatatataatatcttttataaatataaataaattttatattttatattataaattaattaaaataaaattattataaataagttgaatttaattatcttatcatgtattttatactaagtataagataaatataaatttataaaaaaaaaattatcaatatttttaaataaaaaaaacttgtctaagcatcattatcaatttcttcaataaaaaattcaatacttgtattattatatgttttatcatttattagaagtattttccaatatttttatgagttttaatcaattttcagttcattgatattttatgtcaaaatatccatcgatattttccgatatagcttaatatatctatgaaatcaagttaccaatatattcgttgaaaccgatatttttgtccttgattgaaaaggaagagaccattgaccacatccttatccattgtattaagacaagagtgttatagaatcttttgttctctcagtttagaaggctttggatacttccttcttttgttagagacacacttttaggatgtcatggttcttttgttggtaaaaggcaaaaaaggtatggcggcagctcctctttgcttattttggaccatttgaaaggaaagaagcagaagagctttcgagaatgaggaacagtctattcaagggttaaaacatgttttcctttgtaatctatgggattggtcaaggttgtttttaatttttggtccttcttcaattgtagattttgtggattaggtgggttctttttgcggggggcgtagtttttgtaggtccttctcctttttttgtgtttttaagagtttgttgtataccgccctatgtactttggagcgttagcattgttttgacattttttgtttataatacactattgctttactcatcagaaaaaaaaaaaaaaaaaaacatcagcaccaactcatccacattttccacattccctaccaagagaagcttactcttcccaagatctacttttaaatcaataactactcctaagcaaaaaatgatgcacctaagatacaatgactttagtctcattgaatgatagtgtcaatgacaaacatgaaacaaaaatctagaacccttatcactattttcttttcaatgttaaaccatctgtgaaatatttctcccctaccctacattgaaagagcaacacaaggcctttgtcagcaatacaaagagataggttggaggttcccttgctttaaacgccttatgttttagaagaaacctgtaagtaaccaacctaacaatttaaacagttggtatgtaagatttaatccacctaatccatttcagatctaggttgtctctccttttttaggaaccaacacagtgaaggttgcatttcttgcctttttgcaaaattgccaaagtcatggacatccctctagaaagcctcagacatcctttctgtctcccaattgttttgttcaaataccatagtcaaaccatcaaagctgggggatttattccctctaagatcatataatgcagctaaaacctcattgagtttcaaggctttttgttcttttaataggcaaaaagagtgattgtattaaaagcacttgaaaaaggtgcatcaaagtacacatagagcataaaaatagcaccttacaacaagcaaaaggaaagtgcaacaacaaccttaacccccaaaccaagcctaaagcccaagagacctagaaaaaatagtgtgcctccggatgaccttcttgcaggcataccaaaacgggttgttgcaatccaaacaaagcctagatgaacttcctcttgacattgtcagaagccctctagcattccaaagggatgaaaaaggtatcttctacccactgctgtgatttcccactccccctttccacatcctgattgtctaccttatggtaccttataactcacaaaacactccaatttctttagttccctttcaaaatttgaagatgaggagctcttctctattccctttcaaaactttgtcctagccttcatttttctgaggagagccaagatctcagcctcgaagcccactgtcagcatgcacagctagttgctgaaagctgccaagttgcttgaggaccaatcctccataggcacctttgcccttggaactaaaccaagacatgcccactattccttatcctccttacccactgcaacttcgattggcctcaccccaacctcttcaaactccactgaagtgtcgtccaccaaaaccatttttaggggactgctaccctctcctactggatcaattgcaaaatccacctcagatccctctagaccaaggccattcctagaaagagaaggagaagaagttgcctgtgtctccagggaagaaacagagaaaaaaatagtacgagggtgtcttatcgcttctgccatgagggccatgccagtgcttgtgcgaagaaacaccgggggagagagctcaggatgatggaaatcgtgccctctagaggcaaaagaagccctaaaaaagaaccagctctccattggggtattcttagaatcagcaccatagcgcaggttaacagagccctcaccaccaccttgggccacacaaacaagagtattattgaccttcttagaatgatggcccactctgcaagtctccttagaaattaaaacttttgacccttccaatggcctattagatagatgggcagccacttcacttgagaatacttcaaagacttgggcctctttcaagccctcaaggcccgctctttccaatccaccaacaaccccacatggggcacccttaaaagataccatacccatgcagcccccattgcaaacaactttcctcccatcaccatcaccctctacagctttttgcagcccactacctaccatagccttttcagaattgccagccattactagacctttcccctctttccccccctaccatagggtgacaagacatctgcctccaattgcaacagcagaacttgcacacacatgctctctttagcatgtgtgatgtagtaaaaccctaggatggttgtctacactcaaaaataggtgggctagggttttgtttttaggatgtaaggagatgaacaaggaataaaacttatggtagagaaaaataagataaaaaaataaagagaaagaagaaacgatgaagaaaagatgaaaaaaccttagagtctcactaaggtcttctaggaatctcacttagaagaaaaccaatagagtctcaccattgagggttgcaataattgcaatgaaaaaaatataatattattaacatcaatcaattcattcttttgatttacatcgattagcctatataggcttctctaagaaatccaaagtctactaagattctaataacctgttatgactctaattattattataatgtccaaagtttactaggtctataataacctatcatgactcaaattctaattatattataacttaactagctaatctgaatttgactccaacaaatactaatcctatttcaattgtaattattattaattctatttaaagtttatttatgtcttcactttcctccttgaatagactttaaaagactttcccccatcaatgtgtctcccctgtaacttcacccctaatatctagaccaatcccattgctcagaacctcttgagaaatatgtggtggtacttcccaccacaattgaatggcgaagcaagacaatcccaccaccaccatcaacaacccagacttccttctcctatccaatctcaccaaaactcatgcccttttcatgtgttggggatgagctatgtcttcatccactgcaacaaaaccaccacaactatcctctagcttcttgaacacctcccaacaccataagtgcagaggaagccccacctttctcacccacactttcttagcatgcttaccttccctcacctctggggcccatctatccaaatgcaaaaccttttccttataccttcttaaaccccttgacagcaccatctttgcattagggctaccctcaaaattgaacaagagaagagcaccccctagcaatgaaattctcaatcctccttttagaatccaactatgatgtctccatctccttaatccaagcaattttggagttaggtctagatattctccccatttccctactagacagctactcaaatgcttcttaggttgaatctccttctcatctgaatctagactgcttaactcaccaaaccatgctctttcttaaccaattctacaaaagaccctttcaacaggtccacttaactactacctctctccatagttcttaaggcagccggtgtcagaagcttcctttccttcgaggaggaaactacttcgagatagtcaaagcttcgcagctaggatagaccaccacccagggagaccccttcctttatggaaaatcataccgaacctcttggcctccaaagaccaaaccaattaaagaatgaacttccctcccccatttgaaggtagttccagcctgaagttcctcctatcttcaagccaaactttgttgcacaactttccatcctcacccctacaaagcttccacaccttccaacaaacaacacaaacttctttccctaaacctaatccacgaggacatgtctttgcatcttacaagaattttccctttcagtttccctccaaccacctctacgaagatttcaaatgacttggactccactgcaaactagcacttaccacctctcatctctcacccatctcttgctagagcttagaagcttgttggagagacatttctcaacatcattgattctgctataattttatggggcaatgtattaagtttcaaggctaccttcatagtcagcaatacctttaatattaagcccctatatgtcaggtcttcttacccctggatctaaatacaagttcaggaagctcattaatattttttaaaatagggaagaaagaatttatcaaacaaaagactagtaaaaggggtgcaatataagttcatgggagaaatacaaaggtcaccaataggcaaaagaaatgacaacacaaacacccctctaagactcctttagcaattaatttgagcactccaagcctttgaaagttctaccattgagttgttgatgccaaatagggaagaaagaagttatcaaacaaaagcctaggaaaatggagtgcaatctaagttcatgggaaatatacaaaggccaccaataggcaaaataaaagacaacataaacacccttttactaatttgaacactccaagcatttgaaagttctaccattcagctgttcatgccaaatgggccaaagcaagcacaataagccattcttgacatcttcttttgcttcttacttacaaagctcctattccatcacagtggaacctctcttcctgatcacaaaaacaccctagaaaggctaaaaagagagaataacaaagccactaacttctacctttatcacaatggattaacaaatgatcaactgattcttcaacacacttacagaggtgcatttgattaagaccgccgtcctttcctaagctggtccataattaaaatcttttcaagaacaacctcccatgccaaaatgaaaaagtccacttttatggggacctaaaagcccaaactttatttagcctggtaaaacctccagaattaggttccaaagtgcaataaaatgatttttgcaagaaatttccatctttagcatacctcacatggtcacaccaacatattatcctgatctgagcactctccctgaagttgcttaaggaaagatccacagtttctgactcccaatcatgaaaatgccataaaatcaaggttccaatgcccacatctgctgacttcttcccaaacattagagacacaagcatccttagagaggcagttatggagaacaaagacggttggaagcacttaacaagagtcaccacattatgcaaaaacctaaccgttctaccatttcccgctaaaaagttcattcttggaaagacctccacccatcaactgtctagaccccactttctggcccattatctttaagatcatatcccacttcatccagaccatcaaatctgctctcatataaattcatattgcccatgtcccaaataaggagcttttaaattggacaaaaaaggaaaattaaaagccttgagtagctcttgacataataattattgaaattccaattgagtcactccaccaagactgggttgataagcctctatctctgaattgccttcctcttcaacatctagtagccaagttgaagtcattgaacttggcctttgattatgcctagcagctagtgtaatcccttgcatcttcaaccaactggacttgcactgtgctaatatctctatctacctttgtcaaatgtcaaatcattttctgcatctatcaatagatcatcgctccttttccttatcaatcattggttatcataagaattttctagtgtgatgggccaataagaccatacataccataacatggtttaagagtttgactatattatatatagttttattttgtgcgagtttataagcatttgtaatattgaggtcaagtggctgtaatttactattctgtgtacattaaaaagaaattaaatctagaatatacaattagtgggattatagagcaggatagagctaaaattcctctccaaaggttgaaggggaagatctagtctccaggatcggtgaaggcaagagagttagctgggggcttgctgagttcctaggtctttagggtttcggctttgtttggtggtggtttgttgccctttcctttcgctgcctttcgatgttatttgtatattttgtgtgtacttggtgtgccttttctaagcacttttaatataattattttttttcctataaaaaaaaatagtgcagtctcttcttatttttctggtattaagatttctgatattacgtagtgttgttggtaggggtcgaccatctgaccgcagga

SEQ ID NO: 12620 - DNA, 11806 bp, Vitis vinifera
  Intron number 4 from transcript GSVIVT01033176001 (locus G SVIVG01033176001) derived from phytozome v7.0 (chr-ID chr4 ; pos 8953219 to 8965024)
atgttaaagatccagaaacagaagcttctgcttttagaaacacattcatatgtgataagaaaattgttgaaaacaagatcagatatggggttgcctttgggaatcaaaagcatcttcccttccgtgtcatgaagaatataatagaatttaaggaaatccaagatgaaaatgacaagtactggttttatgaaatgcatattcctttgtattttattaaagggtatgaagaaagtgtacagacgtttttgccataagataagcagcccttaaatgttctatccaagttacaaagatagcagctaaaagcttcgcatagggatatattttcctatcttatgcataagagtgataacttggacaagtgctcatgtgcctcatgtcaactggacattttgcttgggagtgctgtcaaatgtggtgcatgccaaggttattgtcatgaggaatgtaccataagttcaacaatccaatcgactgaagaagttgagttcttgatcacttgtaagcaatgttactgagaaaataaaggctatacttaaatgagaaaaacacccaagagaggggtgaattgagtttttcaaaatctttttcaacacaacaaattcaagcacaatagaagcaaaaataaagaggtagagtttagagaaagcaaactcaaattttatagtggttcgacacttccttacctacgtccactctcctcaatctcctaattgagtgagggttccactaaattgaaacttcaaccaagcttccaatctcctttacacttggatttaggttccaatgggctcttacacaatatcttcaagattcaactcacttgaaggctttcacgctcactttttacaaaaatgaatccctcaacctagctcaatgatagcttaaatacaaatcaaagctaggatgaaacacaaagatgcactaaatgatatgcaagtgtatatttaatgcaccaaggaagaaatgagagcttttaagccaagaacaagtgggtagacaattgaatgcaagtgttctctatgtcataaatgaagtggagctctcaatttataggtttctaacctcgggagccaagaaaaacaaaaagcagcctcaaccggtcaagctgggggttgaccggttcactagctgttggaacatttaatgctttggcaggttactgttgcctcgaccagacctcgactggaggtcgatcgggaaggaggatacctctactgagaaggaagagttattggaagagagagagtgtttttaacactcctcgactggacctcgattggacaagggcaatcggtcgactggttccctggccggttgagccaattggccagtgtctcgaccggttcagccttttagccttgaaaacctatctttttcaactattttcttttctaacactcaggcaaggtctttaggtaaattaatatgtcaattttgaaaattttgcctaaggtacattgataaaactcgggttttaatgaaattataactttaaagaataaaccgagttttccaaagatgcatgaaaagatatgtaaaacctaagtgcatccatgcattcatcttacatttgtttcatatgattaaaagtcttccaaatgtctcgatcttgtatccatttggtcctttgatgaatttccaaatttatacctaagattctttacaattcaaaccaattagtcacttaaccatggtttgttatcatcaaaacctgattaggagaacccttgggctaacaatctccccattttttatgataacaaaccttggttatctaggagaaaaaaaaaaatctccccctcaaaccaatcatggatcaatcaatcaaaatttatgatgttaaaacaaagataatcaagacatgcgaatattcaataggaaacaaagataagtcatgaaacatataacatatcatatataagtaaagtcacatgtacacaaaacataaacatataagtcaatccaaacaaatgatatgacaatgatatgcaggtgagtcttctagatataagccaatcctaaatatctctcccccttttggcaacataaaaaagaaatgaagggggtctctatgaaattaaggctaaggaggtggaggtggaaacacggagcgtaggtaagccatcatctcctcacgccgactctcaatgcgctcaatactatgctggagatgctcaaacatagcctattattgatccatgtgatcctccatatgctcaaatctatactacagatactcaaactgagatgtgaaaccagtctgatactaatccatgtgatcctccatagagtagaatcgagtatcactgactactgcaaactcctccatgcaagtgtcgagagagctaatctgagtagacagatccatccaaggcgcatgatcaagagcgtgaggtgcctaatgaggtgatgtctctatgtgaggaggctaagtaaaagatggctgagaagatggtcccactgtgtaagccgacttagacatcatcgactcagggaatatggcctcaaagtgaacactctcagactagagtggaggaatgtcaagctcgggctctctatgttgaaagcctctctgagggtctactccaccctccatctctcatatctcagcttcctcatctactctaggatgcacctgttcctgtccccgggactgtgctagtggtctctttactctcctaatccaagaaccatcgagggccttctcaaatttcatccgccccaaagactactcatcatatgtatcataagtgctaggagcctcaaaatctgtttttctgcttaaattgatcccgacatccttgaacactctagtgagaaaacggtcgtaagagagtacacgggtcatgctctcgtagcatgagatcatgtgcatcatcatcaaataccccacgtgaatccatctcctcatcagaatgaagtccacaatgaatgcttcaaggtatgagacctcatatcggtgtctgcctcgtggcaataggatggagcagatcatgtgatgtactactctactgctcacgatcaagctatgggtcgatggtttacctatcccctaggcattcgcaataccacacatcctctaaatggtatctctaagctcaaaacccagcacaatgggccaaaccttggactcatacacctcctgagtccaattggagcaatatctaaaatacagcaaatgctctctaggtccagctgaatctcaacacctctaacggtggaaataatcgggccaccaagtccatatgtagccctcgaatagaacgcacgcaccagagttgagaaaatcgactccgaaatcgtcattactggtagccaacccatccgactgaagatgccctcaaacctgaaaatgttgcagttgggagaaattaatacttctccctggaactactttcctctgagcgaacttctgcttgtacctttgataatcctccacgatgctgaagagagtcgtgtcaaacctcgcctttcggcgagtctccgtctgagaaggttgagacagctcagatgggcgcttgccctataccctagagacaacagtctctctcctaggagccattagaaaagcaaaaatgaagaagacgaggctagtagagagaaaagcacacacacccgaaaccctaggtgcacgagaaaggtgttgaagctggatgtgaatcgcgaacagaggaaaagttgtcccaaatccaaaaccctagcctctaaaaatcaatctaaaaccctcaatctactgcagtccctaaaaatcactcattggtagctaaatcgacacaactcttgaagaaccaaaggaaacagttgagaaaatgaagtgcgggagggtatttaaatcgacagccccgacgaaccggtagactggtcctaatccggttgacatcttggtcaacggtcaacacggtcaacttttcaaattttgtgcattttctcatctcgtgatcctcttcctgccattttcagttgaaatccccaattttttatgcccaatgccaagggaatttttttttgtcaaaattttgactatttatctaagtatatgtctatatgatgcatatgacatgaaattcatgcaatcagaaggtatattcatcaagaattcattaagaaatcattagatcataaagaaatcacccctagttgtcttctaatatcaacaaattgttcttcacttagaggttttgtaaaaatgtcgacaaattaagcttttgtgcttacaaattcaagtataatgtcactcttttgtgcatggtctctaagaaaatgatgttaatctctatatgcttagtcttagaatgttgcacgagattttttgaaatatttatggcactagtgttatcacatttaataggaacatgctcaaaagataaatcaaaatcactaagtgtttgtttcatccaaagaatttgtgcataacataaattgactgctatgtattcagctttcacagttgacaaggctatcaaattttgcttcttactatgccatgaaacaagtgagtgtcctaggaaatgaaaagtgtcattagtgttttttctttcaaccctacaaccggaaaaatcggcatccgagaatccaattaattcaaagttattactcttaggataccataagcctatgtccattgtccctttcaaatatctaagaattcgttttacagtacttaggtgagattctttaggacaatattgaaatctagcacacaaatcatacactatacataatgtcgggtctactagcggtcaaatatagcaaagaacctatcatgcctctatacatagttgagtcaatggatttacctttctcatccttatcaaccttgatagatgagctcattagagtcttcattgttttggcttcttccatgttgaactttttgagaaaatctcttatatattttgcttgattgatgaaggttcctttttttagttgcttgatttgaagtccaaggaagaagtcgagttctcccatcatgcttatttcaaactcactatgcatgcacttagaaaattcttcacaaagagagacattagtagctctaaaaataatatcatcaacatatatttgaactaagagcatatccttttctttggtctttatgaaaagagttgtgtcaatttttctcattttaaaacattttttcaaaataaatttactcaatctttcataccatgctctaggtgcttgtttcaaaccataaagtgcctttttaagtttaaaaacatggttaggaaagttaaaactttgaaaaccgggtggttgttcaacatatacttcatttataaagtcatttaaaaaatcactttttacattcatttgatataaaacaaagtctttaaaacatggaaggcaagtagcatcctaatggcttccaacctagctacgagggcaaaggtttcttcataatctatcatttcttcttgattaaaaccttgggctaccaatcttgctttatttctaacaattatgacattttcatccattttatttctaaagacccatctagttccaataacactatgatttgaaggtcttggtactaattcccatacttcacttttttcaaattgatttaactcttcttgcatgtcaatcatctaattttcatcaactaaaacatcattgatatttttaggctcaatttgagagataaaagcaagattattgcaaatatttctaaggaatgatctagttcttaccctactagatggattacctataacttgatcttgtgggtggttgatgataaacttccaaactttaggaaggtcttggcttgattcaccttgctcttattgagaagggggtagtgccaatggtgattcttctttcttgggatcctcttaaatttcttcttgatgtcttctatcttcaatttgcaattttcccatggaggtctcaaaccctaaatcatcatcaaaactctctcttttttggagagaattgttagattcataaaaaataacatagatggactcctctacaaccatgattcttttgttaaaaactctaaaagctttacttaaagttgggtaaccaagtaaaattccaacatccgattttgcatcaaatttttcaagattgtctttggtgtttaatataaaacatttgcatccaaagactttaaaatagctaatgttgggtttctcgtttttccaaagctcatagggagttttcttaagaatggacctcaataatattctatttaaaacataacaaaaagtgttaactgcttcagcccaaaaatattttggtaaattattttcatttagcatggttcttgccatttcttgaagagttctatttttcctttcaactaccccattttgttgaggagttctaggagccgaaaaattgtggttaatactatactcattgcaacattcttcaaaatcaatattttcaaattctttcctatgatcacttcttatacaagtgattgtaaaacccttttcattttgaatcttattgcaaaactctgaaaactcataaaaagcttcattcttttgacttaaaaacaagacccatgtatatctagagaagtcatccacaataacataaacataatactttcccccaagacttggtatcctagagggatcgaataaatccatatgcaacaactcaagtggcctagatgtggaaatgaagtttttgtttctgaaagagtttttgatttgctttcccacttgacaagtttcacaaactgtctttttgaaaattaattttgggaaggcctctaacaagttcatctttcttgagttgggaaatgaggtccatgttagcatgtcctaacctcccatgccacaaccaactttgattatgcatgcttgcaaatcatctatcatggccattatattttgaaatatttatagcataaacagtatcacatctatggcccatgaaaatagttttctcattttgaatatccttgataatgcaataagatgcttcaaaaatcactttaaaacctttgtcacaaagttgactaatgcttaaaaggttatgttttaaaccatccactaataaaaactttcaataagagaggatgtgccattaccgatgttgccttgaccaatgatttttccttttacattgtctccaaaggtaacatatcctcaatttctctttataaggaaagcaaacttggattcatctccggtcatgtgtcttgagcatccactatccaaaaaccacttatctttctttgaaccctacaaaatataacttaagttgatttaggtacctatatctttttaggtccttgagaattagtgacctttggtttttcaatccaaacctttttggtttttgcatttgaattcttttgagaaccatttcttaaagaacatgtactactaatgtgtcatcttccacaaaagttgcaagtagtggaaggacttgcacttgtggattcttttacaaaataatttttaaaatacttttgattttttgaagatttgaattctagccattgtttgtcaaaaacacatttttggctagctagagtcatttcaaaagatttttgtccacaagaaaatattgagaaagaggaggtcaaccatccagttttctttctcaaaatctcattttctttttcaagatgagttttagaaatttcaacaattgaaaatttttcttttacttcttcaagttcttgaattttctttttaagagaattatttttcaaactaagtttttcaaaatcctcatacaattcctcaaaaacaacatgcatatcttcattactaaagttagagtttacctcatcaagttcatccattgccatgaagcacatatttgccacttctttctcattttcttcttcaaaggattcttcactttcactccaagtggccatcattgctttcttcattcttctcttggcttcacttttgtagagaggataatcatatttaatgtgtctcggtttcttacatttgaaatacaccaaatctcttttctcttcccatttctctttgtcaccatgagatgaaggttcctttttagaaaggtctcttctaaaggtaaacctttttcctctaaacctttcacccctcatgcatttattgagctttcttgtgatgaaagctaaatcatcatcttcttcaacatcttcttcttccttagttgtagctttgagagctatgcttttcttctttttgtcttcaccttcttatagcttctttgccaaattgatctcatatgtcattaatgaccctatgatctcctccataggtagcttggtcaagtcttttgcttcttgaattgccgtgacctttgtatgccattttgatgagagtgacctcaatatcttcatcactttttcgtattccttgtagatctttcctaaagcttcaagaccattaacaatgtcggtgaacctagtgatcatctcaacaatagtctcattttctttcatcgaaaacaattcatagctatgaacaagtaaatttatttttgactcttttacttgatttgttcctttatgagttatttcaagcaatctccaaatttatgtagccaatttgcattgacatattctattatattcatttctatccatagcacattgcaaagtaaaaacggtcttagcatttaattgaaaatttgttctatcaagctcattccattcttgcttgagttttggaaccaagactgcatcaactagttttgtaggaaaagttgggtcatcttcaatgacgtcccatacgtctaaatcggttgattttaaataccaagtcattctagttttccaatagggatagtcggttcccgtaaaaaatggagctctatgttttgtaaaattttcagtttgagacgagcttgatgaaatagtcatttcctcttagacgattaagtcttaaacaagaggtcttgctctgataccaattgagaaaataaaggctatacttaaatgagaaaaacacctaagaggggggtgaattgggtttttcaaaatctttttcaacacaacaaattcaagcacaatagaagcaaaaataaagaggtagagtttagagaaagcaaactcagattttatagtggttcgacacttccttgcctacgtccactctcctcaatcttctaaccgagtgagggttccactaacttgaagcttcaaccaagtttccaatctcctttacacttagattcctgctccaatgggctcttacacaatatcttcaagattcaactcacttgaaggctttaacactcactttttataagaatcaatccgtcaacctagctcaataatagctcaaatacaaatcaaagctaggatgaaacacaaaggtgcactaaaggatatgcaaatgtagatttaatgcaccaagaaagaaatgagagcttttaaggcaagaacaagtgggtcgacaattgaatgcaagtgttctctatgtcataaatgaagtagagctctcaatttataggtttctaaccttaggagctaagaaaaacaaaaagcagccttaaccggtcgagttgggggttgaccggttcactagtccttgcagcatttaatgttttgataggttaccgttgcctcgactagaggtcgaccgggaaagaggatacctcgaataggaaggaaaagcaactagaagagagagtgtgtgtttttaacactcctcaatcggtcctcaaccagacaaaggcatccggtcgaccgatttcctggttggttgagccagttggccagtgccttgaccggttcatcattttggcaccgaaaacctatctttttcaacttttttcttttctaacactcaggcaaggtctttaggtaaattaatatgtcaattttgaaatgttttgcttaaggtacatttaataaaactcaagttttaatgaaattataactttaaagaataaaccaagtttttcaaatatgcatgaaaagatatgtaaaacctaagtccacccatgcattcatcttacatttttttcctatgattaaaaatcttccaaatgtctcgatcttgtatccatttagtcctttgatgaatttccaaatttatacctgggattctttacaattcaaaccaattagtcacttaaccatgattttttatcatcaaaacttgattagaagaacccttgggctaatagttaccatgctaaaactcccactcaaaatgaaaatagtaatgactctcccactagtcccttgcccttgctggggaaagaatatcagaatccagcaacagctccaaaaggtttaaggcaaaaaaattatagtcaaccattagcatatgttagagctctagagaattgttccaatatgcaacaaaccattgcgggttctagtttggtaacaaaaatccgacacaagccatgttcctggggtctcatatggaagaagaaaatgttgaagattctgagattgattttaggctcaaaaacattcttttaagaggcaacccaaatacagactggtcaagacatgtttgtcatctgtgccatcagccatataattcagatctgatgtatatttgctgcgagacttgcaaaaattggtaccatgctgaagttgttgaacttgaggagtcaaaaatcttagaagtagtgagattcaaatgttgcaaaagccggaggataagatcacctgtgtgtccttatatggatcaggaattaaaaaaagtagagttcaaaaagcctcgtttcaggacctcaaagtcaggaaatcctggaatggactctatttctggacccatttttgaacatctgaaagagtgggaacccaatactccaatgtcacaaactgaagaggaaattgttgttgaagatgatgaacctcttcttcttttttttctcgttcaaaagtggagcaaatcacagagcatgatatagaagtggattttgagcagaaagctgctgggccagggccatagaaactgccagtcaaaagacatatgaagtgtgaaaatgaagtagatggtcttttcgggaatgatcaatgtcagatagaatcaaaccatcatttgaatactgcagagctagcatcatctcctcatctagaatgggatgctttcattgatggccttgaagatgagatgatatttgactatgaaaatatggagtttgaaccctagacttacttttcttttaccgagttgctggcttctgatgatggtggccagttggatggaattgatgcatcgaactgggaaaatttgtcatcacaggataaagttcctgaacagtgtagaatgggtacttcttgtaatcagcaacaacctacaaattttgaagagccaacagttaatattatgcaatgctgcatgtgttaaaaaacagagcatgcctctagtctttcttgccagatctgtggcttatggatacatagtcattgttcaccttgggttgaggagtcatcttgggaggatggctggaggtgcggcaactgccgagaatggtggtagccaatctcacctgtcaggttttgggtggtggttagctattcaatttcaagtgagtttcattgcagtgaagtttgtgaaccaaatcacagttgacaggttggataatgaaaacaaaatttttttttttttttgagaggaaagaccatgatgggcaagttcattcatcatctctatttgttgtaaggcatgatgatggacccttggtgaagttgtttcttcaaattcacaccgactccctcactggtataagtcctgtgttgattaagataagacagctgctgctcttgacaaaattttgtctctgaagggttccgctatgctttatatggcacatggtgggacaaactttggattttacaatggtgccaatattggtgcag

SEQ ID NO: 12621 - DNA, 1410 bp, Vitis vinifera
  Intron number 5 from transcript GSVIVT01000563001 (locus G SVIVG01000563001) derived from phytozome v7.0 (chr-ID chr1 ; pos 7043228 to 7044637 reverse strand)
aaggccaacatctaccgtacttgaatagctggcattcaggtggacaagaactacaacacttttctcaattacatgtatgctctatcttccagtcttactctattgtctggatttgcattacctgccttgattaattgcctcctatttattctagtgatcaagaaacaggtttggtgtatgtggagacaatatacaactgccccacctcctatgagaggtgggtgaatatgttgtttatcattagactatgtagaaagataaattttttgtttccaaggatatgcatatgaggcccattaggtcccttttgcctctacatcacttatttcgtaattgatttttgaatcatttccccttttttcttttggcctgtgtttcctagcggaaaacacttgtttctacttagcaggttctgtttctatttttgtttagtagtttacatatagtttctcattgcttacttcggcatgatcaccaagtaatcgttcaaattgcatagaatttttcaatttgtgaaatatttgcaaataacattttatggatgattttctatttctttatttattaattatcatcacgatttattcatttattttaattttcttggagcctaaatatgaaaaatattttaatcttaaatcaaatggttatttgatagtcccatgagcctgccttcttgaccattatctgaatttttcagagatgcatcatagatatcttggggcagtagcacttggtgttaaatttatttatggtcttgtcattttgttgctctccagtgtcaaactttctcctcttccagaattttgttgtcacttcaaacaatcaatatgattcatttatacattaatcaattgaagggatttggatcctttcctgttaaatatctacttgtgtatgtgagttttgattccaggatcagtttcagccttgtcaagagcaaaagtaaaagctgaagctgaagatatcatgttgttcctttcatcttttgctttgactataaatactgaaagggcttaaaataatagactttaattccaaagttaccaataatcccctgaactgtgaaaccgttttcgatgagattcgctgaatgatcaaattccatcaggtgatcaccacgagtcatacgtagaaacacaaatgaaaaggcagaatgatccatttccgtttctttttgtcttgtttgaaggaaacattggtgagtcccttacttcgcagactgaaccttggtgttgtctgaagatcagatcagcgggacaccgaactgaaagaggaaaggacatggtggtgagaaacctcaagaatgccttctagcattagagtgatggctcatcctgcacacaccaaaaaccatttgtgagtgcatctcaggctggtgagaaatggcaagtgcctaccttgcaattg

SEQ ID NO: 12622 - DNA, 1615 bp, Vitis vinifera
  Intron number 4 from transcript GSVIVT01033827001 (locus G SVIVG01033827001) derived from phytozome v7.0 (chr-ID chr8 ; pos 17419711 to 17421325)
cgtcatattcctctgccctattttcttcagcttaggtaagttgataaattgcatttttagactagatatttatatttttgtagacaagttattaagtttcaaattcataagctcctttatcatgctcagtgacttgttatgcattttttttgtcaataaagctgaataaataattggaatctctgtggtgaagctcaaaaactttgacatcacaattactgaagtttttagcatcaacttctcctggactttattgtactaagacagtttcaaaagaagcaatttacttgaaattttttttgataagtaacagtgagatattataaacacacaccaaagaaagagtgcaacaaagtatacgataagtatacaagagcaccaagaaaacaacaaaaaagccaaggaacaaccaaggtgggaaaaccaaaaaataggtttttctcttataccaacagtccaaccaatcaataaaatcaattagagacaaactgccgtcacctatatacatatttacccacaaaaaaataaaaaaataaaaaaataaaaaaaaaatcaaacaaactaagaaaagtgtttttcagaatttgggtaaattgctcctcattctcaaataaccttccatttctctttttccaaatagtccaaaaactgcataaaagagcaactgtccagaccttcttgtgcttcttacagatgaaggacctatgccaccctaacagagtctttctcaatgtggccaacagaactcaaggaacaaccaaagtagctaaagatcctgtgtactgaattttaaataaataagttttttttttttcttttaagccttgtagcaatgaagatgttcttaaaatataatgtatatctgtaacttttatgttgcacctattcgcttattgacatgcattttattcatcatgtaaggagccaagcttatggactttatagttgtctggtattatcttgggtttggctagggatacccatgttgccctgaccgattatgttggttgtgaaagctagtcataaatattttattttttattattgataaatcagagaaaaaatgatggcaatggtgaaataggcattgctgtgactattatctgtttacttgaatgttatcataaaattagagaaataattgatgaataatgaataggcacatcgttagaacttggttatctacttactacaatttattatattccttgtttcaaatttactatttctatcttcaaaacagcatgtttgaccctatagtaaagggaggaagaccattggttcctcttattctctttcatgaccttgaatattcttccaaattttcgatctttctgctttcatctgctactagtacaaaaacatttaattggatctttttttttcttttgtatgtgccatatatactacctatgtacctggattgcacccccttttttattaggggcctttataaagttctctcttgtttccctatcaaaagaaatatttaatcagcatttttatacgtattgttaagtgctaaattgagattggattgaagcaaactagtctcattttgcattaccattatgttgcagctcatttaaaccatttattggagttctatagcaaa

SEQ ID NO: 12623 - DNA, 1953 bp, Vitis vinifera
  Intron number 2 from transcript GSVIVT01009596001 (locus G SVIVG01009596001) derived from phytozome v7.0 (chr-ID chr1 8; pos 9740003 to 9741955)
tacaccatttggtggtggaagaagaatttgccctggtgcaacttttgcccttcaagtgctacacttaacattagccaatttcttgcacaaatttcaactttcgactccatcagatgcaacagttgatatgagcgagagccttgggataacaaacatcaaatccactccacttgaagttctcatctcgccacgtttgtcttcttgtgatctttatgagtaaaaccaatgaatgttgagagagactatttcaagaaacctagtattatatataggaaataaaaatacaaataaaatttgtacatgtggtacaagtttaaaataataactaatgagtactatacttttttaattttatcttagcttgaattttggtgttttttttttctccttgtagaagaaaaagtggcatatagcatttttctttcggtatagatagtgaaaaataagtatgcacttgaccatatgcatacgtgtgcaatagacttaatgagttgcaagttgataattgatctgtcttttggtagattttagttgccttcttgtacatcattaaagtagaagataaagacgaaaattataacttcacccattcaattaaaaatcaatttaattgaatttaaagaagaaaatggttggttcggtttgactaacaataattgattcgtcggtttattttgtttcaatttgttttggtttgttgtaacaataaaaatcattttttttggttaatttggactaaaaaaaaaaaaccatgattagataaaaactataaatgtgcatatgaagttgtatcgaatgtgaaagcttttcatcaaattaataatataaccaatactcatattattgatgtaaatatagaacttctagataagttcaatttgttttactattgattttttaaataggtaaccgaattggtctaattcaattttatattttaaaacccaatattattaaaagaaaaattgctaaaaattagtggattagggttagttcattgattctgtctacaccccaaaaagaagagtgtccacttcgtattgtcaactttgtgtgcttataagttacaattttgcaccatgagattcacatttgtacttattattgctaattttgtgtggtcataagttataattttaccccactagattcacatttgctagcatcataattgactttctacatccatgcattcatgaatcattacatttcaatactgtattaccattttggtgctaaacaagaagactcgtctttaaagtactcaagcaaaccctcaccaattttaatcatttttcaatttagatgaatgggagcaacaacactagaacaatgaagtagatgatgaaataaaataaaaaacaaagatagtatacaaactctaattttattggtttgtcatagtcttgacttatatgcactctcctcaaactttaaaattctgctaacttctaatccttcaagccaatcttaaactcttacattttgattcttgattccaaaagaccttcttacacttgcctcaatagattctttacttttgaatacactagtcacaagttgttaacaattgaacaaaattaatctttctaaatcttaattagtacaagtttaaacttgagaaaatacaagaggaaattaggatgttttgtcttagataagatttataagttaatcaagaattttacattgagaacaaagagttaagatcaattcagttaagtgagattgtaggatctaattagtttgagatcttaagcggtcctgttataatcttattattttattccaaaattgcctaagagggaagtagtaatttaggacaacaattccctcccaaagtttattggtttgaaactaatactttattataccagcatgtttgagttgaaaacacaaaaattgaagctaaggcaagtactttacaattcggattgggttgcatcgagcttt

SEQ ID NO: 12624 - DNA, 3953 bp, Vitis vinifera
  Intron number 1 from transcript GSVIVT01025155001 (locus G SVIVG01025155001) derived from phytozome v7.0 (chr-ID chr6 ; pos 3914465 to 3918417)
tcgctgataaggttcctccctcttttgagcgcgtatggtttctaacatcattcgattatgtatcagtcttcttttgttttcttcatagatctgatgcgaatgtgttatgtggagtcttgatttggttgtccgggtaagtatagaggaagaacataaattttggttttgaatatttgactttcattgtttgggatcttggtgtgaatttttggattggtttaggtaggtttttcttttttctttgttttttcccccgcagattataatttattttgtagttgaatttttcttaggagcaaacagggatggatgaaatgaaaagagagtctgttttagttcatttttgagactgaattggttaatggttaagtttcttgttctctgtggacgtttattccttggtcacgaattcactggatggtttgagcacattctcatctggattaggtgagaaatatgttcatctcaacaaatacagtttggattttgatacggttgcaatagatgtagcgaaattgggggaaagattattcatataataaaggggacagaattaggaaaatctgtgacagaagtcttatgtttggaagttggagcatggatgccatattttgctttaaaacagtgaaaaacaaaaccacaacttgtgatgcaagtgtaaggattcgaggagaggagaagatcaggcatggatgatatggtttaggggatgtgtgacctatatttttgtttaaaaacatgcaaaatgaagacatacttgtgatgcttggtctttgatccctggtgaaaagattaagagtaaaaagaaaaaggaatttggcatggatatatatagcctacaaattagtattgcttaaatatgtgtagcaaaatagttaaattaaaattatttgtgtaaattatgccttcaagttgcttaaattgattttgagttttgaagttaccaacaatgttgtttttgtagctagttagtgatggaataacttgtgtgctcctcatgaatattcattttatttgctctttactgtggtgtgataaagatgccttggtttagttgaatgttgtgcatatatgtgtgtttgtgcgtgtacatttacatatatgaattggaggaagcaaagaggaccatgctttgaaaatgtcaatacaagatccccaaaaagagtatgaaggattgtagaaaaaggatgctctatttaataggaccttctacatcccaagatctgccagtccaaaccttgattagtatttggatcaaactaggaataaagctcattcatctcaaatagccaagagaaagggcactgcataagagacaattggtatgtttgcaatgtattttctaaaacagttttctatttttaagaacaaaaaaaatagtaaaacatgtttgataattagaaaacagaaaaaagtttgttgttcttaaaacataaaacaaggttagttcttttttgttgttttcacttgttttctaagggctgttttaaaaaataattatacaaatatgaagaatgattgaaaaaaaacagaaaacaattgttttttcttaaaaacataaaataaggtattttttgaaaatatattttagttgttttctcaatgttgttttaaaaaataattatacaaatatgaaagatgattgaaaataaaacactatagataaaagttattttttaaaaatatttaaaaacataaaaaacgggttaagaacatttcaagttcccaaataaacctttgttttacaaaatatcagagaaaagttttcaaaaactaattttaagaactgtttttgaaaactatactttttgttttttgaccttcccttagttccctatctctagtgaaagccttgctatgttaagctcttcaaggagaaaacaaattaaagatcctttaccagctgtggaggcaacaaaaacagaaagtaatgatggtctggaaatcttactttggttgaggcagcatctattcttagaattattttttacccaggatatgtaggaaattttagttatctggaaagtggaaacatgacctccttgtcatgaaaacatggttttagtgatcctctgcattattcattctgttgtttcttaccatcctcaagattctgtggatagaattttttacttaatacttgccatacgatcagctagtaaattgttctacttgttccacattttcttttatatttaattttgttagcgtatcgttaaaatttttatttccatgattgagaaacttttacaattttatttgggtactgcatctgttcaggacctcttggaactgttcatcctgcaattatatatcagtctttctgtgctatcattcttaacataaaatttattcgcaaaatgatttttcttcaatgaacagagtagtaaaattgcatatttattcttaacattcttaacataaaatttatgttaaaatttttcttcaatgaacagagtagtaaaattgcaattatatatcagtctttctgtgctatcattcttaacataaaatttattcggaaaatgatttttcttcaatgaacagagtagtaaaattgcatattttttctgccgctaccaatttctacccttgccaccttgctactgttagatttgttagaattttttttttctagcccgcccaaagaaaaatcacttcattattatgattattgctgctattgctactattattacaatttgatcagaaacaacaattcattgagcgagtgagagtacaagcaaggatggaatattttgcaaagcatacaagaactgatcagaagaagagaaactaaatgctaaagggggcagcagccacgaaaaataatttgggaagtggagaacaagaaaagccccatataggtcaaaagcccaaaacaaaggccaagagacaagatggctaaggaggcatgaattccccaacaaaaacctccaagctagaagtaccatgcttaccctaagactcctccaactagttggagaaacatggaacctagataaaagagcagccaactcagccgacaaatcaaggtatcctttgcatatgcaatcttccaaggaccttttttggctgataaactcaaaaaacttgaatcatcctttattaggaaactgacttaacccaaagcaattccctaggttaagccttccaacaaagtatatacgtctgcatttactgtcaaccccaccccaactggcatgggaaaaagagctctgaatttatttatgatcatggaaacctctaccaaagcctatctaccccaggaattagcatatgttaaagctgaatggggacaagatctacttcaggtacacccctacagttgtcctggtgtcacaaccaacaagcagctccccaatccaaagtgatcactttaagcggagtgcttgggaactctaaagagatgacaccacaacccaaactgtctccaatattctgaatcggtctcaaatatcttggcatttctcttaatcagattgcctaaagtgaggcaaatttagcaacatgccatagcattctacccatagcactgccaccaaaatctcaaaaagcaatgaccataatagttttgctgcttctctaggcccaaatccagcaagcttgaacagtctatgacataattccattgttaccagataataggtgatcaactctcctcactacctaaacatgtcacacactcaaggttaaggctttgtggggctcctcaactatagcatctcattggcattggcccctgtattagcaacaggccaaacttgtgggaaagtaacttattgcatggagttaatcagcattctctcttaatctgcattatggttcatgtaaaattatcttctgcactacttgttatgattttagtttttcattttttttttcatataaatttattttgccttttgatgattgaataagttctcaatgtttctttattgacaaacagggta

SEQ ID NO: 12625 - DNA, 3196 bp, Vitis vinifera
  Intron number 4 from transcript GSVIVT01031739001 (locus G SVIVG01031739001) derived from phytozome v7.0 (chr-ID chr3 ; pos 3974400 to 3977595)
actgttatcctaattgggtactcatacatatcaaggtatcatttcagttctatgtgtaagctaaatgttttaagcaagtcatagaacataaacataatttggaatatttctgaagctccattattgttattattctttaggaattcatgtaatgatgtgttggatttccattgttaaattcttttcaattttgacctagttctgtctttgcatctgttaatttggatgtattttgagtctaacctgtgcctgaatcattttcttcttgtggatgatatttcttttctctgttattttattcttccttctggaaaggtaaaatcatcttctgaaattcagaaatgaaaaattgattgttaaaaagttgtttagagtcaacgtatggaatgatctatttctggtgaaaatttgattgtacttatatttttctaatctttgtaactacaggtatttttagaaaattgaaatttataaatttagttttaagacaagacgcttttgtttcatttagacaagtatgattgacctatgatctaataattttattggttaaactgttttttgaatatacattttttttttgttttcaagtaatgcaacttttactgaaaatagaaaattgaatcgttataacaataattagagagctattgcttttagctgtttttttggtattaatttttcatcatcataaaatattaaattacatttgtgatgaaggtcaatttatgacttatatttcattaaattagaatttctattgatatttcactcttttgtttatcatttaattgtctacatgtgaagaagttgttcagtcttttcacaaatttaggtgatcagcacttccttgtcactctctaaatctccttatcctataggtaggtttattagcatcttagttcattgttttaggctcccttcctacatgtttccaaatgcccaagaaaattttatgctgagtcaaaagtgactatgagttttttctcatgcataccttctcttttttggcatattgttgaacagcatcgtaagcaagtctaatagcagcctcttattagaattggcaccatgaaaaatggcatactctgtctgtcatagatcagaaatcttgagacagctaaagctagtttcttattactccaaagtaacaagattaggcccaagaataaaataatgacgacatgtaaatcaagaattaattatgtgtgccgattcacagtaaaatccttgactttcagtggccatgcatccattggcatgttgtaaatggtgggtaaatctgcttgaatcttgtaaacgaactattctattccaaagacaactggtgcagagtgcagggggaataagctgtagctcatcttgatgcagtctgtctttttgttgattgattggagcaagcctgcccatatatttatgcatctgatttgttggggcgtttatgctaggaaagagtgttgttggatgaggaggatagggtgaggtggtcgatgtccaacaacgataacttctcagttaagtccctttacaaagttttagaccagattcttcagtgtgctttccggtgaggatagtttggaaccctagggtgcagccaaaaataagtttctttgcttgggaagcgtcttggggaaaagttctaactttagaccaagttcagaagaatgattggactttaacaaatagatgttttttatgccaagataatgaggagtctattgaccatcttcttctccattgcgaaaagacaagggaggtgtggaatatgttttttaccttgcttggtgtgtgttgggtgttcacttcctcggttagggagacccttgtgggttgggatggtgcttgggtaggcaaacagcgcagaacagtgtggaaaatggcccccctgtgcttgttttggtcagtttggaaggttagaaacagcattgcttttgatgttggggtgctgtccatgcaaaggctgaaagcctttttgttttttcactttggtcggagaccaaactgtttataaaatatggtcctatgacgttaatagatttcattgattgggtgggttcccattgagggaggtctttttgtacatctttgtttggtctgttttcgggtaccagctgtaagggggtaagtttcttttatctgtacatcttggaccgctttttgagcacctctttttaatacaatacctttgcttacttatcaaaaaaaaaaaatttatgcatctgattttagtttcctcttgaaattgttttaactatctttacattttttttttgttttatgctccttatgatgtgtgatacatttatatgatatgggtgcaatgttccagtatctatcctttcattaatgactctatccatttgcttgaaacttgcaaccaaactattctattcccaagacaattggtgcaaagtgcagggggggataagttgtagctcatcttgatgcaatctcccattctgttgatttgattggagcaaacctgcccatatcattgtgcatctgatttttagtttcctcttgaattgttttaaccatcttcacatttttcttctacattccttatgatgtgtgatacatttatataaaatgggtacagtgtttcaaaattctggtcagtatctatccttttataaatgactttctagacttgtcacacatgatggtaaattgaatgttgccatcttctaggaagagcattcaaactggttccagttgttattgatgaaactggtagtgtgaagaccaaggagattaccttaattcttgtgtcattgtaatcctgtggtgcagagatgcataccttaattcttctgtcattgttgtctttgacgaggtggcatcacatccctggcctctttagttacgcacttagtattatacaggacgttcttttgaaaccgagcccattcaaaaccatttcctgtcaagaattattgggttgggaaatgtagataatgtaattgtctatatcaatataagagaatttttaaggtggtgggaaaagatagggctttaataagttacataacttgtcagttgcttggtgcctctctgtttgttctcattttttttaggctgagagagatgcgtaaacaaagcaattaatatttttacagaaattcccttttaaaagtagtaatttgtatcacccatttcagttttgtccggatcggctcagttgtccttgccctgc

SEQ ID NO: 12626 - DNA, 15748 bp, Vitis vinifera
  Intron number 2 from transcript GSVIVT01038120001 (locus G SVIVG01038120001) derived from phytozome v7.0 (chr-ID chr5 ; pos 23617548 to 23633295 reverse strand)
gagaaaacaagattgccaaagcacgtcttaacttttatcaagagtattgcaaccaacttggtgtttcaaccggttactactataacaaagttcatattttttagttgtgatatctcgatttaaaacttaggtaatttcataatttaatgtaacgaaataatacagtgggccatttgaatacaatagagttttaaaattggtttcggcgtttgtctaaattgtctttgcctttaaaagtagtttaggcccttcaattcaactattggacttaggtattaagacttaagtgaattgaaaaataaatgatgatgatgatgataaaaggctttatacatttttgagagatttaggtgttggaaaatttttatatgggctaacattaattgaataatttgtatttgtaaaaacgagttaatggatagtctattctataatgagcccaattaattagtgatcacattttagattgggttttgcatcttttgagtagaagctcagttgagtggcaagtgtaggctatgggtctcattgaagcccattatgggagggcccaatgagaatccaatttgagttatgctaggtcccctctctaatctagataaatagggtttatctgttttcccatatagccaccatagctattatcaagatcatagagaggaagacttggctactgtagggaccccttcctccgagaacacgtggcacgcatcttgcagtgacacgtggcacgcatcttacagtgacacatggaacgcattgtcatccgggtcatcctcatccggatcttcctataaagcacacatggcgcactttgtatccggactgcctcaaggaagagcaaacgacgcttacaaagtatagacatccggatggcttccattaatgcgtccgctctacaatgcatccggataaccaacatgggctatccggatatgatcgtccgaatcattgattaaagtaaagcgagtcttacacgctatcacaacaaccaaccatgacccacgtcccatcacctgcagagtgaaaggacgggttgaggtgacaacaagtcacttcccacgatcattctacatgatcactttccacgatctctgacagccgcatcacctaccacggtttctgacagccgcccgtagggtggtgatgacactgctgccatctaaatatcatcatgacaacataaaatatctccccaccattaatgagaggaacagtactcctgacactatatataaaccttcacacgaggaggaaggtaatctcctgatacctagtaaaagaccaactgatttatatctccctctctaaccatggataacaaaaccatcggagggtacgtccagacaccctgtccggatgtcttttgcaggtataacgactgaatcaagaacctttgtgggttgagatcgcgtgtccatccatttggcaactacgtggaacaccaggagcgcgaggcatcaacagctacaacaatcaatcacgtttttttatcatggctcaaacaggtatgttctttatagtgatttcctattgttagtatcctttaatcatgtatcattaatctatatgtttatgtaaatatttttttacatgtggtatcagaggctgatttacatgatttaggatctacatttggaaatcgaaaataaaatttttagtttcttattttattttcttttcaaagccaaatctgtgatccatgaatgtgcatgtttttttttttttagtttcttttgattgtgaaactttaggctttttgttcctcttgtcacaagcttcaaattgatatatcatatgtgcaattttgtcgtttaaattgggagtaattaaatttttaaatttttggaattttcttgtttaaagattcaagaaaaattttatttgatcaaattattgtgttttactcaaattaaactcttagattttgttgtttacatatattatagttgatatgtagcatcaatttcggatttttggctcaatttggtgaaaattgaaaatttgaaaatatgggtatgaaccctagaaaattcgttttatttatttatttttttaaaaaaaaaattttgagcaagattgagaagtttttttttgtttgtttaattaattgttgtaaagagacttcttatattgttaatgtaaaaatacatgtaaaatgaggccgaaataggtgttaaaatagagtttttcaatcttggctatggaggtatgaaaaaccgaattttgttaatcaattatggagatctttaagttgtttttttttttttatgattaaatgtcctagaattgttagaaacaacctaaagtttaaaagccctcaagatcccgatcaaaaaaacattttttttaattgtttgtaatccgggttgcaaccgggtcatttgacccgtattgcagaattttggatccaatgttggaggttgaagatgacctccagcacatgccacacgtgctacacgttccccactcgcgggtcaagtgtgtgaggcgcgtataaccttatccggtgtccgttttgagccccgttttttcctgtacgctcgtttttttgtaatctatttttctagatatattattttattttttaggggtcaaaaatatttattaaataattattacttatttatgtgattaaattagcttaaaattattttttggtataattttctgttgagaatttacaagaaattatgctaatatatatggaataggagtgtagtactcactctctctagattgaaactttttcatacatactctcctacttggtctaaatcacataaactagttaaataattaatttaaagtgcaataaataaataaaaattgttgttcaaattcttgcaactataattgatcatatgcatatatatcgctaatatgcactattgctgttgggcaatttttttttaatttacccaattttggaacgttgcatgtgaattgttgaggttattttaccaaagtgatttaaccatcaaaatttgcaagtttatgagttcctattttgttgatggggaaaattttagattaatttgtacaatcgcctgcccaaagggggttattgtgcaaattaatttaacaacatgaggatattgaatgagataaataatttgataaatttatttgcccaaaggaaataaattttaataaattatttgttgatcttcatgcttagagaatagttgtttattgtggactctgcccaaaggggagtttatgatagtacaattgattcttgtattgtattgcttatgattatttaaatttttttacctattgcccataattgatctagttgcaaaattttgtcaatcagtttcctttgctgtgaacaacaataatgctacaattgaaattctaagtgggtcaaactataagagatggagatcagacatagagtttgttttaggaatgatggatattgtgatttattgtgacaataatgcagttgtgttctactctaagaacaataagattagtacgggttctaagcatatggaaatcaagtaccttacagtcaaggacttagtgaagaaaggagatattgtgattgagcacataagaactgagtccatgctagctgatcctctaaccaaaggtttaaagcccataacgttcaaggaacatgttgtgaatatgggtgtcattaagtcttttgattctttggtttagtgggagcttttgtgatttcccttatttcaattattgttttatgcaaacattgatcattattgttctgcaacttgcaaaattaaaatctttttattatgatcatcataattaagtattatattatagcatgtcgtaattgaattacatacaacatggtatcttgagatattgaaccttaagaattatagttgtatactattggatgtcacaaataccactattttgagattttgtggtgcattgttggtgacatatgacttgttaaagtcaagcaatttcatattgtttagaaattgcagcaatttcattttgttgagaaattgcaattacaatttcattttgctggtaaattgtaatgaggactgataagaaacaatgcatatagatgatgatcacatgttggcattgatttcttactacactactgggtttacgatccatgtcgatatggttataaatattcgtgactataaggggcattatgtttgttgagattaacatatagaccattatagtccaatattaagaccatgttggaccggataagtttaacaagatgctatttatagactatcatttctttcaaaaaaaaaaaaaaaggtgtggccacacaaaataaacttttctgtatttaacccgagagtcttattttcaaaatgaatttaatgaatcctcaaaaacaattaatgtagcccaagtgggagaatgttggaaattttttatatgggctaacattaattgaataatttgtatttgcaaaaacgggttaatggatagtctattctataatgagcccaattaattagtgatcacattttagattgggttttgcatcttttgagtagaaactcagttgagtggcaagtgtaggctatgggtctcattgaagcccattatgggagggcccaatgagaatccaatttgagttatgctaggtcccttctctaatctatataaatagggtttatctgttttcccatatagccaccatagctattatcaagatcatagagaggaagacttggttacaacaatcaatcacggttttttatcatggcttaaacaggtatgttctttatagtgatttcctattgttagtatcctttaatcatatatcattaatctatgtgtttatgtaaatatttttttacattaggtggtgtttgttttttggttgaatagaaaaaattaaaatatttgactgaataaaaaatgttaaaatatttgactttttttattcaactaaaatatcttattaatattaacaaatataactaaattaaaattattaataataaattcactttaattatattgattgatattaacaagttccttttaattgaatagaaaagataaaatatttaattactttttctattcagccaaaaaataaatactacattagtttaaacaaataagcaacaaggatatatcactaagaacatacttgagaataagggttgcatagaaatttgaaattgggtaattgaagtgatttggttagaaaaatattaagaatataataatgtcatcacataatattggaatgtaaaatataaggttatatttggttcttagagagcactaatgaaagaaaaaaaatatcaagaaaaataattttatcatgtttggtttttctatgaaaaatacaaaaaaaaaaaaaaatcaaatataatcaaaactagtaaaaacttatacattttttaattatttaatcttcatatcaatgggttaaaataagtaaacgaacttaaagtaacaaataaaaataatttattaacttaaatttttttttccttcactttagtttttctctctattttatttcctttgcatttttcctcaaattttttggcaaccaaatatagcttaaatattatcaagaatgtcaaattaaaatttagatgaataccaagaatgccaaattaaaattttagataaataccaagaagtaattattattattattattagttttattaggtttggattatgatttaaaaaaatatgaatggtcttaatagtgtaataagttattttaaaacggtctaattccttaaagtagatcaacgaatgggtcaagtaatattttcaaaattatattttgatttgttcctcaatttataaaataaattagaagtggtatattatttatttgattgttatgtgagcgaaattgacattctattttattataattattttgaaactgtggttattattaaagctaaccatccggtgtaagtttcattattcaagcacaatattattattactcaattacagtaaaatgtttatttatgtatttgttttatatataaatagattatgcaaatcatgtcatgtcattttattttaaaattgaattaaaaaaaattatgttatttatcaatgtgtagtttttcaaaaaaaaaaaaaaagaactttgttatggaactaaataagcctaattttgatcctccttattaataattgtattaattcttttcattgagttcaaaattaaatttatgtttttaggttaattttaattttttaaaaatctctaattatatgtatgattttattttattttttattgtaaatttgatgtggacattattcataagatcatgattttttttttttgggaaatttgagaaagggcatatgccccagggcccttactatagcagtatttttttttctttttttctttttggaaatttgaggagggacccttaatataggatgtctttcatagcattcttacgcttgtcgtgttaaccttaagcttaaaactgtggttattagtcttggtcaacaaggaataagttgtggactttcatgatcattggtagaggtaataatgcagtgcaactctagttaataaagaagttattagcctttaatatactattgataagaaatctttccgactaaataagagaaataattgaggctagtcacctactataagtttcattatttgggtatgttattttattggacgaaaacaaaatatttatttatgtaattattttatatataaacaaattatactaagtgcatcatgttattgatgttaaaattgaatagaaaaaaaaattgtgttattcactaatacctagtttttcaaagaaaatgaactttgttatgaaactaaacaagtctaattattagatcatttcagtaaagacaaaaaatttattttttaaaggaaggttaatgtagaggattcgagcattatattaaaatataataaccaacgatattttcaaaatataattagactaaattttcttaattcttttagttgtttaaatacctttaaatcataaatttcataacttcaaaatattaaaatttcaaccttaatttaagtacttaaatgtaactagaaaatcaggtgtatggttaattaacttaaagcgaataatttagaggacacttgacaccctagagtgtataaaaattttaaggtccatcttgttattcttgtattgtttaggagtatttgttatactccatgaagagaaggaaagtaaaggagtaaattcataaatcattcagaaatatataaactaaatgcaagaaaattcatcatttctcctattcttcttccttttggtggtgaggcttcaaatatgcattgaaggagagcaaaggttaggtgtttccaagttctatcatatgaataatcttatagtaaaaaaatcgtttatatttcttttaagaatttaatttacttttctttcatagcttaattattctttttgtccttagcatgagtgaggcagtgacgaagccagcaaatgacgaggcgaggggaggggggagggggaaggcaacatgtaactctttatgttgaggggacggtaatagagacattccttttttagctattagaagggcttcaaatccccttgaagacattttttttcaaaaaaaaaagtgcatgtgatgaagttctataattttaaccattttattttattttatgaaatatttggttgctaagagagtgaaggaaaagtgcacattttttataaataatgtccctacactacaaggaaaaaggtcttaatttgttgacagttttttaccattaagataaggtatatctatcaagataggttactattcatatatgttttctatacttgtgttaagaaaagtctaaagctagcttgacatatacatatgtcaagatttctctatttctactaatgatgaaatcttattagtatgatatctatcaatgtttcttttacttctgttaatgttgaatttaacatatgacaagattacttgatcttatgtcaaggttaacttactcttttgttaaggttactccaacaagtgtcaaggtcaaacatcatataattaatcccacatatgttaagatttctaaatatatatgtcagggttagattttatacaaatcataattgctttatatatgtcaatgtttggtatcacatttgccatagttgcaattgcacatgtcaatattgagcatgagccatatgtcaatattacttatgaaaattttaatattattttattaatttttttagtttttaatggaaaatgaacatgttatataccatatgaaacctatctcaaaattaaatttgggatatttttaattataataatcacaatcaagtccctaaaataatttaaataaattattatttaagggaaaaaaaattattacatatacattaaatattaagaacacaattccataaatctttttcaagttactctctaatttctatatacaaacaaaatctagctaaaaacatttaattaaaataatatacaaacttaaattgaaaagtacaactatcaattgagagtggatggtgcttatatagcatagattgagtggttactgatggtatcaaagtcaatcatcagtatagtatgagactttatctgtttaactctacgaagagtgtttgtctatttgagtggtgagctcctcttaactacataaatgtgttttaaaatcgtgaaaactcattagacctagaattattacaatgccaccaacctatcatcaatatcatgtatggctagaaaaaaatcacaacagttgcaacttgatttagctaccttggaactacaattacgccctgtcatagaagacattaggtttgaatgcttaaacaattctaaaactatggttgacgacctaattgtattgtttaagaccatactatggattttagaagaaaaatgtccacaatattgttggtcaagactttttagcaactatagctctagagctcaatatattgcccacctcattgggtttccaagtatattgtcatcaacttggtgtttatacttgtaatgatctcacttgttaggcaactcaagctctttatttaattacttgttttcaacatgtaagtataaggaagtaaaacgtgtactaaacatatatcaatactactaatacttaagctaatagcttaaacaaaaaacaaaattagcatattatagatttatattaggtggttatgatatacgttatgttaaataagaaagaatgattattgggttaatttcattcacctctcctaaggtttaggctatatacacctaacctctattagtttgaatttcgtcaaaaacctctcttactttgagtcaaagggaagatgaatgaagttaactattaacaaagataagagaagtttttgacaaaatttatttaattttgagacaaataaataagattgattattcaatttatttagtgtacattttatgtatgtatgattcaattcaacattgtctttataagtatttagcctaatctagaacattatacatggtatgggtcaaggataaaaatataagttttgatggatttatcaataatttgattttatagatatatccaaatatataagaaaatataggtgaatatttaaacacaaaatatcgacgagtgaaaattgacaaaaaaaaaaaaaaaaaaaactcataaaatattagaaaaaacataaaaaaaaatgatagaaaaaacaataatacatacattaaagttattttaacaaaagattgatatagatcaaaggatataatgtatttagttctgatatattaaagaatataaaagaaatgtttatatataaaagtattttttttattttaaaatgttaatattttatttaactttctatttttttcttgtatttaattactataactaaagttaactacattgaataaaacaagtagttatgcaccatctccaagctattatgtcacatattctcaatcttaagaattcatcaaactagtgtctagattaataattaatatatttgtgatatatgagtgagatcttaaagtaattatatatcgtgttgacttcgatgattattttactaacacaagcgctgtggttgccaccactgcatcaaccaccccccatgaatgctataactgagagccgcctcaatcactgcctacatactactcctatcatcaccaacccatcataatcaccaccaccactaccaccatcatcataaccatggttttaaaaatcggaccgaatcagccaattatcgttttgatttggtcctgtcaattgacctgaaaataggttgaaccagcagttcgaccggtgaattggacggttcaattaatatatatattttttacagtagcaaaacaacaccgctttagaggatataaaagtacattccaaaccctcccccttatagtctgaaccgtagcaattgccgccctccaatgtgccgcgacacccacgttgggatagctcctaccaacggcctggaaaccttgcaaaacctctcctccaccagccgttatagcgccgtctcttcccctcgtaccattgcaagtaccccctaccattgtaaaccttgttgcccctccccccgctgtaaagcccccacccgacccactccggctagtagttgcaaaggtctgatattttgaaatttattttttatgtttaatattcaatttttaaattatttattacacattttaatttataaattttagataaatttgcccattgattcatcctaagtaagatgtagcccctgccttcatttcgattcagatgttaggtttcattggtgtccattgttgaggagttggataaaaattttaaatattgtgacatagaatgagcatgagaaattctgggattggtatgttattttgattcaaattaagagtgatatctggtgaaattttaaactcatgatgtatgcaacccctatttcataaactatttttgagatggagtaaagagagtgtgagatttgattaagcatgtgggctatggtggcaagatctgaattttcaattttcaaatattcacaaagtctccatttccccctcaccctaactgtggtggcaacaatttataaaatttagatcaatgtttggtttgaaagtaaatttctcattttgaaaaaaaaaaaattctttaataaatttcaaaatttttgattctttgatttttttaaattgttgatgacttttattctctagattaatatgggatttttataaattgttgatgacttgattataaatcatttaattgttgatgactttcattctctagattagtgtgggattttgataaaatgttgatgacttgatgtttttttaaaattaaattgttgatgacttgattatagatcattaaattattgatgactttgattctctagattgatgtgggatttttataaattgttgatgacttgatttttttttaaaattaaaatgttgataacttgattataaatcattaaattattgatgactttgattctttagattaatgtgagatttttataaattgttaatgacttgattttttttttttaaattaaattgttgatgactttgattctctatattaatgtgagatttttgtttctaatttgataaagaaataaaaaaatggaatcaaacttgatcccatcctctggtcaagattcaactaccaattcacaaacaattagaagtaagatcgaccctacatgggagcatgtttttgaagaaatatatacaaatggaaggaaagctcttatttgtttgtattgtaaaaagattacaaaaggtgggggtattcatagaatgaaacaacatcttgctagagtgaaatgagatattggtccatgtaaatcgattcctcttgatgttagattttgaatggaaaattctttgcaaaagtttgtaaattccaagaaagcaacccaagaagcatatggatatagaaatccttatggttctaatgtgtcataatttgaaagggatatggcagaaggtgaagaagaggttcaagaaatgtaaagtcctatgacaactagtagtagaaaaagaaaaaaaatcaacagtggataagtattttgtaccaagaaatacccaaggagcttaactttccatgatgagtgtattagctgggaaagaagctatttggagagcagatatggtggttggaagattattttatgatgcatgcattcctactaatgctgtgaattccttctatttcaagccaatgttggatgctatatctgcaattggtcttggatataagggtccaaattaccatcaactgtgggttaatattttaaagaatgccaagaaggaagtttagttacttgtaaactcttatcgtgcaattcgggcaaaacttgtgtgtacaataatgggtgatggttggacagatactagacaaagaacactcatcaatttcctttgtattgtcgtgaaggaatatcgtttgtgaaatctattgatgcttcaaacattgtcaaggatgcaactaatttgtttctgttatttgatgaggtgattgaatgagtgggtccactcaatgtagttcttataatgactgataatgcagcaaattatgtggccgcggggagattgatttctcaaaagcataaacacatcaattggtcaccttgtgcagctcattgtcttaatttgatctttaaggatattggtaatatggaccatgttgttgaacttgtaagatgtgcatcaaatgtgacaatttttgtgtataatcatgttgctttggtaagttggttgagaaaaaagacatatggacagagattctccgacttggtgcaacttgctttgttgctacattcattgcactcaagattcttcatgatcataaacatgacttgcaagctttggtgactagtaagttctttgtggactctagatattcaagggataataaaagcaaagttgcagtttccatcatcttggataatagattttggaatgattgtttgattgttgtgaatcttatgtctccactaatgagcttattgtgtattgttgattgtgatgagaggccttcgatgggatatgtgtatgaaggcatgtatagggtccgtttgggcatcaagaaattgtttaacgacaacaaaagactatacaagcctcatacaaagatcataaagcaatgttgggatcaacaactaaagaaaaacattcatttagcagcttattgattaaatccatgtttccaatatgatcaggaaaacttttgtaataagtcaactgttattggaggtgtcatggatgttattgatcagaaagttctaaaaggcaagcttgatacaatgaatgaaatgaagttgtttcatgattgattgagaagttttggaagagaccttgcttattcttcacgtgaagtacttcaacctggtaaaagataattttcatttattagtgtgtttgttccgtttcattagttacctacttactatttaatattttaaacttgctaatgttttttttttaatgtgaaaatagtaactaggtaaatggtggagactacatggatacagtgcaccacattttcaaaagttggtcattcaaatattgagtcaaattgcatcgttttctagatgtgagaggaattggagtgtctttgaatgtatacatgccaaaagaaggaatagattggaacatcaaaggcttaatgatcttgtatatgttcattacaatttgtggctaaaaaatcggtataaatgttttcttagttgtttttgaatttaaattcttttatttacaattatgaataattatatacttttttttaggttatataacaagaaaagaatctatgatcccattgactatgcatgcattaatgagaccgatttttggatagttgatgaggatcaaccaacagagctagatgttgaagaattggaaaatcttctatatgaagaagggtcaattccaataaatgaagtggaaggttaaagttcttacattggttagtagaatatttaaacttataaaagttcaataattatattttttttcttcaaaaatgatttcttgttaatatatgttcaatatttttgtagatgctgaggatggtggtagcgtagctatagaagggcttgatgtggagaactttggttttatagatgctcatttttaatctctatattccaatttccaaaatgaatgaggacatgaattttatatttattagtatgcaaaaatcttcatgaattttcaaacatcggcatgttatattttgagtaactatttaagtgttgtggttgatatttgtattatctattatggacaatgtgttaagttaacaactctttgataatttggttattataggataacaatggtttgattatttgataaatattgggtttattgacattatgaatgtataacatcttatattgtgttatagatatcatatatgatgattgatgacttctacgagtaaaaaattttgtgaaaaaactcaacaaacaaagtagatgttgtcaaaatttagatagaatttattaatttaaatttttttaataatatataaaataataaaatatataattatgaagtcaccggtttgaccgtggttcaatcgtgggtccgaccaatgaaccgtgaatcggtaacttttctggttcaatgatcaatccgattctgaaaacattggtcatcaccacctccaataaggattttaagaaattgagataccactaaattgttgattttgacttaaatgtctgaaactatgttcactagataatctatgattcaattagagaatgacttgtttcataggtataacaaatgacatttttactacccatttctctaacaaaacattggtcatgaccacctccaataaggattttaagaaattgagataccactaaattgttgattttgacttaaatatctgaaactatgtccactagatagtctatgattcaattagagaatgacttgtgtcataggtataacaaatgacatttttactatccatttctctaacaaattataatccattttttatgttgtttttcttaatgcactctgtactttattttttgtttttgtttttggttctctctttctctttctctccccctctctctatgcatgtttcctttttttttggggagggatggaaaggtttgttgttaatgtaatacacgcattatttccccctgcagtgtgtttccttttttttttggccctttttttgttaacgtaattcacactatatgggtttatgatgatgtcctatgtccatatctctctctctctctctctctctctctctcttaccatttaatttgttgtgttgggataagtctagatggaaaagctgatagtgttaggttatgagctaaactacttcaatcaaatgttccttccaaagatcaaaccatagattaacatcctaacaaatgaagacatctagtggaggagatgagattttattactacagttatgggatcatagaaattagtcaatttcctattactgaaattaatcacaattagcagttggtgtttgggtgagattttgacagttaagaatagaaataccatgatatctaaaactatttctccagaggtaattctaatattaagtttaatcatgataatttcattaatttaaaagaatttctgacttaaatgaattaaaatataattcaattgatagataacaaaattccaattgaattatagacatcggttcatggagaatatt

SEQ ID NO: 12627 - DNA, 8218 bp, Vitis vinifera
  Intron number 6 from transcript GSVIVT01017458001 (locus G SVIVG01017458001) derived from phytozome v7.0 (chr-ID chr9 ; pos 8761141 to 8769358)
tattaaggtgccttctcactctctcttttttttttggtttttgtttctgttacattatttcaattgtcatgctttttggtggttaacatatttagtgtgcaaaaagatatagaaagtgtctgaatttaatttttctttcccattgagaatgttttctcacaacatcatggtggtggagtttccacaaaacttcagaagagaattgaggagcctggaaaattttgagagaagtgaggaggtggtctcgggtaaggactgtctcagtttggatctaccaggggaggaggtccattcagattgtctttatgcaagttggcttcctttagtagttttgtgggaatggcatgggggtgatttgagaagtggaaattctccttttagatttgagaatatgtggcttaaagtagaagggttcaaaggcttagtgaggaattggtggatgggttataactttagaggctctcatagtcatatcctggtagtgaagttaaaggccctcagacaggacctaaaaaaattggaacaaagaggttttcagaaatgtcaccactagaaaaggggtggccttaaagcaaatcagatttggggactccaaagagaaggaaatggctctatccgttgatgggttagaagctagaagggtagctgtggatgtatgtagcaaagtttttataggcgaaagcgtaagacgaagcgtttagtgcttatgaggtgaggcataagcctcaaggcgttgaggtgtaagccttttaggactttaattttcataattaataaatattttaattaattttaaatctataaaataaaattaaatcaataataagtttcataataaattcatttttcataaaaaaccatattaataattctataatgtaaattaaaaaataataataattgcagtacataatttattttatttgaaaaaaataattaatcgtaaaattgaatatagaaaaaaaatatactataaaataggaaaagaaaataatattaattaataaagtaagtgacctgtatttctatttttattataatatttttataaatttgatgatgatttcatggaatggaaaaactttctttcaataaatttaattataaaaaggggaaaaaatggaaattcaaccattggaaatagtaaataggaaataatgctttagaattttagatgcattaaaagggcatatgataggaggctaatgttggtttggctttttccacacaaataaaaaaaaagaagaagacataaaacaaagaaacgagagagatgaagaggtggagaaatagaaccagagagaaaatgatatatatgagcggagaagctagagaaatgtgagaaaagcaaagacaaaatttgcaacccaagaaacacaaaagtggcgaccccgatgagagaaaaagcaaactgaaacaatgagattcttctcgtctctctcaatctatttctatttgatttttatttttttgggcacttcagcaactccgttgaggcttgcacctcacccagaaggtgtgaaaagcgcacttgaggcgcttctcagccacacattaacccctaaggcatgtgcattttagggttgacactttttttcttatgcctcaatgcgtttggcaaccacctcgccctgaagtgcgccttgacgagcgctcgaagaacgcctttaaaaactttggtatgtagcaggtaggttgtattggaagagacgatgtgaagatggaaatcaaggataaaaatattagcttcttccattaaatggccaatgaatagagacaaagacatttcttagctaaactaagggtaaatggtgtttggttttctaaagaggatgacataaataaatgagagggtgactagagagcttttcaaagtctcattttcgaagtaagggattagagatctggtattagtggaatgagttttgaagcatcggggaatgagggaactatgagtatggggactttattcactaagaggaagtttaggttgctttatggccaatgaacatagacaaagaaatttcttagccaaaatagggtaaatggtgtttggttttctaaagaggttgacataaataaaggagagggtgactagagagcttttcaaagtctcctgtttgaggtaagggattagagatttggtatcagtagattgagctttgaagcatcaaggaatgaggaaactacaagtatggaggctttattcactaaggaggaagtttaggtcactttattggattcatgaggggataaagccccagggtcaaatgacttcaccatgacattttgacagttttgcttgggagatgattgagttattcactaagtaggagatgattgagttttttaggaagcctttttatttattttttatttttttataatagattcttcaaaaaaagtctagatgtcactttcttagttttgatcttgaagaaatgtggagtagacgacttaaaagatttcaaaccaattggcttagttaggggggctaaataagctattggtgaaacctttggctgacaaattgaaaaaggtgaggggaaaagtggtatcatactaccaacactccttgatggagtgtagacaaatcctaaatgcagttctcataggcaatgaggccatagattaaaagtggtgttatttgcaaaacgacattgaagaggcagatgatcatgtcaattggggtttttttttttatggtggtcttagagaaaatgagtttgagacaaaagtggattagatggatcaaatggtgcatttgttcaacaaaattttcaattttagttatcaagaccttgtttagattctttcaaagttctaggggttcgaacagtgggaccctttttctccttatttattcatattaatcgtggaagtgcttagttggattttgtggaaggctaggcagggggtcttcatctatggactggttggatatcttggtgtatttccacaacaactttttcggtgttaatcaatggtaccctagagggtttcttcaatagttcaagaggtttgcgtcagggagatcctctttctccttatctttttgtgattgggatggaggcctttagtaggcttattcatagggctgtgagagggggtttcctttcaggatgcaggataaaaggtagaagaggtgacggggcgttggattctcatttgctgttcgctgacgatactctagttttctgtgattcatcccaagatcagatgacttatttaagctggctgttgatgtggtttgaagccttatcaagtttgagaatcaatttggataagagcgatatcttgccggttgggagagtagagaatttggagttgttggctcttaaggttggttgtaaagtgggtaggctgccaacttcttacttggggatccctttgggggcaaatcataagtccgtggctgtttgggatggagtggaagaaaggttccggaaaaggcttgccaagtggaaaaggcaattcatctctaaaggcgggagaatgacccttattcggagtaccttgtcaagtatgcctatatatttgatgtcgttacttcgaatttctagagcggttagtttaagattggaaaaaattcaaagggattttttatggggaggaggagctttggagaaaaagcctcatctagtaaattgggataccgtgtgtttggataagagtaagggtggtttgggagttagacgtttgtctactctcaatagggcccttctttgtaaatggaattggcgctttgcgaatgaaagggataaactatggaggcgtgtcattagtaggaagttcggggaggaagaaggggggtggtactctaaagaggtcagagagggctttggagttggtttttggaaggatataaggaaggaaggtgctcttttgcaaaacagggtgggcttctctgtggggaatggtagaagggtgaaattttggaaagataattggtgtgggaactccactctctgtaattcattcccctctttgtatgcctttgcatcttataaagaggcttggatagaggagatgtgggatcattctggaggtgaaggggtttggagtcccagattctctaggccctttaatgattgggaggtggaggaggtggagagattacttgtgataattcgggggaggaggcttaatcctcttgtggaagattgtttgttgtggaaagagacaaaggatgggattttctcagttaaatctctttatagcattttagattcaagaagaggtgttcaattccctatcaacattatatggaatccttgtgtgcctactaaagtggatttctttgcttgggaagctttttggggtaaggtgttaactttggatcaactcaaaaagaggggttggtgtttagccaacatatgctttctttgctgtgaggaagaagaatctattgatcatattcttattcagtgctccaaggctagagtgttatgggaattattatttgctctttttggtgtttcttgggtcttgccttattcggttagagatacccttagtgggtggagtgactttaatatgggcaagaagcgcagaaaggtgtggaaggcagccccctcgtgtatcttttgggcggtgtggaaggaaagaaataggattgcctttgacaatgaggagctatcgatgaataggttgaaaaattcttttgtttgtaatctttgggtgtggtctaaaccagttgtaaatgaaggtcctctctctttactcggtttttttgattggctaggtgttaggtgagggctggtattgtatttctgcttctttttgtgccctagggcgtctcttgtatactccctgtatgcttttgggcctgtttttggggctccttgctaatatatgcttctttgtgtgtttgccaatcaaaaaaaaggcagggggtcttcatctcgagcttcacggtgggaggtagaggaagtgagggatttgaaaggatccatctcttgtttgttgaagatacttgaatcttctgtgacactggtcaagaatttttggagtatttgagtttgtcttttatgcggtttgaggtagtatccagattcaaaaataatttggagaaaagtgagtttatttcagttggagcagttgaaaatgtggaggcttttacttctacattgggatgtagggtagggcattttcctactacatatgtaggttgcctttgggagctactttcaaagtagtgagggtgtgagtaaggtggaagaatggttccaataaaaccacttggtgtcaagcttaccaatctactgcatgtcactgtttgtcatctcaaaagagttgagtctaagatttgagtggattcaatggaacttcctctagggtggggtcgcattagtgaaaaagcttcatctatttcaacaaaaagaatagaggtcttggtgttaatgacctctctactctaaacaaggcgctccttggtaagtagagctagagatacacatttgagggggaatccctatgaaaaagtgttaacataagagctttaggaaggagaagggggatggtgttcaaaggttgtgatggatggttatgagatgggcgtgtggaaggctattagagatttgtgagagtctttcatgagcagatctcatttcatactaagcaagggaagaaaggtcaaattttggaaagatagatggtgtggtgattaagcattggaagagtccttctcaacttatttctttatatctagtgataaagactcatgggtggtaaataggagaggaaggttgatggagtccctacttgtctagacaatttcatgattaggagaccgaaaagtgacaacatttttatagaatttgcatgagtgcccaatgagtggagaggaagttgacaaaatgaggtggaaggagtcttaagagtggtaagttctcagttaaatccttctaccacacattagcctaagaaaatagcaggtctttctcttcaagcacagtttggaattcatgggtacttgtgaaggtggtagtccttgcatgggcgacaacatgagcttggattttaatgattgatcaacttaaagggaggggatggacaatgccgaattgatgctatttgtgcaaacttgaggaagaatttattgatcatttgcttctttatagccctaaagaagtattttatgacaacttgttttctttttgtttggtgtagtttgagtaatgcactctacagtaacatgaaatttattgagttagaataaatctttggtgggaaagaaataaaaaaacttgttgcttggagggtcacctctttgtgtttgtttcaaacactgtggaaggaaagaaacaagaggtcttttgaagatttagaacaattagaataaaaaattaaatcttcttttatgagtatttttttgaaatggctcaaagtatacatagatgaccattctttgtttatgataagctttgttgattgacttagctcaaattaggagttaagagcttgttttttgttttctcttctcctcaagtgtgcctttttgggcgtcaattgtatttttttgtgccatttccttaggtgccattatatgtgtgtgtatgtatacttaaaaacttttcttttatatttttaaatgaaaattgaaaattttaattactaagtattaatattttaaaaggcttttaaaagcttatgccttgaggtgtgactctttgaattagccttgaggctataacatcagtttgggtaattgaggctcaagcctcatcctattctagtttacatccttgaggcttaaggttctagcctcatcctattctagtttacatcctcgaggcttaagcctcaaatattcaaaaggttttaatgggttcgaggttattctatacttttagtgtatattttataagaggcttaagcctcaatataattgaatgagttttaatgagctctatgattttgtagatttttggtataggttttataagttttctcatggatctaggcttaggttaaaccttttataaaatggcttagttaagttagaattaaccttttaaatgtaggggtaaaagggagattaagaggaagaaataggataattggtggttgctttagtagctaagctcatatataattattgtcttattattattgattgagaaggaaaaatatcacttcaattgatggatgaaaaagaatgggtagacagctatgcactgatggggaggatagtgcaggaggatcctacaagtgataatgatggtagtgtggaagaccattgaatgaagttgtgggaaagttgaattttagaagagagaaagaggaactcaattagaaactattcaaaatgatgaacaattacttttgttattataaattttaaagttttcttattatttaatttttatgtgattatattaggttttttttctttttttgttttgttttgttttgttttgttttgtttttttttgagaatttatcattatttatttatttgtttaagttgaagcttgtacctcattccacctcgaggcttatgcctccccttatttgggtaaaacacctcaggactatttttaaccttttaaaacattactaaatatgctaacaaatgtgctaaatatgtagtattcaacatttcattgtgtaatattaaataatccacaagatgggtttcgagaaaaaggaaactctattaagcttttagatgaaaaaataaaatttcatctagtcaacaagggaaaaaaaaaatcaagattgtttgctagagggctatgatataagttctattttattttatttttttaagttacatgttttgcatggacaaaacctgttgcactcatcttgtggctggcatttcaatgaaatcatagatatactctgcaaatatccacagctttttggaaccaataccgcaacttgtgattaatcatagtaataacacaaccaatacttattatgtaactttgctaattcaaaaataaaggatggtattcttactgctttatatctgaagatgcctcctttcatggaattaaagtgaaatagaagtatactgcttttatcctatagtttttaaagtttatgagttgcatcgttactactagcttgtaatgtgtgcttatgtagttcctgttagcattggtaatcactagattcatctatggtttttagagaataatttgttctgttctgaatgaagacaagaaagttcagtatatgtttttctcactttttcctaaatgcaggt

SEQ ID NO: 12628 - DNA, 3754 bp, Vitis vinifera
  Intron number 3 from transcript GSVIVT01012914001 (locus G SVIVG01012914001) derived from phytozome v7.0 (chr-ID chr1 7; pos 13360895 to 13364648 reverse strand)
actcaaggttctctgaaccatttagcaacatccaggtacagaaaacattgttgaatagacttctggatttaacttgatgcatataaccttcctgtttggattctattttgatgctaccaccatattactttgtacagaacaaaatatttttacttggattttcttatcattttctatggtctagcttagggcatttaaataacctttcatgttcttttgactatagatattttcagatgagtttttagctaagattttttttgaaagtttttagtaatgtcccattatgactacttgttgattgcttgaggagttataccctatgatctaaagtcaaggacaagggctgtgggtgttgcattccatgatagaggaggaatgttgctgtaattttatgtttagttgtttcaaaatagtgaacaaataactaggaacaaaattgttatatcaatgaagaatgatgggaacttgtagataatgggagaaatatctaaaatttctcaatatcaattttcacttggtagaaatgcaaaataaagtgtactaaatcatgaaaattttgcatggagctttaggaattataaatacaaacattagtttcatttgaagtcaaaatgttattgaaaaatgtttgcatgacaaatgtgcaatatgtagggtggaaacaatgtgcactgaccggtatttagtgatactacattgataaagtgccatgtaattagaaacattgaagtatcataaaatattcgttttaattaaaacacaaacaatttaaaaaagaaggaggaaatacaaggcatttaatatcatagaattcctagggggtttcaaggtgttattaggtgtattgaaggactgtcaaggaagctgtgagctacaaccgaaacaaccaagttatgcaaggatacatgaataattttctatgatctttttgggaggccctaataagccccatgccaaggtttttgaagattcctattgatgtttttttttcctctctcttgataacatggaaacccagaacccacttcacaagattgagggaaccacaatatgtgactcctcccaacaaagcatgtagcatggacacttaagattggacccagatctctagttcttgagcagtatgacttgtccactcaccaatagttcaacgtgcatcaactctttatggtccccttattcagcccgaatggtgtttaaaagttgaagaaaatcacccaactgagctcttcagattcattgtcatcctctccaaccataagggcatttgacttcttaggataatccttggctcaatgtgaaccattgcagttgaggcattccaagattcttgtcatatgcgtcttagtggtcttctcccccactttgggttgagacttcaccctctgaggactacattctcccattgagcctattaatgacaatcatccactccacattgcattctgcatatttgtccttaatgaacttgtgatgtccctcaaacaagtttcattggacaacaaggtcattgaagaattcctcattgtgggtggaagagaagagtcaacatcacctaaggcatctcccaagtatgcctctatctgagcctcatggtcctgtagtgcttccatagcacttccaccagtttttgtttcattacaaggaagctctgataccaactgtcactcaaattttcccctcaatgtttttgcattgtgttaagcttagaatccttctaaaccaacctatgttcttccacatgagattgccacaaggaaagtcaaaagaaaaaggataaggtaacacaggttacagggtaactcttctccaacttttattacttctacacaagtttacaagaacactcagcttttctctcaagcaagactcacacactctctcttggtgagttcatgctttgaatgattagtgggcacactagttataggcttcatcaatgaactttctacgtttataggaacaagctatttgaattcaaattcaaacccttttatattcaaactcaagtttcaatttcaaatgtgtttagccatctccattcttcaaccatttgccacttgtcccttggctaattcaaagcccctctattgttgtcacctattggcaacatgcaatggttgccccttaattagtgccacctgtctccaagctcaacacttcatgccaccatgttaggaacttcctgtttgctcatgtgtgagccatgctcatccatgtgccatagctgcacctcgtgtcattgagccctcgagttacaccacaccccatgacattctgcctatgtgtgcatgctagtaaggctcattcgtgtgccttactcaggtcgaaggcccctcatgtcatgcctttggtgtggcctaactcaagtcaccatcaccacccttagtcatgcaccacccatgcatgctaacaacatgtgctgcacctcaagccaccaccaaacctccacatgatccctcgaaagcctcagttatcactttgccttgctcaataggcactgataggtgcaagctgccaccccatgagaacttggtgtgtatcgtctgaggcaaggtgttgacaccatgtgatacatatttgattttatgcatgatgcttacattttatcaggaaaaagaaaaagaaaaagaaaaaaaaaaaaggcaagatgcttacatcttgagtggtgttacaaatgatcacagctgcccaattggtgtgtggcatgataaatttgaaaaccttcttgtgtctattttcttcttttaagttataaaggtcttttagacctttaaggtttaaaacaagaacctttctagcctttttattttcccttctgcctgtttctgagttgaatttttttgggcttttttcttcatctcacggattttcaaatatttttcttgataaagtttcaaaatggatgggtctttctatgcttgaaagacttcttgtagacacatgttagaaaggatttaaaaagccccttgtgatttagccactaaaggtgtgtggcaacaaagaatttttttactcaagccttcttttcctttcctggtatagtctctaatgcccttccataaatttatgtgcccctttcttgaaggtgtttctttttctttccctcttttttggagttggtttgtaagggtatcctatgtgcagttgttttccagtgaagtgcatctctaaaaagatttctctgaacagtgatctgctatttagtgtcctgaaaaagaaaaaaaaaaaaaattaaaacttcatcctagaagctttcctgcaagagcattagctccaactactgataagagccttttaaggtccaacgtgattcttcttttaataatcagaaagagcttttaggtcaaaagctatatgaaacaaggccacagagtgttaccccttggtgtcatttgcgatttctgctaatcttggtagttgtcttgttctcatgattctaaatggttgatgttgttgaggagggtaaagacaggtgtaatgtttgattggctgctaacaagaagttatgaattcatgttgatatcatctgaagagtaaaaggatggaagcttatgttccctttttcttttgttatttcttaaagattacagtgttagaatatgaattatgtctttgaagaggttagcaacaaagtctcctatgctgtaaatcacatgttatcaaaatgtcagtgaagacaatacaataggagactttcttcatggaaagttgaacttagatgacaacagttgctaattattgtgcagct

SEQ ID NO: 12629 - DNA, 17486 bp, Vitis vinifera
  Intron number 2 from transcript GSVIVT01036549001 (locus G SVIVG01036549001) derived from phytozome v7.0 (chr-ID chr1 4; pos 23323388 to 23340873 reverse strand)
aaagggaagctcttcgagtactccagtgattccaggttttgcacttgcaccctaattcggatcttctaattttccatgattttttttctctctttgcggtgaaattttatggtgttctgtgaatctgtgtttttggttttggtttggtttgggttttggtttttggggtatgggtatacggtgctgctttctgcctgttatttcactgttcatctgtggcctgcattgcatcaaatatgtattcatattgcagcgaaatttggtggaagggtcagagtctgacaccatgtttccattcaaaactccatatcatatgttaccaagagcttggtctcattctgaacatgacttctagtctctattcctgcaccaggtcctgcatttcttcttctcccagttagagaaagaaaaaagcgagtcttctcagacattatctttcaataactggtcaaaaatttggagtactgaacgttataaatgaaaattttaaaacacttttgtgcagttcgagtagtgcatctgcgtggatttattttgatcgcctgctgaaaagtaggagcaaatgggggtgcttttacttatactaatagaaattatcaatacttaattatttttattgggtgttggacttgggtgtgaccgagtttggccctgtcggaacctcactgagtcaggccatctgaccaagctatagggtccggccccctagggctttgtgtctgagctactgttttgggaaccgggtttcatattcttcattgtttccccatgagttttgtaacctagtactgattctcgatatttgttagtgcccttcttttagaaacattagcaggaccaattcccacaaaatttccttttgccttttctttttctcttagtttgtgtatctaggttttgtgttcgaagtgtgtgtagattatctacaggatctagttgctttctcctccagttgttttattttagcctgtcggtgaactgaatcaacaatggttcttgcagttgagagttcaactgttgattacaaaagctgccctactccctgaaaacttttctagctacaccaggccaccaagttagtctttaaccaatttcatcatcaacagcaattttgttatgttgtggagatctgaattagaaatcaggtggagaacgaagaagtttcttgaggattccatagaaatattttgggagttatttaggtacttatggagtttccagtcacggactaaaagccattttaataaagtcctctgaacaaaaagtggcaatgaaaaaaaccaagcctaacatgggaagaaaaacctttccaatcaaaacagtaaccacccagaaatgtcatatcctttttagtgtgaaaacctgcaacacaaagatgaactgcctttggaacagtaggtgaatggtagatcctgaaaaaggtaaagctattgaagacattaggcagagacaacaagtatcttatcgaccagagagactggtggttgtgagcagatctttgaaacatgctgtcggccgtttagatgtgtgtctatggctcttcaaactgttgccttttgggtcataaaatcatggtgatctcagagataagaccagaaaggtactcacaataggcctctcaattgtctcatcattttaaccaattgcctagatattcgcatgaatggaaatagtagaaattatacaaggttagtgaactgcacctagaatagtatctggtgaatcttcatgagaaacaattaggagaacaaaccaattgcttagattagcatctgacctatattttcttcaccttgataatattacacaaccagggagggggtgatatgaccatccccatgacaaaaaagttgcatttatatggaagttcaagcaaatgttgctgatgggatgattcaaacaacttcagacagagagctattaggtttctgcattcatgtccatgacattatcaaagaggaatcctgggttctatttcaagatctgaagggtaatatgaaacttcttgggtgatgtatacagtagtgcaacttaggatgaatgcaggagcatggtatgtatggttgtagtgatgaagaaagttgagagagattgattggttggatctcctgctttccctcctcttctaaggatgtctccattaccactataagtagtatgaaataaacaaaattcaaaatgttgtgaacaaagacaaaactcaggcaagaagggacactgagaaagtaaaatcagtgggaaagaacaatttcccaaaaaggcatgactgacatgctttgatactgtaaacaagtgaaggattgggaatagcatttttattttattttattttttcttaaacaaccatatatattgaaggatgcagcaatcccaatcttttttgtttcaggacaatccaaagcctcccatatttagttgcttctttggtccggtccgtccacttatatttgttgctgaacgagaatattctccaactacgtacgttatgtttctggctttcagattaggtccaacacctcgtatttataggtggtaatgaagagattccaaattcttttcttgagaaacttccttactaacttttaaagagataagtattcttctccattttgcaatgagaatccgcctgtttctccgatagttagtctccatttgtgggttgacaagaactgtagagaggctccatgataaccctttccatgttaagtactattcctttgctttttcttcctttcctgagaaatctccattatagcttattttagaagattctattactaagccatttagcagctctccatgtgtaagtgatttttgatccaaaatggctgaaggggaaggcctcaatgtggaaggtctaaggctgtcaaaactttcatgagatataattcagtactttgctatggttgagtgtaaatttatctagatgagacatctcattccattctctagaacttaggtgcgaggtgcctctctagagactttccatatttcaagaagctttcaaacttctccgagtaatctctcattgttaagaggtattcatgcttgttacttacggaaaactttatgctaagcatgatggtaaagttctcaagaacatgccatctctagatcaatggattgataatcaaggtttagaaaaccttctgcagtgtctcaaactgttacaaaccgaagtcaaatagaatgtacagcaatcctagtagatctactgagccatagcccctagaactacaactgcatattgatctcatggcatttgcatctagtttttaaagctggggaaggagagggaggtttagcacataaaatctaaaaccttaaaccaaatctgtagcatgcagaaagatatccctacatatcacttatagtccattagcttgttttattacatgtcaaaccctttaaaacaaaagaagctctttgcagaaaagttaggggtatgttttagcaaaaaccaccttgaagattttccagaacttaaaatctttatataatatctagttcattacctctactttgcatagattttccaacaaagtatttcaccatgacctacaaaggcaccaaacaagccctatgtgatgatttggatcaagactcaaataattctatatgaagaatagttgttcatgtaagaagctacttaatcattctgaactatgaggacttgtcacacccgttaccaacttaacttcagggagatgccttacatatatttgtcatagctagaagttgggcagaaatagaagctatattcgattatcaattcatatccatatagattctaaagtacttggattaaagtcatgacaagcaaaggatatctagttcctttacaacaatcatcatacttttgaagtgttcttcgtaggctctttggaaaagtgagatttagttttcatttttttactttttaaatctttctcagcatacttcatcaaatcctttaccctaatggctgggctatttccatgggttgggtaatacctttttttttcccctctaaagtctgaatagatgtacactaataaacttagatataaatagaggtgaatatcattaattgtttaatttgcattaaatgttcatttgtttgatttaattgatattttaatattattaatttttttttaatgctagaaatgtttgaaaatcagtaataaaaataatttttattgtttcttcttatttaatatattaaaatctaatagtttttagaaagaaataataattaacatatttccaaatatttcaaaatgttaggattattcattcttattttatacaattaagatagatatttaaaaacttataatttaaaataataataataatttaacatatttccgaatatcctacaatacctattccattataataacacaaaaattataatagttaataaagaaattagcaatcgggtattaatttatccgttcttattttatattatgaacataatctgtttgaaaactaataatttggggggggaaaaagtagtataatttgttttcaacatcctcaaatatcaaaattcataataggaatataaagtttataatgattaattatataactagttagaaaattagcaatttgatatcagatagtatttttaatcatgatgtttgtttactagaaagatgttagaaattttctattgttattaaaatgtgtgtttattgttgaaattaattgattgatttccaattttcaatttaaggataactttttatttttaaaattaatttagtattatataataaactatgtttgaagtctagctggagaaattttattagaatagataataatttatttatttgtgctttattatattccaagatattgaacatcaaaattttgaagtaaattcatttctaactcaaattttatgattttgtgttattggtttttgtttttccctaaatgatgaagaatctatgaaaattctaagtttaatttcattgagaatttgatgatttataagataaaaacaatggttatagaataatttatgaaaaatattttcaaaaattgttttttaaaattgttatcaaaaacacttttcattgtataaaattggctaaatttaatgagagttatgctggtttgctccattaggtgaagcaaaatttatttaggtctatcatggtttattccaatgggtactaaatatgggataaggatgcaagcaagctaagttactatacattaacttatgtattatgaatggaattaaaagatgaggtgaaatgaaagaaaagtgatttggttgctacatggagcaaaaatggcattaaatgctacaattataacactagggctatatttgtaaaatgtttttgaaaatagttccaaaaaataggttttaaaaacatcttttaaatatattttgtaaaataaaattttatttaaaaactttaaatactttagtctattttttatgtttttaatatgctttaaaaatattttatatataatacttttttataattattttttatatttatataattatttttcaaaacaaatgaaatcaacgaaagtaattaaaatatattctttaaaaatatcaaattttttatttttatattattgaacttatttttatatattttggttcttataatataaaagtattttgaaaaacagttagaaaacaagatgtaggatctagacagtgatcctatgaaaccttgaaagggttaaagaaataggcttagcagaagaaataagaactttcttgtttttggaaatggaaacaaaaagatgaaaacaacaaaagccttaatagcacatttctgaattgtcctgtcaaaaatatttatttttttttttttatttgtgttttaaaaaaatgtgagtacctgaaaaattaaaaataacctaagttgttttctttatttaattgcaaatatatataatttccatcatcaaacattgggtgcatgagagaggagaagaaaaaccctccctagtacaactataggcacctagagagataagctcatcatcttcagctaaggggaaaagtgaatttccatccatcataggcttacttctagggacagctttaagcctttctttttgttttctgtggctatgaatgaattcactagatgggcaggcacacaagtatggtgctgtatgtcctttgttagtacaaggtcaagcgaaactctgagggggcaggtggctcaagaggactgaatcatgtaagggaagactgatcgtttttctgggccataggtgcttccagaagaacaagaaaaaaaaagtggggggtctatctataaaggcacttagaatatgatttatcaattattgagttgacctctgacatgaaaaatatcaagatgtcacattattttagggtatttgtaggtaggtttattggataacaaacttatatgtttttctattttattttctgtctggttttcatttgaactaactttgattatgtctaataaaacccgattaagggttcaattatttcagtgtttgacaatgtttctactttaagtatttttaatggaagttgaaaaatcgtttgtttaatacaataacattagggatgaatgagtatattttaaaagattataataagatagttaaattattttaacttaattaaattttaagaaatattaagaataaataaactaatcaaaatcaaacacatatgtaaatgacataaaaatttatttatatagaaaactcactgaaactaaaaaatcagaagtttaacacttttgatttaccatccattataatatcaaaataaataaatttacctaattattttaccctaaaaatttactctccaatacttatactttaatccacgagacctatcatccctaatacttcaatagattcctctcgatctttgaggggatgtaagtccttccaacaacttcgaatcttttttttttttttttttttgagaaattgagaatgttatggtcaattaggttgactatctcttaatgcgtctaaaaaataattaaaatcatttaaaaacgtaagcattataaaaaaatttagaaatattcatattttaaatttaaaaaattgatttttttttttttaaaaaaaaattcaatggagagtaaatttcaaaatattcttaagttagaatgaaaagaaataaaattatcaataaacaaaatacaaaatataaacatttaaaaaatatatatatttaaaaatgttattaagcaaattctcatattttgcataaacaaatgaatgaaatatgcaaatccaagagctcaaatttgtatagaatgtgaagttatcaaaaagttcaatgaattaggaaagagtagttggatttttatcaatctggctagcattttgacagcaaatgtggatttaaatgtgctcaaatctcctttgaaatcatttgtgtaacaatttcatttagtttgagaaatttgttgagtgatataaaaaataataaaataaaaacgattcttgggcttttatataggactgccacattccagtggcaactccttaacatctcaacctggattctggaaagtttgaaccaaaaaaatagaatgggaaaaatataagcaaagaaaaagagaaaaataaaaatttaaaatcaataaattatttttatatattatttcaaatttttttcacttatttcactattctatataaattttaaatacttcaaaaatatacaaaacttcttaataattctagttatatttgattttttttttttttcatttttgatagtaaaaccaagtataagaaaatcatttttttgacttttttttttcttagcactttctaagaaccaaacataagttagaaaattacttttaactatgctctaagaaattaattgcaacaaaaaacaattgaacatttggtaaactatgttttaaaaataaactttaaatatttggaaattaaattgttataaatgtatataatacttgaaatatagatgttaaaatttaaaataggtttatttatttcgatataaaagttaacgcttaatgaaataaatcattgtattatcgaaatctatttatttttatttttgtttttaaaaaaatagttttcaaaaactactattgaagggtgaatgaaatttttttataattactttttgtttattttaacaagcacattacttgtaaaacaatattacaaaaatgattcaaatccctaagaggcacgaaatcattggttagcaatattttcatcttcattgtgagaaaatcgagatcataagatggatcacacaacagtactaattcctattatcttgcataaatttggtaagattggttctacaagtgaaaccctttattactttttgtcaaaaataataatttcttttgcaacgatgtcccattgtcaagttcccaagtaaacaaatgggttaagggtaattataggtatgagtgaatagtgaaaaatctataaaactatttaaatccaactaaaaccaattaaatttgttcggttttcaacgaccatcaatgatgtttcaatttggtaatcatgttacaatcatgaaggtcaatttgatttggcaattatgaaattaacttaattgggtcagttttttgtttccttgtccccccctaatcaataaaatttgaaccaaattgatattataagacttatatttcttttgatttatacttattcaatattcaatgagttttttttttatattttctactctattaaggcaattcattgttattaagttatggtctaaataattttttaatgcactctaaaggcatcattttctctatcaaatcgttttattcctttctagttcggactagtagctagggagtcttttcccacaagtattgtatggaattcttaagctcctatgaatatggatttcttcacttggaaagctgcttagagcaaaattttaatgattgatcagctcaaaaaaaggcgatgggctataccaaataggtgtaccatgtgtataaagaataaaaaaccaattgatcacgtcctccttcattgctttaacgcaagcatttcatggtaattaattttttgttgtttggaataggttaggtgttgcatgcttcaatgagaggaagccttcttggtttgcaagaatccttcgtaggaaaaaaattggaaaaagacatggaaggtggcccatttgtgagtgttttaaactgtttgaaatgaaagaaataagagatctttgaaagatgtggtacaattagaccaagcattccaacccatttttatgagcatttattttggaatgatttagagcacaaattgatactcattcctcaaccattttagactttgttggttgatataactccaagtgagggtaaaacacattttttgtttcctttcccccctattttgcctcctcatgcatataatatatacctcggtatgtgtttcttacgtgttaatatattttcttattacctatcaaaaaaatattttaaaaatgtactcattatactttaaatattcactattttcataggtattagttattcccacttgctagacttatttttataagtgctaactttcactcaaaatgtctctaaatgaagaagtctgcttcaaacctcaatgctctttttggccttagagtagcaattcttgttggtttgcaagctataaaatgttaaattaccaatttggttttgtttggtttccataaaatttaagagaaaatacgagggaaagaaaataaagaagaaaagtggaaaaaagaaaaaaaataaagaaaaataaaatatgaatttgaagttaatgaattatttttatatgtaatttcaaaccatattcaatataaagattaaataatttgataatatatgaatttttaattaattttaattatatttgattctttatagtatattttatgggcaatcaaacataagaaaatcatttttcttaattttttttttttccttaatactaggaatcaaacataaccttaccaaattatccaacaacatatatgaagctcgaaacagccatcctctcacatgtggagagataaacaaatggtatcataaataaatgctcttaaagaggtcacaacttaaaaatcttagaaccaaactaccgattccatgttagaaaaagctagatgttcattagttttatcctttcaagatcgtgttaggttggcaataatgctgctccttgggaaaatgatggctcacaaagttagaccctagatttggtgtgcttaggatttgatgtaatcttgcaaaatatcctagagattatgtatgactaggatatgaagagatttagtttgacctcactgactataaaattattttcaaatggaatagctaaatctttaatcctaacaaatgatatctgagccagctttgtttatgattttatgtgatccaggatttggtttgcttgggaaagcattagtttgactaatcatttttagataggatgactaagtctttatcctaacaaattggtcttgaattttctttgataataaactaagatcctttcctttcttccaaatccaatttttgtgctaatgttgtagcttatgttctatttattttttgtaattttgcatatttgtgcttaaaaatctatcaactagggcaatgtattaccccaactatacacttgatatgggtagaaacagaaaccatagaatgatccagtaacttgtttttaaccccaggtcattcaagagaataagaataggagaaggaaaaagtagattttagtttctctttatttcgtgcatagagatcttgtctaaacattgtgcataaaaattgcagatatgttggaagttgttaacactgttacttgagaattattattattatttatatattttactactggatgtttgccttgcatgtctgaagtgaatattgccttgcatttccctctatatatctctctttggaagaccatgactgaaaactctgattaagttggcgtgagttggttttactataataacgtgaagattggatccatcctagcactttagaaactttggtttatgaggacccaccaacttataagatcggtccagctctcaaatcatctcaaattacttgagcttgtagggaatgtgctgatagcctatatcaaaatggcaagcatgtttggtttcctagtgtaattcaacaaaatcttgtagtgggcattagtgagaatgcaggaaaatgatactaactttcctgctggttcatgaagcaccagaagaacctcgcttcttaaaattctgtagccatgcatcacccttatcaggaaatggtttttgcccattacttcatcctaatgtgggttcgatctcatgttcctttggaattgtctcaaaagacttacctaaatatatgaatcaatttgattgtgaaatagccttcctactttgacaaggcactctcatgctagaactattaggaatgataggtactagatccatagtattctatattattgtggaagtgtcctcaagtgctctccaattgacatcacttctaaacttattacttatcatataattttatttcaattaacttgactataaaagtaatgaccccatgttcttgttggatatcttacaaattgattaactattgatcttgattccaacttatctaccttttgtttcggcacatctactagacatccacatatgcgaacatggtgtaacgtagatttacgacctgtctacatttctataggagtcaaaagcatgggcttaaaaggaactaggttaagaaggtatcatgcagttttcaaggcatgcccctaaaaggatagagggagtgttgaggaactcatcatcgatttctttccactacttcattttgttgtaaagttccatgagcaagcaactagaatataatcacatgctcttttggaaaagaatcaaacctacccaacattaagggtgacaaaatatgatatgatttgccaacacaactcaaacctaacacgcttttcgtaggttgaagttgagaataattgagtttgagtcaaattcgtgtcaacctatttaatatataaataattttttggtcaacttgcataacacaaatttgatcgaagttgactcatttactaattatgttcattaccttaattgtaattttaaattatttaactcattttaaatttatttttaatgaataagttaattgaatcataaatatgtttggttgaaacattaatcacatagacatatggaagacctcactcaaccttattgttaaataggatgacctaattattaaataagttatacggcattttatttatttaataattaagtagtatttgaaattatatttttaacacgattattattcatgtcaagtttgggttgacctatgttgtagaatgcctagaggtttggcacaacacgaacacaacacttacatgaattgccacctacatttgacgttagaggtggcaacttttgttatgattcgctaacatgacttgatcccaacatgttttttgcagcttgagtttaggtcaaatttttgtaggtttgcataacctatttaataaataggtagattttgggttaacctacataacacgaatgtgacttgaattgactcatttaataatcataattaatttaattataactttaaattatttaacccaaatttgattgattttaaatttgtttttaaataaataagttaattaggtcataaacatgtttggttataacattaatcatatagacttatacaatacctcactcaaccttattattaaatatgatgacctaattattaaataggttaaataggttacactacatgttacatgtttaataattatatagtgtttaagtttatatttttaacacaattattatttgtatcaagtttgggttgacctatgtagtagaatacctaggtttcaacataacacaaatatgactcacttacatgaattgccacccctacccaacatgtactcaccacctcgatatgatcgaagtgccttaaggcaactcacttacctattgcttttccaattgtgcattaaattcttagaatttatccaaggcatcaaatttactatgcataagattatcataaccatacctaaagtaattatcaataaaggtgatgaaatactcataccctccacttgtatagacattaaaggttcacacacaacactatgtactaacgtcaaacattctttgactctatgttcattagaatagaagatcctctagaatcaaggaatgcaatatttagatttaaataacctaggcaaagatgtcatatgaaggtttgattagtgttaggtatttttttctttaatgagatttgattattctcaccacatggtagaatgtaagatgaagtgatacaacaaaaattatcaaccaatgggcattagatgaattttctttctaatagatgtctttattgaaataaactaaataattgcatttatttaaactagaaattgaaataggttctttctagactcgagtacataaaacaatccttaaattctagatgacatttattttttaaaactaaggtaacatcacccacgacatgtacaattatcctcacatcagaaaagctagagtctaagtacatgtctccatcattcaggcttctccttaattgaaatttttataattaattatagatacggttagtggcctcgatgagcccttgagcattgccattgcatctttgatggtttgtagatatgtttctccaccattgatgtccttgaatacttaaagtgagatctttcttctctttgtttacaaagatggattaaaaaatgatttttacaatgaagaaaaatccaatacttacaacccatctaagaataaaaaatagatctttacattctaaataaaaatctcatacttcttatggagattacaacccattctatttaatcaaaagattaaacatctagaaccacattcaaaatttaaatatccaaacattcatctcttaaggttatgggataaaaagaaaaatcctaccaaacaaagataagcgcatcatagaattgttttagcatgtttttttgcctaacctagggctttgatagcaattgtaggaatatttggttacacaaaccatcctaggccttggatctcatgagtgcatgcaaaatctatcctaggcttctctatatcttcacaatggaagcaaataagtattttaaaactttagatctagagattgggaatgatacatgtaatctagatgttcctttatcaattccattgaatgaagagttgtcgtggatctcaaagaccaatagatcttccacccaatggctctcttttcaagtcttggcacacaaggaagatggattagtctttgaaggggatggaggctaggattcctctctctaaaagactgaatggcagagttgatagaagccttaaaccccttaggggatttacataggcttgcttgtgggcttaagcacttaatctagcccattaagttttaattagttaattatccctattggattataattaattaattagtctaatctagaaagactatttataaacttttgtgcaatttcgtgcatttaccaatgcccttattcacacatatgaataaagaactcaaatatccctcaaaatgtgccaccatgaaatttgagcttgagcaagttactaaactcaagatcatataatattaaaacaatatactaaatttgtacccatgacctactatctattgtatgaaacttctcatgaactggtgtctttaatataaagaaatgaatgttatcaaactttcaagattacctttatgatctttgagtttcaaatcctcctattatataatcaactagtatactctagttcttcaaaaatatatatcaaattccacttattacgatcatagatttcttgatcacgtatccttaaaatcacctaaggggatacattatctcaaacctatgagatatcatagtacctatcttaagaatacttattgacacctgcctcaaaaaatagtaccataatccatagggaatagatgaccaccttagtatctcacctataggtcaaagtcattgaaaatcttaacattaacttagtattctctcaaggtttgaaagctcaaacaacataataatttggtaaagtcaaaactacctaataaccaatgtcatgactcactataggtgatgtgtaatgtgtaatcaatcatacatattattgcactcaccatgagaacttctcaatgaccaatataagtcattcttctaattataaggtaatgagtgcactacagtctcaaatagattgtctaaatctatgaatcatttatgagtaacttatttacttacaatgaactcgtatcttgaatctttcatataacccataatgcacccaagtcatgtacaatataagagatgttgagcataaatgctaagaaaatataatgcatgaataggatggataaaagtaaaactgaaagctttcaaaggctatatcttaacaaaaactttaacactactctcatgatcataacatcaccctaggttaaagagttgtaacaagttagctcagtgtcaaatttagctccctaatttttatcaagtgtcaaaatttggcgccctttgcatccagatcaagatcatgtcaattggttggatgcgaagttaacactgatgcgatttcatttgcatcaagtgcaaaaattttaacgccaccccaaggatcatgattagtttgctttgacaataattttcgatatttgatctccaataaagtcttaattgcgagcctacaaaaatcaagtccgatctccaatagaaatatcaagactttgtcattcatcttgacaaagcctttgaatcggtagcgtctaaatccttatgttttagcattttactattaatttccaataaagtctcagtctgatggatatcaagttctattattcaattaatattatatcatacctttgtgataggtatctagagaatgattgcaaaataatagtggtaataataataatgaataataaataattagaaaaaaaaaagtaatagtaataaagtttttttttcttttttttttttgcaaaataataatattaatgaataaataaataaaagaacccggaaaaagtgctaggagaaagttaaatatttttttccctgatataagcctaaagagggtgagaaaacctccctacaaaaagaagaaaaaaaaatgaccactatcaaatagaagtggtctccatatataagaaaaatgtagagggatcaacacgacttttgggaaagtagagtgatgttaaattttgttataaaaaataacaagaattgttacagttaaaatagaatttctcctttaaacgagagttttttttttttttttttttttattctttccatgcttatttgacatgaagtcttacccattttaaactatagaaaaccatcgactctcaccttcaataaggacatgttgaagttaggacgtgatgtgatgtggggcatttataaacaccaaaattttgatatcctcaaatcatatcaagatgcatcttttaggcaatgtgtaaatatctagaaaaagccctaaaatattctcaaatatcaaagaaacaattcatatacaaatgtttttacccactacaggaggtttcttttgttttagagaggggaaaacacaagtgaagaagtcgatgtttgcatttggtcttcaacaagccttataatcatgtggaagaaatcaaaaaatcaaagcacaaacaatctagtattcctcatgaccaaatttacaacaaagttaagatcaagtctaattggccttcgactgcacttcgactcaagaacatgtggttgcaccctttaatcaaaatgagttgatgagttggttaaatcaaaagattacatattctttagtttaaagaatacaacataacattgtatttgcatctttattaatataaatttatcggttatattttctttgatttcggagagcacaaaatttctgtgtacaacaactaagatctgatggcctgtgaatatgtgataggagttggcaaagtgtcggatcaattcccaactctttggctaataatgtaccaatgtcttaaataactccactggagcaacccatctctagttctacatctgttacccactttatgtagggctctcaattttttaggatgacattttgataaacatatgcccacttgatatagccatgtttataatgatggtttttttttttttttttttttcggctgatattcagtatatatgagaaaactgcatatttattttacaggtttcctttgctttcttgagttgggactgggagtgatgtgttgacctctattcatattagtttcttttacaaattcttaattcatgcatgtgagacctcactgatgcttaaaatcaacttttgctttttcaacagc

SEQ ID NO: 12630 - DNA, 9862 bp, Vitis vinifera
  Intron number 4 from transcript GSVIVT01023720001 (locus G SVIVG01023720001) derived from phytozome v7.0 (chr-ID chr1 1; pos 9999429 to 10009290 reverse strand)
ttactttggacgtcgtaaggtactgggtattattattttgtttatatgaatgttttatgctttgacagaaaatgatccttgaaatggcatatgtttggaaattggtgtttgtttactatgcctttgaacttgataatggttatgaagactgcccactgtaatcaccacatacctgctttggttaatatctgaattcttggtacttatggaaaagcaattcagaatttggttgacaactgtgtagagggtgaaacagagtgaacaatttaggagggtaaacctatgactttactcatgatcaacttgggagatgggattatacatatgtttgtgtgcaagtgcatgtatgtgtatgcctggatgttgtttacttattagtattattattattattacacttaggtgtcatttggatatactttctatttttaaagagaaaaaaattgtaataacaataacataaaatggaagaactttttgggacataactcaaaaagataatgggttttaagtttaaaaacaaaagataaatccatacttttgatataagggttcttacattttatatataatttactactatttttttatgttgtttttgcaaataaaaaattagtgagtgtattcaaacgaacacttaattatttatatttatttttatctttcagctaaattgaatagctgtcttaacaattgctatggactaagcactctgtccttagaatgtgaaatggaactaaatgattgaaaagtctaaacatagtgttgcatattgggaagctgcaccatggacttaaaaaactaaatagcttagatagagttccaatgtaatcatccaattgatggagcaaagtgatactaaggttagcttaggactattgatccctactttggatcccttttagctagacaattggttttgggtgttttaatggcaacaatgaggtttttatgtaaaaataaattgtccaaatggcttggaacttttgtcacattaatcaattggattttttttttttttgataaataagcaagcaatagattaagaaacgaaaaaaagccacaaggcatatagggagtatacacagtagcctaaaccaaaagacacaaaaacaaacaaccttaccagcccttcagtggatgctagccactctaaaaagcctaagagagacaaggactcctcaccaatgtacacccgagcccaactccaaagattacattaatcaattggatttttgtgatcaatcaattattatgatgaaattttttgtttatatagaaacatttatttcaagattgtattatttatttatttactagtaaattgagctttctagtatggtttcttcttgttgaagtgcaaccaaattttcctaaaagcttaagcttgtaggatttgggttcacaatatatatcaaactctccaacaatcttccttatgtgtagcttctttttctttatggcttgcacgtgagcttaataaattgaggaaataaaattatggtgatgaggtttgaatgcatgacctcccaccaaatgaggctttgataccatgttgttatcatgaagtcatcttgtggccactcatcaaaatttttagattcctgggaaggaggatctttcacaagatgttttagttttccatttgtctcaatatacaccctcatgactttagaccataataaataattaggtcccttttgctttactgaagtaatttgaatgccaacactatctctagatttattatcactactaaatgccatacttgcacttaaaaatagggactatttcatttaatatgtgtagaatgaagtgaaaactctattgaatttgttctgaaaatccagctgattacaaagggtatcatttgagaaaaatgacagcagcttgtcagttaatctccttgattctagtagctaacaaatgggaaaaacaatcctaataaagtaggaaataaaggttggaaatattatcataaaagatggacatattgtcctaatctctctctttaaacaaataaaaacttaattaaaataggctacaacccatgatctcctcaatcattcccagcttgttgatcaaagcttcaaaattggttcttggaagggcctttgtaagaatgtccgtagtctgaaggcttgtaggagtgtaaaacattttaactattccttattattattttttttttgatgaagcgaggttaatttccacatgcttagttttgtcatgacggaccgggttctttgcaatacttatagctgcttgattgttacaacatcttcattgacttctcggtaggaatttttaactcttcaagcaatctttttagtcacattcctccatagccttgaattcaaccttgacattgcttctttcaactacggactactttttacttcgccatgtaacgagattcccccatacataaatgcaataactagaggtagatcatctgttagttatagaaccaacccaattagcatatgaaaaaattcattgttcttgtttgttcccttttgaaagtacaaacccttgcttggtgtcatttttgggtacctaaggatctaatacacaacattaagatgttcatttgttaggttattcataaattgactcaccacactaactgagaaactaatgttaggccttatatgagaaagatatatgagtttccctattagtctttgataccttcccttgtcaactggagagcttccttctttcattcccaatttacaggttgaatccataggagtgtcagtaggcttacatcctagcattgctatttcctttagaaggtcctatagttttaaaaggtgcgctttaggtgcaaggcggcgcgacgtggagctccagcgcctcaccttactcaaggtgcaacccgttgaagaaagcgttgcttaggcgcggaaggtgtatgcctttggccaaacgcgaaggtccagaaaggcatgcttctctatttgttcttcttctcttctctgcagtcacaatccacttctaggcctaatctgggtgttttttattttttttaaagttttttatttcaccaggaatatacaacgttttgttggtggaataaaagcaaaagaaaatgcccaaattagggctggaagttgatcctaagatcgtgagaagaagaagaagaagcatttttttttttttttaacaacccaaaatgagctttaaagaaacacaaaagacccaaaattaaggctcaatagagagtagaaattgagaagaggacagaaagaagaaccaaggaagaagaagagaagaaggagagaggaagacgaagagaggtgcgtacctagtggttggcattggtacagtttcgatccgtcactaagtctcttttgggcatttaaatttttatttttatatttctatttatctattatgataatgaaattgtcaaagaaaagttaaggctacttatttatctaattgtttttattttttaaatttttacgtattttatatttttgtttaattaatttatttatctattatttatttattatgataatgaaattgtgaaacacggaaactacttatttatataattattattttcttatatttttggtgtatttttgtactgttaattaattaattaattaattaattatttatttatttatttatttattataataatgaaattgtgaaagacgaaaactacttatttatctaatttttattttttctccctttttggtgtgacttggactctttcgtgtatagtgaaggaaactcttcttgggtggcatggagcgtttgtggggaaagcttgtaagaaggcttggcaaattgctcccttgtgtattttttggttagtctggaaggaaatgaattttttagcttttgggaatggggagctttcgcttcaaagattgaaatattcttttgtatgtaatctttggtcttgggtcagggtttctttagttttgagcccttcttctcttgtaagttttttaaactggttaggctctaagtaagggaagtttgtgtgttgctttcctttccccttaggggtgtgtctttgggcttgtttgtatactccctgtatacttggaaggcactgtttttggtgcttcctctttttgtttaatatacttccattttatctataaaaaaaataatctaatttttattttttatttacttattgtttatctatttatttatgatgaattgtctatttatttatgataatgaactatcaatttattgtggttgtgaaatgaatacatattatgataaatgaaacaatcatgatgcttagtttttatgcttagagctatttgttttatgttttttgttgattagattgaaaatttagataatatttgatgatatatgcacttagaataaataaacagttattaaatttaattgtattatataaaattatatatgtaaagtaaggtgcgcctcacttcaccaaagcccgcgccttaagtgcgccttgcgccttaggctgtaggaggactttgcgccttggtgctccgtgagccttttaaaactatggaaggtccagagtgtacttacgttgagaaactgaaatgcccttccttgattgaggccatataatgacttttggagtttacagactgtgttgatgttgcttgttgtttcaaatcttggtggaatttccacgtagacttcttccaagtcatcattgaggaaagcgtttttgacatctaattggtggagaggctaatctaaattagctgccaacaataatagcactcgaactatatttagtttagccattggagcaaatgtctcttgataattaatctcataggtctgagtgtttgtacctgtctacactcccatcggttttatatttgacattaaagatccatttacatcccataggttgtttcccttctagtaagtctaagagttcccaagtttcattcttctcaagagctcagattgcatctctaactgctgcgctccattctgatttttttaagagcttcctatatattgtttggaatttttatattggagagattagtaacaaaggcacggtaacttaaggataaatttccataagacacaaacatggaaatcagatgttgagtacatgatttgacaactttcctccaagcaataggaatattaggatcgttactaggagaatcattagaaaaggattcatgaactgtattacttgaaagggaatcaagattgtttgaactcgggttggacgcttggttttgcttaaggagtgtatgatgctccatctcctcctgggttttttgtttccttgaataaacacaactttttattatttgcaagttgtgtgttggtttgggaattagtgttgtgaatgggtacataccagatattttgaggagaaattggtgcagacaagttaataggattagaccagacgatatcctcatttaatcaaagctgatattcttgtgtcattgagttgtccccctgaatattggttttgtggtagaaaggttgattttcaaaaaaggttacatccttagaattgtagaattttctagtgataggtgaataacatttataacttttttgattgagagaataactaagaaatagacactttatggatttaggatctagtttacttttgtggtgttggtgaacatgaataaacgcaatgcaaccaaacacttttaagggcaaggaggagatgattcgagtgtgaggataggcctagatgagggtttggcaaggggtttgaaatcttaggactctagatggcatcctattgataagataggaagcagtaagaacaacttccccttagaaatgttttggcacatgtatggtgaacataagggacttgatgactttaaggaggtgtttgttttttctttcagcgactccattttgttgtgaggtgtctacacaagaactttgatgaactataccattattcaataggtactccttgagtatagaatgaaaatattctttagcattgttagttctaaggacttgaatttgtgtttggaccatggagttgaagttctggaagattggaccagcttttgatttttctttcatgaggaatatctaggtagttctgtgatcatcaacaaaagacacaaaccatctagcccttgaaacattatttaccttagatggccaccaaatatcactatgaatgattgagaagggataagatgctttgtatggctgatttggataagtattttgaacaagtttggaaaattgacaaatctcacactaaaaaaactttggatttttatctttaaataatgaaggaaacagtttttccaaatacaaaaaactaggatgacccaacctataatgccataaaatgattgcactctcattattagaactaacgactgagatagaaatccctattggattggtttactaaggtaggagtgaaaacacaacttgcattttgagtttgttcttcaagggaatcatcaattctgggaatgtagagtctcacacactccttagcattgacaatcatcttctcagagtccaattcctgaaatttgcaatatgtgggaaaagacttagtagcatagttaaggtcctttgttattttattaatggacagcaagttacaagtcagatttggaaccaaaagaacatatttcaaggtcatgttctttcagataacaatggacctgtaccagccaccatggataatgacccattggcaattcagaccttagacttttcagaacaggggctgtgagtgtgaaacaaagtggcatttccagtcatgtgatcagaagcaccagaatcgattatctaggaacttggtttctcggttttgatgcttagagcacttaaaaaattacctttttgtgctattgaactggttccaataataggtgtagtaggacttggttgagattggctgaacattttttgaaggagatccatttgctctttgctgaatagagttgcctcaaaagtatggatgattgtctcctgtggtcatgaacccatgactttcacattcaggtggtggtcttgttgctttccaattagcgggcttaccatgtaacttccaacaagtgtctttggtatgtcctggtttacgacaatggtcacaacatgacttgcctctacaagttcggttgtcattgcttgaaaaatttactttgcaaaagacaagtgttgaactcttaattgtacccaccaagatagtctagttggtcaaggtgaacattgggaagtgtggtcccagtaagtgacacatggttctgggttcaaatcctatcattgatgataccttgaatttacttgatgttgattgttgcggggcggtcagcaccccgaggtttggtttcccatggagagtcctaagggcttggccatggaaggttcctcgattataaaaaaaagtgttgaattcttaattgtggtagagatgctgtgatttcccattatgaccttcttccagctttcctccctttggacctcaaagaatgcttcttggatggatgacaaaggcttaattccaaggattcttccccttgcttcatccaggtttttattgagacctaacataaacttgaagatcctttctttttcaacatttttcttgtatttaatactgtctacaggacattcccactgtaattcttcgaacatatccacttgttgccagtggtgggtgagggtattgaagtattgagtgaccgagagttccccttgttgtagatcatgtagaatgctctttatctcaaagacttcaacagtgacttcattgtcggagtaggtttcttttgctgcatcctatatatcctttgctcttacataaaacatgaaattctcaccaatttcattgttcatgaaattgatcagccaagacatcaccatattgttttctgatttccacacttcgaactttggatcttctttccatggagccattgcagtaccagtgagataattgtccttcctttttctgcaaataaacatcataacggactaagactattgaagaaaattgtgttcatttagtttatgccctgtaatgggaagaacagagatttctgatctgccattgttgctggagatgacaacttcttgattggaggtggaactcatcttatcggtggtcatgccatgcttaaccatccagatttatcatggttcagaggaggctctgataccatgtagaatgaggcgaaaactctattgaattcattctgaaaatccagctgattgcaaagggtcttatataggaaatatgacagcagattgtcagtaaatctccttgattctatcagctaacaaatgggaaaaaaaaatcctaataaagtaggaaataaaggctggaaatattatcataaaagctggagatattatcctaatctctttctttaaagaaataaaaacttaattaaaataggctacaacccatgatctcctcaaattgccttataaaatagggctctaaacctggaattccacaaaatggaaacaaaaggatgttaggatacttttggtactaacacatactcgtgatacttgcaccacaagatacgatcaatcacaaatgcgctagtattggatatcaccataacaaagacactgtagcgacatggtagcaaatcattgtagcatggcattgtagcgtggtactgtagtgtgacagtataatgttttattttttatttattttttatttttttttaaggttagggttagggttagggtttggaatcaaacctactctgataccatgttgaacaaccaattttcctaaaagcttaagcttatagggtttgggttcataatgtatatcatattctccaacacttccacttgtcatgaggaagaatttagaaaggtccctatttaactagaatatgaagaacctaaaatcatctactataatcctcttgggaatttataagtttcctacactaatgtgccaaaaaatggagttttcttggaaagaactggaaatccaacccactgctatgcatcaacactcaccttaatgtatttttcaggagtgacttttagggagttgatctatcatttctaagattgaaagatattctattgaaatctctgtttgcgtgaatattaagatcaacaatttttgtttttaatttttggagtcaagttttgaacgatttatttggaactcttctttacttagtctacatttttgtctctatgggagcatcatagcttctatttacaaccattaaaaatccctaacataattctgtatagatattcaattgagggtgcaacatgtgcagcaccaggtaccagtcttcaagtgcaattgtaccgtaattaccaagcatggagttctttttagatagaaacgggttttcttttcttccttttttttcttcttcaggaggatttggaatggtaagcatgtgtattgtagaactctagacataaatcctaacttcattcatcccataattcaaggggtaattagctcttgaatctatgttcttggatcttcttttggtgataataaaaatggttgcttgtgagtatctccttttgcattttattttatttttatttatatatatttcacacatcacttgtttttttcagatatttattttgatttgatcaactaaaactgtgctgtaaacaaatattatagactaatgggagtgacatagcacaattctatatgcctagtttcttttttatttatataaccaatacaaaagattgatttgttgtgagctatattgtgattggataatttaattgatcaggattcatgaaaatgcatactagttttattgtagatataactattttaatggttattttatatctacaaatcagcttggcaggaaggaaatagaagagatat

SEQ ID NO: 12631 - DNA, 5758 bp, Vitis vinifera
  Intron number 2 from transcript GSVIVT01021437001 (locus G SVIVG01021437001) derived from phytozome v7.0 (chr-ID chr1 0; pos 5348871 to 5354628 reverse strand)
gatttggtaagtgtgcagtttttgtgtattgagaagatattgctcctttctacattcaatttctaagatttgattatgtatcaaattatcatcatttcagatgtttttggagaaattataaatattttattgaattgaagaatgtgaagagcaaagtttacacctccagtgtattatcagttatacaaactgtagaagtttgatatgcccatgaggcatatctcatatggcaagggattgagatgtggatgagggaggttcttgatgtgattctttgtctgaaaattacctatgagaaaataatactgtaagtctgatatggaaagttgggaatagcaccaaataatcaggacagcataatcagaaaggcaacaagtgacacagagagcctctttatctgcagcatggcagaaggctttggtgtttggacttttttctgtactttttgagaatttagaaaagcttttcttttattgataaaaactagagggatgtaatgttcttcaaggcaatacagacacaaaaagtaaaggtcaaacagcaaaagttacagagaaaacatattaattcagagtaaaattcccttccatccatctagttgcttggatttgattttgggaaactacatcccaactcaccatctctttacccacttcattttttttttgtttttttcaaaagaaattcaagatttgatgtaaaagggaaaacacgccatcattttcttcatcacccgccctaaaccctaactaaccacccttccccttcttttctcctttccctttccttccttctcctttccctttccttccttcacctttccatttatcttcttctttaatatttctttaaactgaaagaaaaaaagggaaaaggtggatagctcattgcatgaccatggcatgcatgccttgctgacaccagcaaggcactgtatggctacacagtgagctctccctgatttttcttttcttttcttatttatttatttatttatttttattttatatttcagttaaaaaaacattgaacacggaatgaaggggaaggataggggaatggaaaagaaagggaaagaaagtgaaaagggaagaaagaggaaaaggagttaagttagagttctggttgggtatagtgggtgaagaagatgagccatttttactctttcacatcaagctttgaattaaaaaagaaaaaaaaatggtgggtgatcatatagttttggtgggtgggtatatgaccaaccttgggtttcattatgatgtccttttcactacttttcttccttatagatgattgagctgctgtttctgatgatgataactagtaatggtaatggttcaaatgaataaggtgtttatgtccctactcttctaatatctagtttttaatttttttcccttgccagttggttgtctttctgtttgtccttgtcaagtaagttctttttgttctggcacaattatagcttttctgattttcatgttttttcataaggaaacttacagggtgttgctattagacactattgcaaggtgttggtcctggaaatgggatgtggctgcgttaatattcaatacttctttctgcttagtggaggaattctaatgattgggagttggatatcctggagcaatttcttttttaactccaaggaaagtcgatgaagagggagtaggatagggtagtatagatggattatagcaatggaattttttatgtgaaagcttttattccatattggagccaaattgtgtcattccttttccgttagggatattgggacccttggattctgtcttagttgatcttttttgcccgggaggcttgtaggggtaagctgttgacttttgaccatcttcaaagaagaggttggtcgttagtcaacaaatgtgctccgcaaagttaaggaagaatctaatgaccacagtcttcttcattgtagcaaggagactctactagagtgtcatggttcttttgtgggaaaaaggtgaaagaaggtgtggagagccctcatgcattttctagactatttggaagggaagtaaccaaagatggtttgatgcactttccttagtaatctcctcttgtggctcaaggtgtacatggatgaaagctctatgcctttatttgattttgtagattggttgggtttttgttgagggagggattagttttttgtttttgttttttttttggtttgccttttggttctcgtcccatgtactttggtgcgctagtttttttggcacttttcatatattttgtctaatttgcctatcggggtggaagagagaaggaaggggggggggggggttggagaagcttctttatgcttagtgtgaaaaaatacttctctatcttttttactactcaagttgacaaagccttatcctagctacatagggtggctactcaaatgcttttcaacttcaagagcattgactcaacggacagagaggtcttagagataggagcaagatccatttggtaaaagggtcagatgtttgtaaggctaaaaattttggaggcttggggataagaagattgcagagtctcaatcaagctttgctaggcaaatggctatggagattctttgttgagtgtgaaagtttgtggaggaagatcatttgtggaaattttggggaggtggaggggggttagactactagagtgtggagggagtcatttgggatgagcctttggaaggacattagaaaaggctggaaagagtttattgctagaacttctatccgtataggaaatggtcgccgtacaagcttttggtgggacatgtgggtgggggccttcaagctaaaagatgtttaccctactatttttaggatagcttcccataaaaatgctacagttgcagaatcttggaaaagagaaggtgatgaaggtgttgggaggttcattttagaagacccttccaagattgggaggtagaggaggtgacccgctttttgggttctcttgacccgttaaaagtgcaagaaggtgaggacactttacgttggaaagaagataggagaggaatttttagtgtcaagtcttattattgttctctaagtggggagaataattttgtttttccggagaaggaggtttggagatcctgtgctcctttcagaacttgcttttttgcttgggaagctgtttgggggaagatcctaactataaacaccttaatgaagaggggatgacaaatggtcaatagatgtaatctatgtaaagagaatgaagaatcagccaatcacattctaattcattgcatcaagacaagagaactttggacctttttattagccctctttggagtgacttgggtatttccagatttagtaagaaatctccttcttcaatggaaagttaaggggttgccaaagaagattagagcagtgtggcgcttggctcccatgtgtttattttggtgtgtttggaaagagcgtaatcgaagaaccttcaaagatgaagatctctccgaccagggtttaaaggatctcttctttcagactctttttgagtggactagggatcctttggagccagattcccctctatgttgatttctcttgatactcttttttgtggttaactttgctttgtttgtttgtggtctttctttggttgaggtgtgtttggcttgtttctgtgtatacaacctgtatacgtagggcgcaccacctccttttttggtatttattaatgcatgctcttgttgtctatcaaaaaaaaaaaaaagtttcttagagccttttatttcatttttaaaattttctcatgtgcacattgtgtcctctactggtgtatgtcattgttatttaaggtttttctttaaatgtacatttttagattttgttgaagaaatacctgactgacaattacatcacaagcaattcctcactaacaatttacttttggcccaaaaactgcgaaattttcaaagaattcttaaaattttctaatttcctagttctggaaacaatttcagaacaatgttttgatctatatggcaagcatcctatttggatgaatataatttctaaaggaaacatgttatggtttaccaaactctaaattggttcaggttggctgttccttaaagcaagaagtatgaccttctgggagataagtgatgaggatgttcacaccttctatgttcctccttgtgaatgcaagaaatatgaagaacaagataacttgggtagtgtgcttgtagtacaataactaatcagtgttgttaatctgattatcattataaatgagggttgctgcttaaacaattattaaactgaaaacaacagtgccatgccaagactgttgcttgctgtcatttgtctgaatagaggacattgaacagaccatgcctgataattgagtggcttacctctacatggggttaatggcatttagttatcaccaacgaaagttttcatgaaaagaacagagatgatgaaggtgatgaagtaaagcaggtacttctgacatgtaacctaccctggatgtactcctggtgcagtcaattgtagctgtgctgagcgtctgggattggtctgaatgaaaactgctgactgattcctctctggttgcttaactctttattggcttggaaatgcccctctttttaacctgtggccaaaaaaccttttagttcaaatttgattttaaaactgcagaataattcaactgatggaacgatcatgttagaaccctcaaacaattttgtaatcagaatatcataattacaaaactgaacaaaaaactattatcttcagtctctctcttcctctctcgtccccatattttgtattcatgatatgtttgtggtgtttgtttctcagttaacctcatgatagatttgctgttactagcaatttcacattagtattcatttgccctttttttttttctgcatttgtttttttgtttctaaattattgtaactggatctctatagaacttttattttgataggcaaatgaacaatttattaaaaactccaataaaaaaggggggtcgaacctgagtacacaggaagcatatagaggtcaccaaaaggcaagaaacaggaatctcttcacaacttatttaccaaacattgtgatgattaaccacaattttaattttatgcctttttttattctgtttggttccaaaattatatgaaatatctttgtggtgctgcttgttagtgaatattggaaagtgctttggttttttctgtagtgtacaagggtagattgatggtgatgctatgtaaaatgagttgatggtatatggtggaatgcctgctaatcagcttcttcccttcatatgtgtgtaataactaatgccctttatagagaaccctctgaaacagaagatgaacatgcaagtggaaggaatgtagcctcaagtattgtttaattgagttatggaggaagttaagtgttgttaaacgtgggaatttttactggacttgatatgaaagcattgtgaaacctattttatttttcttttccttttttttcccttcaatttttggtcaagaattttggcctgcgattgttaaagtattggattttctttgctttgtatctttttctatatagtcctgatggctttttcagtcctactatttattatgcatagaagtaccaattatgtgtccatatttgatatttgttcatactttttctttaattgaaatggcactgcaaatctatggcatattgctcttgcagttccgattgcagttattgcttcctttaggaag

SEQ ID NO: 12632 - DNA, 6939 bp, Vitis vinifera
  Intron number 6 from transcript GSVIVT01036588001 (locus G SVIVG01036588001) derived from phytozome v7.0 (chr-ID chr1 3; pos 18737390 to 18744328)
aaagcaatttctgaggcccaactgtaaactggcaggtagtaccatttctttgttgaagaacttcttgttctatttcattccaagtaaaatacttctctctgttccagctagtgaaattctgttttgttgttgcttgatgtatttgtttttgggtcattagcatacaactgcatgagtgtttgaggggataaaatatgttaaaatgggcttctaataactccagttcgaatattgaaggagagccctcaaccttgaggttattcctgtgctatgagaagatgaagccttttgctttaagcagtttgagaaatcaaagagtttgatcactagattataagttttaaaaacgttaaatgttgaatttctgaaagtgagaaatacactggtattatttgaaattgttggacaaccaattttcttaaacacttaagcttataggatttgggaccacaatgtatatcatgctcttcaagatcctccttcacatgccgctcccatatctgcatgtggagaaacacagagactcgtagacaaataaaccttaggcaacctccattgggcttgcatttgagcttaattaattagggaaataaatttatggtgaggttcaaacatttatgactttccaccaaactaggctctaatatcgtgttggacaaccaattttcttaaaagtttaagctttcggaaaagttgtttgtctaacagatgtataagtgtaaaaatatgaatttttttaataggtaatttttcttttcttttctttttgtccccattaggacttgtggaacctcctacaaacccaccctaaccctttaccatttgagcaaggccttgagggctatagcctgaaaagtgtacatgtagaaactgagaattactctaatattcattcaaaattgtatttgtttacataatcgagtccctatttaacataaacacagagagcaaaaaaatggaaaaaaatacaaatatggaaaaatttaaaatcatacaaattacccacaattggggcctcaatctttccctcaatatcctacaaatcactattcaatttataccggatttccacactccccctcaagttggatcatagatattaatcatgtctaacttgcaaataaaatcttcaaagcttgatttctgtaatcccttggtgaaaatatctgccaattgttcccttgtagggatataagtcatgcaaataatccctttctcaattttctcctttataaagtgtctgtccacttctatatgtttggtcttgtcgtgttgaataggattatgagaaatactaatggcagctttgttgtcacaatagagtttaattgggagctctattgtaatgtttagttcttccaacagtttctgcaatcatagtccttcacacataccttgtgcaactgctctgaattcagtctcgacattgtttctggctactacactctgcttcttacttctccatgttactaaattcccccagacataggtacagtagcctgtagtagaccttctgtcatctgctgatcctgcccaatctgcatctgtatagatctttaccttcttactgtcactcttcttaaagaatagtcctctccttggagaaccctttaggcatttgaggatcttatacattacttctagatgactttcctttggtgaatgcatgtactggctaacaacgcttatggcgaaagcaatgtttggtctagtgtgagaaaggtagattagtctacctactagttgctgatatctctctctatctacgggttttccgttgcttttcgtcttttttcttgccttgataggggtatcgcttggcttgcatcccaacatgccagtctcagtcaacaagtcaagtacatactttctttgggaaatactaattcccttccttgatctggcgacctccattccttggaaataccgcatttgacccagatcttttacctcaaattctgtggctaagaccttcttcaacctttccacttctcctgtgtcatctccaatgagaatgatgttatcgacatacacgattaggatggtcatccttccatcgttggattgtttgaataacatagtatgatccgactgtccctgttggtatcctgggttcttaatcacctttgcaaatctatcaaaccatgctcttggtgattgcttgagaccatagagagatttcttcaatttgcataccctggtttcttcttcttccttatagaatcttggtggtagcatcataaacacttcttcttccagctcaccattcagaaaaacattcttgatatcaaactgatggagtggccaatcgaggtttgctgccaaggataaaagaactcatatagtgttcagctttgccactgatgcaaatgtctcagtatagtcgatgctgtaggtctgagtgaacccctttgcaaccaggcgggctttgtatcgttctactgtgccatccgccttatatttcactgtgaatacccatttttttccaatgcctttatttctttcatcactgcctctttccattctagaatctctaaggtttcttgaatgtttttaggaatctggattttatcaaggttagttgtaaaagcatggcactttgcagaaagagcattataagacacagatttcgagataggatggagagtacgtgaatgaggttgtttcctaagagcaatgggtaagtcatctgttacttgatcaggattggagccagactctcgaggagttggaactatcaccggttctaactcttttagtgcttcggagatgagtgtctcattgaacttcgattttggcctccttgagtagatgagtgtttccctatttgtctgtaattccgtatctccctttgagtttaagtgtccttctgtattaggcgaaggggtagatataaggcacagagtggattcgaacacagcaacatcgaggcagtcaaaggttaaaggtggtctagtttcactcactgactccccctgaagcgagtagtagggagtatgctaaaaaaatgtgacatctaggctaacacatagcttctgtgaaattgggtcatagcatttgttgcccttttgtgtggaagagtagccaagaaagacacatttaagcgctttgggatcaaatttgttccacttaggtccgtgagtgtggacaaacacagtggacccaaagacacgaagtggaagatgtgcatcgagtctagaatgaggaaaaaactcttggaatttttggaggggtgtaagaaaagataggacccaactaggcattcggttaataaggtgtgtggctgtcaaaatggagtcaccccaaaattgtgagggcatgtgagaggtaaatagcaaatcacgagcaacttcaagaatatgtttatttttctattttgcaaccccattttgctgaggagtgtcaacgcaagaactttgatgtataataccattttcttgtagataagtgcttaaggagtgattgaaatactcagtaccattattagtacgaagaatttgaattttggtgtgaaattgagtttgtctcatagagtgaaagttcatgaagactgatcgaacctcagttttatcaatcaacaaatatacccaacacaggcgagcgtgatcatcaataaaaataataaaccattttttatgggtactattaggggtacgtgagggtcctccatagatcactatgaattagagtaaatggtatggatggtttatacttagctttaggagaagacgcccgatgatgtttgacaagttcacacacttcatactgaaaatcccatgaagctttatttgaatatagtgaaggaaataaatgttttaagtactgaaaactaggatgaccaatccttttgtgccataacaaaagttcactgtccttaggacgggatgcagaattacaaacagtaggaggacattgtccacgcacatcagttttgtcgaagtaatatagaacctcacgttccttagcactgccaatcgtcttccctgatgataggtcctgaaaaacacaatgagatggtaggaatttagctgagcaattagacattttggttaactgactaatagatagcaaattgcaagataaattaggtacatgtaggacagggttgagagtaatagacttagaaatacgaatactctctttgctagcaacaggggataaagtaccatctgcaatttttacttttaaattactgacacagggagagtatgcagaaaataaatgatgagcataagtcatatgatcagatgcaccagagtcaataatccaaggagtaatatgagacatggtgctaagtgttgtcagaagggtacctttttgggccaaagaaccagaggacaaagtggtagaagactaactagaggcttggaaattagaaaaaaactcatataatttcgcaagttggtcggaattaaaccccacactagaagctgattgacaaatttctgtgggtgttttgtttgtctgggtttcggtggaggcttgatgactatgagcttttattgggctgtctgggcttccaattagcgggcttgccatgtaaagtccagcaagtgtctttagtgtgacccaatttcttacaatgctcacaataagtcctcttggactgtcttggacctgatccataatgaggcccaatagatctagcagcatgaggcccactagatccaacatgaggcccacggcttaaaagggctgaagcctcgggcccaaatgagagatccaacatcactctccttctgcttgcctctcgccaccgcaccttagagaagacctctcagatggagggcaacgatcgacgactgagaaccctgctcctgacgtcgtcaagctcgcagttcaatcccgctaggaacttgaagaccctcttgttctccaccttcttcttgaagcgcacactgtcacccgtgcactcccactcctcttcgcagttgagatcgagatcttgccacaaacccagcatctcggtgtagtattccgtgacttcctgatctccttgcttcatctgccagagctgcgtcttgagttcaaagatttgggaagtattctcggcatcggaatatgtttctcgtatcacatcccacacatcctttgttgtcgggaggaagatataagttttgccaatgactggcttcatggagtttcaagcatgaggtgatgaaggagttttcagaccaccatttctgggatgccgctacattgatccgaggtggtcgccaagtctcgtcgataagaagccctaactttccttttccgtcaataacaagcttgattgcttgcgcccactctctgtaattcttactgttcaatttttcaatggtaagatggagtggggagttgtcgaatgcactgacggggaccattgaggagtgtatctccaacactctttcatgggttgccgattgactagactcatggttgtctcctctttgggcaaccatggattgattagggttttagagcaaacaccactctgataccatgtagaaactgagaattactctaatattcattcaaaattgtatttgtttacataatcgggtccctatttaacatatacacagagagcaaaaaaatggaaaaaatacaaatatggaaaaaattaaaatcacacaaattacccacaattgaggcctcaatctttccctcaatatcctacaaatcaccattcaatttatatcggatttccatagtacatctttcaataatactatatgaataaatacctgtggacataaaatgctacgtgacaatgccgtttacaaagatctaattaaattgtaaaaaaaatatactaaacaactaaaatagctacaaattcaaacttgattagtaaataatctaatacgcaatttgctcacgaggttaagcatggagatttggtcaggtatttgccccacccccctcttaaataggtggataccaaacttccaccatggtggaaaatttcaagtaaaatagtctcatcatcaaaaggcatgagaaccacattttagccatatttaaattatacaaaacatttttttttataggcattaaaccataaggaccatatagaagtgcaccatggatcacaggtgccttgttatactgcatttgtttgagatttaaagaatcctacttagagttgctgcttttccaagtttattagtgttggccacaaaattagaagataattgcagacactggatgcaagatggatattgtttgtcgtgcctgaggtatgcttgttaaaacatgctaatcttggtcaattacctcatttacaaaaaaatttcaacatagagagaccatcaaaacacagtatcagcagaaaagaaacagtggaatgcagccttataccatcaaatattttatcatcgatccagtctataagcaagccattgttccacattacttcatggcagatttctgtttgccattaccattgtcactggaaattaggatttgtaactaccattttgttccatgcgtaaaaacatgctaggtatggagactctggaaaaacctaaccaaaaaggacttgtggtggacatgtattttgaatgagcatacataaaggaaagagattcttggttattatcttgctgtgcagcagagtctttggacctaatagtagtgagtgagtgcacatagtaatcactgccctagcctagtctaggagctgatgcttctcatttccagcatgctgccttgcctattttttgaatataaagtttccaattgagctgcttgcctttgctcctttgttagtggtttgagaagtttaatgatggattttatcattcgtcaccaatacatgctaaaaatgttacagttcatatttcattgttgaaagaagtttgttctttctgtttcttgaggacctttttgaaacttttgaatttcacatatctttctttagttgactgaaaatgcttgggaccttggtcattcagt

SEQ ID NO: 12633 - DNA, 1700 bp, Vitis vinifera
  Intron number 5 from transcript GSVIVT01015407001 (locus G SVIVG01015407001) derived from phytozome v7.0 (chr-ID chr1 1; pos 3347727 to 3349426)
catctgaacaagcaaaagccagaggttcaacttcagtaagtttgccaaaggtggcctacagagccaaaatcttttagatgttgatagaattattatcactagggctgtttgacaattgaagatactttttattcctctcaccattagaggaattaatatatttcatgttcttaaccccatttgtgatttggacccataatagttatcttaaggccattgccctgctgctttaaccgtggttgccaaaaacaagttcctagtttcttgactctggtaatgagctgaaatccatggatcctgtgcaagggcaaaatctaggaaagtggaggaaaataaagtttctgtttggttgcaacaattagaattgttttctgttttcaaaatgagaaaaatgaaaacaatattgaaaacatgtttggtaatgcattgtaaaacctgttttttggaaacattcttggaactgagttgttagaaaatagttttaattatcatttttttcttgcattttaagaatacaaacactttaaaatttgaaaatggtccaaaaatatacatggttattattattattattttatttttgaaaatgttaaatctttgaaaataccatgtttatttcattactactctgctttccttgaccctacataacctactacagtcagtccattgaatatctttaccttgtctgctgcctacatatgagaacagtgatgatattgcttaatgtaatataggcatcttgggtttacaccaggagctgcaaaaatagagaaatcaagagggacagtccactaagaatggttcttacctattaaagagaaaggagaaagtctttgttatctttctttgtggtgggagttggggatatggttctgtaaatggttccctcttaaggcccataataccaaactagccttcacttggtaataaccagtatgttttggataaactttgtttaagtagctaaagtgactcattgaatacctataaattttcaactggcgattcttgtttaatatgttaaactagctaatgtgggaactttagcagcatgtaaaaactaagggcctatttgcaaactgtttttggaaacaattttctattccaaagaatagaaaatagttttctattgtaaagaatagaaaatagtttcctaacttaaaaaaaatatttgacaaatttttcactcaaaaacagttttttgaggatttgttttggggtactttcaggtttttttttgttttttgttttgttttttttttttttttatggagtattctaggaaacaattgaaaatatggaggaacttttgcgttgtgcacgagtgcacagtaccacagagaataatatgagaagactacttttcatatttgagttcccaaatgaaattttctctgaaaacaattgagaatggtttttaagaagtattctagaaattgtcttttgagaattgattctgaagatgttgctaaacaagccctaattcttccgcatatactattatccttagtgactgtaaagtctgtaattatttctagttgctttgttcctttagcctcatatttgaagtgtatgtttcctctgttactagaaccagatgtttttaactacatgctatggcattggttgtatggctatcaaagtccggtgtgtgattagtaattttgggtttcaggtaattcaaagaaaactagttc

SEQ ID NO: 12634 - DNA, 2236 bp, Vitis vinifera
  Intron number 9 from transcript GSVIVT01018254001 (locus G SVIVG01018254001) derived from phytozome v7.0 (chr-ID chr1 5; pos 12468114 to 12470349 reverse strand)
ctgaagtaagtattgcactttctttgttagtcatttaacagctgtttgatttgatcatttgtatcatgggaagggcagtcagtttttgtttaataaaacttgtaatacagaggatgttttcaatttggtccatttttcaccaataccacaagtaatgcaatggttaacttgttttgttttggcttcccagccacactcccccttccttcctttttctccctgttagacaatatcagaattaattaagcacttaataaacttgtaaattgctttttcaactgtgcatcttgttttgtcttttatagagcagtatgtacatatttctccttttttatctgcttttgtatattttgaaaggatttgtcgtatgaatttttttgtttttttgtttttttaattaaaaaaattgagattgattacaaagaatttttagtttgcatgactcagtaatcagtggtttccgcttcagacttggaaattggaactattgcactgaaattctggcttagtatagggatagttaatggattaaattggaatttttttattttgatagttattttgcctgtcttcacgccttgcttctcataggttataagcaacatagtttcctgtgctggtgccaagtggctgaagatcattatttggtctgaaaattgattctaggagtgtcatttcaggggattgtgtgggagtattattttaaaagaatttcaaaagtttgaaaggcattgcattttcaaattcccattgaggtcacaatcataagctatacgcatggcagtatttcttatgccttgttattaggtttgtcttctataaaggtggtaatgctaccaaaggtaaatggtagcaagagatgtttgtagtaaagtgagaactacagaagttggtcagttgcaatgtcagatggaacctaatcagttctgtgtaggatgaacactcttctgcatgcttaattctttgtatatgaaagttatggacgtgttacagggttggtcttcaagttccatgacattcaaatttatgaaagtttgaaggtttaaaaggaatatctcctcttagttgcattatattggtctgcagatttctgataaactgaccctttgagtattcgaaatgcattttagaattgtatgtaatctgcaggtggatactttaataactgcataatcagttgattgcttacatgtaaattgtaattgttctttttttgatagacaaataagagtatttatatatagtgccacctaatgtggcggacacaatataccgaaaatatacaagtgagaaacaaaaaaccattgacagtaggtacaaccctacttcaagacttggagcacaaccattctataaaaactaataaagaacatggacctctctaagtgtcacctagaagaaaccctcaagaattaataatgagggattcgttgagagcttggacagtgtgttgctccccttcaaaggttcttcagtttcgttccttccatattatccataaaaggacaaggggagttgttctctaaacctttcttcttttcttgcctataaagctaccatgccaaccctttaacaaatcctcaacagaaaaagggagaatccatgagatgccaaaaaaagagaagagaaagtgccacaactctctagctatcccacagtggatgagaagatggtttgccgattcatctgcacctttgcacatacaacaaaaacctaccaaaacccatcctcttgtcttgagttagtccatggttagtatctgtccgcaaatcactctccaagcaaaaaaaactcgctctggtgggtgctcaagatccccatattatctttgaggggaaagacacttcaccctttgcttcgaatacatagaaagatctcatgaagaaaaccccagtcatgctagctttccaaaccgttttatcctcctcattctgattctaccaaacttatgaagttttaaaataaaattctgaatggcatccatctcccaattatgaaaatttcttgagaagcgtgggttgcaagcgaccatccctcctcctacctcccgaacatcttccacccatgcctccttagaagttgcagataagtgcatagttatgtgatatttacatatcaaaagaaagttcatgtgatatttgcatcttttatgtttatgacctgttaaaatctctctatattcatgtaaacagaactgattttgaccatgacgtatatatcctttttcaggacgtcc

SEQ ID NO: 12635 - DNA, 10825 bp, Vitis vinifera
  Intron number 2 from transcript GSVIVT01003861001 (locus G SVIVG01003861001) derived from phytozome v7.0 (chr-ID chrU n; pos 12968794 to 12979618 reverse strand)
atcatcaattgctgaatccagcatcagaagtcaaggtattccttcattaaccatccttcaatgttcaactgcaagttccacagcacaaaaagagctatatctaaaagatttaatttcatcacattatttgtctaattatgagtgctgaacatgtatgggtattaccaaataatagaaaattaagaattttttctttttagacacaactgagacaggcaaacaacatatgttttccgtgtcaagtatctgtagcaggtagaagaggggattttggtttctaccaagaactaggcatttatcctgaacattgaactgataggataattctgatcatccaataagtgtatcctttgtaaggcatgtaatgctcaaaagggttggcagtcaataatgcatgcatgggtgataggaccatcttaatttacctttcagcattgcaaaacctagtctacaagattaagttattgactaaataaagaaattaaaacatgccataggtgcaccaacaaaataaaacctttttttaacactgacagaaaaacaaaaacaaaaaaaaaaaaagccttagttgaacctgtgatcatagatacaaaattccaagttcatccctttttttaacaatgaagcctcttacagagtttgggaagagtcacagcaatattaaatatgcattaaagaattaggagacatcaaaagaacagaacattctgtctgaaagaggaataccaatgagaaacttaactaatcttaaaaccacacatgcatgcatacaattttgcatgtatgcttattattgtaagtgtattttgtgtgaatgcatgcatattatatggtacagaaacttgaagatcttgcatatgaaaccaggcttttaaatgctctttactgcaaccccttgcctattttactgtttactgggccatcatcacaatcatcatcacttgaccactagcttctgtccttgaagactcatttcaaggaaaactaatacctggatattgtatcttaatctagcactgaagaaaaataccacacaatggctagtacagctgcagaaactttcgcaaatagcatcctccctaactttttagtattttaccaatccttcatgttctgcaactggagtgccattcaaatgtctaggaatcctgtattccaagaacagatcaagcatgtagaaatattgcccattttatttttcatcactgcattacttggaactctacatacaacattcaaatttgtcaatttcttcaaaaagatatcatttgcttttgacagagtctttactaagtgataaatccccaaccacgtaatcgcatggacatttcgaatttcttgtcctctctccagatgtctcatgtttggaaacaagttttgaagtaaggtattttgatcttaatccttaggagtatcactgctaccaatagaatcgaacttcctgaatgctgtatccctaaggttgtgtccaattaaaaaaaatatataaaagcaatttattagtagttaaaatttgtccagttgtatcctgctgtccccttggggcacccaaaatacttttttttccaccaatttggaaacatccaacagtgacaatgttctagctcggcacgcatgacttcctgttatctatgtctgtgctatataggtcaaaattagttatgtgcactggattagaaattggtatgacaaactcagagtgctaacttttcttcacttttgcttagactaactaccttgggaaggagaggagatacttaggtagccttgctcttccctcacattttattcttcttattctgctcatttctttagttcttctttgttctttctatatcatatatagtcttcatggggctcaaatcactaggatcagggtagatatcttgaaaccttctgcatcaatgccaccttgtaaaagacccaattcagaaggtctttcattgtctaagaagagaattacaaaaagtaaaacaacaaaaagaggaatcataggattctctgtcattcatcaaggcgttaataaaagcatttatgcttcttcattgtaatgatgatttttgtcatccattttttcattctttgtcctttgtctcagtgaatgatattcaattttcccatctaaatggtagtttctctcaaacaaagaactccccactctcagctagtgtcaaaaagcacaactaatgctatcaggagcaaagcagatagtattgcaatattctagcatcttgtcagccaagactctctttaatggtattatgccaatagaaaagttaacatatatgaagcacttcaaaggaaatcaatgaagctctacattagtgagtcttcaagtgctacaccttgcaagaacaccacaagattgccatgatttgatgtcacatctaccaatttacaaacttttacgattacttacttcctatatttagcttccacttcttatcctacaagcatcatatctcaacatgcatgcagaacataacagcattcatacattttattgactaagataaacaaaaaatcatcatcacaaaatgattaattactattaaatattaaaaaagaaaaggaaaaatgaaaaacaaaggaagcgtgagatggcaatgaggatccatcttcaaagtttaatcacaaaaggaagaaaaaagagaaaagtcaaattaggagaagttaatttgagtcatagtagaatttataaaatttgggtttatagttttgttttaactcttattgcttcagagatataggaatcttagaaaaagagatagaatcctagtagagtaactagagtcctaatagatcttgggtttcaataaaatagagaattaaattagttttttcatgcatctttgcttgcgatgatgagattccaatacccttatgttttagatgagattcttagaaaacttcaatgaaattctaagactttatttcatctcttcttttctatcctttctttttctactttttattttattttccccactaccacaagcttaaataattattcctctcctgtgttgcttggtcttggttggaggtgtaaggtgtagatacatttctagcaatcaaattcttttaactccaagattaggatacaaagaacttactaagaaggatccaaaatttagacatggatactggaaacgatataataaagaaaaaaacaattagaaatcaattaaaaataatgtctttaataagagtttcctattttttttccttttatctttagcttttattccttatacctaaatatttttaaattctctcttttttcaatgtaataatctactaagttaaaaataaaaaataaatcaatcaatcaatcaatcaatcaaaatcaaataatcatatctaaagcaaagtaggagtatccaacgagaaacccacacccacacacatgttctgttaatacaatatgctagtgaaaaagaaaagtctaggtatcatagttcttctccttaaaccctaaacaagtgaaatcctagcccaaccatttaaatgtagacaaccatcctaaggttgtcctacatcaattttggtatcacaaccgaagttcttggcctgaaggtgcatgcaactaaggagaaaagcaatttagccaagcatgagttccaagactacttctagtgatcaagatgccactttaacgcatttagaagaagcttcaataatcacgaaaagaggccataatgaagcttaacaaccaaactagaagaaattatgaagttattgcagagaaatcataaaaaactactagttgaagaaggaaagggagtgggagttttaccttgaaaaatcacctcacaaagcatttgaaaaaggatgtaattttataacaagcacgtgtaatgagatgaagttgaaaatgaaagaacactttcctccaactaattattccaacttttgcagctaagatgttctcacctaaacaaggcaatagattagttgaacaatacactaaggaatttcatgagttgactatttgcaaccaggcgaaagaatacaaggctcaagtaaacacttgttttaatgatgggtttcaaatggagattcaacttgagatggtagtagcacatactaacacaatagaggatgtttaccaacttgccattaaatccaaggttaagcggtggtcttctctaatcaaacaagaagtaaaccttcaagtacaataaaatttaatactctcgttgatggaaatggaggcaacaatcaacaatcttctaatgcaactaacaaaaatgttaaaaaggtaaaacttccatgcattttgctaaaaaaagggttggcataactccattatgcttcaagtatagggaacatggtcattacgtggttgtctttccaaccaaaaggctacacttttgtgttgaagaaccgaaacttgaatccaaaccttatccaaaggaacatgagattaataatgatgagcaacttggtaaaaaagatagttattgtactgttttatcctatgacacctagacccttcaatttcacccaatgtacctatatcaacacaacatgacatgggtgtggacatgggatccttgttggacgcttctattttactttgcgtgtgactaatcttttcattgatatccttttatcctttcaacttaggaataattacattagagaaaagaaaaaacagttagctaaaaagagaatttttgtaagaacatttagggataagaggaaaaaaattaaaaggaaaagatgggaacttttaaaaaatatatctttaattctaatttatttttaattaacttttcctttattatatcgtatctcagtaccaatgctagttttttatattctttttagccgagtcttcatatcctaaaatttgagttgtgaaggatcaaatacctaaacaaatacccgcatccaacactcatacctaaacccatgcaacataggttgtatcccaagagccttgcaatgcaacattattggttgctctaaggacaaagaaaggagaggattggcaacatgctacttttccatatgggtgcttcttcccaagcaagcctttgtactatgattaccaatggaagtagtagtttaaatatggcttcataagatttcattgaaaagcttaacctaagaatgtccttattaactagcatacgtaaatgacacctctattttgaaattctcattgtttagttacatacattattagcaaggtctttgaggaatcaatatgatgtgatatcttaccaataaaaatttgtcatatgttgctaggaaggccatacctttttatcgaagagctcaacacaatggttataaaaatactccactcttctagaaaatgggtgtaagaaattctccatccaatgaaggaaattccaccaattaaggaattagacacattcaagaacggtgctcattatgcatgcacttgaatgggaaaacatggatggaaaaatttagataagagaactacaaagaagaaaattttgcaagtaaggaagaccaaagtgtttcttagtgttgattagattggtgatttagagtccaaatggattgagttcttggtcatggcagcaagacttatttaggaacaatttctaatatttatcatatgcaagatttttgttttaacccaagtaaccgaaactacattctaagcacactgcagtggtgatcttgtttagaaaatatatgcagcaaaatgaaaggcagctgctgttatatcagtacaaaattatgttaatcaatggctataaataaagaagcttagagctgtcattctaatttaaacaaagtgaaggagatgttaggctctcaatggtggttgtatcctatgcataatgaattttccattttttttttttttttttgtggaacaactaagaaaggaaaggtggaaagcattgctttagatttcaatatattgtggaacagctgcaaaaacttgaggtcaagtttcctccgagtggaggggattgatgaggatacatcttcaaagtgtaattagaaaatgaagaaaagtgaaaagagaatgaggaatcaaattaggaggaattagtttgactcatagtagaatttataaaacttagctttatagttttgctttaatttttatcagttaggagatataagtcttcaaacaagattaagaatcatctttgcttgtgatggtgagactccattacttttttcttctaggttaaattcctttaaaaccttattgagattctaatgctttatttttaccttctcttttccattcttcctctcttttcttcttttcttatctgacaaaaaataatctatcatatatttcattacattctggtttacaatatatatacaaaagaaattaagctacctatcaaaaaaggacccttaaagtcaagtaacctaattgcaagggtcttatatggaatttgcccaaattcttggtacaaaaatcatgggtcaacttttacaaaaaaaaaaacaaaaaaacaaaaaaagggtaaaaaaaatatggtagaagaaattagatatatggcaggaaaattaattgttaatttcttaggctaatattttaacaatcccctcaagttggtgcaaagatattttgcattcccagcttgtctaagattacataaaaagttgaactccataagccttgtgttaatatatgtgctaattgtttagaagatgggatatatggagtgcaaattagccaatgtcaagtttttctttgatgaaatgtcaatctatctccacatgttggtttgatcatgataaacaaggttatgggttatatttatagcagtttggttggtcttgaggcctggctcaagtggtaaagggatagggagggtttgtaggaggttccaagttcaagtcccaatggggataaaaaatttacctatcaaaaaaaaaaaaaaaacattatagcagtttggttatcacaatatgactttatggataaagaatgatctttatccagagtagtttacaaatcccttgagccatggccctaaactcaacttttatgctagatctagccactactgattgtttttacttctcctagtaactagatttcctcccgagaaggtccaacccaatcagcatcactgtaagcttccaattctatatttcctatcttatgaaataagattcccttgcctagtgtaaactttagctaacataggattttgcatattgcctccatgtgagattcatgtagtgaatgcatgaattcgcttaccaaacctacaacatatgcaatgtctagtcagggactcaggagtgagataaataaattaatttctccactaatctttgataaagatctaaatctaccatatcatttttttattttcctcatagtttatgattttactcaatcgaagtctctactagtttgcatccaagcatctttgtctcctttagcaaatagaggatatatttcaatttggaaataaatatccccccttttttaacgtgtcaccttaatctcaggaaatattttagactccctagatccttgatctcaaattcattgcacaaataaggttttagcttttgaatttcaccctaatcaatgacaataacaataatgttatctacataaactattaaggcaatcaacttaccaaagaagttgtgtttgataaacagagtgtatagtccccttggctttgatggtagttcatttttgttattgattttgtaaatctctcaaaccatgttcttagagattgtttaagtccataaaggaactttgcagacttcgcaaactttgttctttcaagccttgccaccaaacccaagtagagtgtctatatatacctctttttctaagtcatcatataaaaaagcatttttcacatcaaattattgcaaagatcaatcaagattagcaactaagaataatagaatatgagtagtgttcatttttgccactgttgcgaaggtctcttggtaatcaaaactataagtttgggtgaaactcttagctactaatctagtcttatacctttttattctcccatcagccttgtatttaattatgaaaatccacttacaacctactgtttcattccctttgggaagctcaactatatcccatgtctcaatttttttctaaggctcaaatctcctcattaattgttttccttcaattctcatctctaagtgtctcttgaacatttcattacattctaatttacaatatatgtacaaaaaaagggtcaacaagatcccttaaattaaactacgtatcaaaaaacaatcccttgaaatcaagcaatttgattgcaagggtcctatgtcaaatttacccagattcttggtacaaaaatcatggttaacttttaccaaagaaaaaatgtggtaggaaaaatcaaatatacggcaagaaaattaattattgatttcttgggctaatcttcgaacattatcttatttttccttgttaccacaacctataatcacagttccacttaaatccacaacaagtgaaatcctagccctacctattcgattatagataatcactcttgtttactacatcagatgacctatcatttactcacaaaaaaggaggtgtggtttgaatctttgttatatgtctatatttaataaggtttttctgggtaaatggtagaggatgtttcacgtggatcagaacaatttgtggagatgagttatctcaagaaaatatgggtaggttggtgctctagggaggggagatagggtttgaaattgatttttaggaaactatcagaagaggctatggagcaaaacttcggtgggatatttggagtggagatttggtattgaaagatttttttcccagttgtttactattgccaagaacaaggatgtttaggtggctgatatttggagtttgcaatgtggtagaggcaggtggagtccttgttttgagagattttcaagaccgacagttggagagtgtgagtcttttcctgcaacaggttccgtggacggtggtgcctagaggatgttagggttgtctagagtggagaggcaccaagaacaagatacctttgttaaattcttttatagatcattgactcatcttgttgcctttttccctcagaaggagtgtggtctcaaacactcctaaagtgactttcttcaacttctaactactaatctgcttatggattggggtaggcatttaactaattgcttctgcttctacaagttttgtgaggaaccagccaatcgcattccaattcattgcagtttggcctgtattttgtggaaactcctattctatcactttgatcttttttgggctcttcctcaatcagtaaaaataggttttacattgttaacatgggatttttgtaggcaaaaaatgtaataaaaaaaaaaaaaaggtgtgtggagcacagtcctgttccacttgtttttcatcatttggatatagaggaactcaagaaccattgacaatgaggaaagcacacctcaggctttaaaagagttttttaagtgagtggacagactagggattctttaggtcttcaaatatgtctcttatggatttgattgattgcataaggagttagttttcttttgtttttgtttttctctttgatgcctatgtatacattcagtacacttggggagtgctacccctttctgttaggctctcttaatgaatttatttagcctataaaaaataaaaaataaaaagtcaagaaaatgaactttcaaagtttaaaataaagaagagcactgagagaaaagataagtttctcctaatgactatgcttaagcatcacagaatagaaagttgaaactgtgcgaaagcataacagattatgaagttgagactcttccaatgtccaggaaaaatcatcttaatattcagtttcatgcacagaaaatgtaaattagcaccgccgcacactctgaaaacctgctctataggaccatccaacaagacatattataaccattataaacataaaattctaatatattaagggaactgcaaaagactaaaacttggaaaacaaagagatgcccaagtataaccattatgttaggatgtgttagtcataacaatgaaataagagaaaagtcactggtaaaccatcaaaagtttgtattatgttgtttatgcagattgcaagatgcttgtgaacactatgatataacaatatgggaattggatgttgcatatgaaaaccaaacccaactattacatattgacatgaaatgactttatatgcatgatgcatgttccttcacctgtgaatcctggcaaaaacatgagccgcctactgatcagtttgttatgccaagtttccattatgcataaataaaatccaaaaacttgcactactgattgatcatattaaaattttataatcaacaaacacctttaaagaatattgacaaaaggaatttgaaatgtaattaccaaaaaattcacataaaaaaaaaaaaaaacatatatattgttattagtacaaaagccctggactgcaaaacaaatactttagtagcttggctcatttctttaagtggtttcaatatactaactttatcatatcaggttgtgctcacattaattaagttttggaagcttatccttttcctttttttttctgttgatcaaaagggataacagaattacataaaaaagatgtagattcagaatttatcttatttctataatgtcaaattcatggaggttggagcttaaaaagtgtttatttttctatttagtcatagtggtagcaagtatcttacatatttgcatgccataatacgtgccattgcacttctgctagttttggcagagagaagcagcaattttaaggcaaca

SEQ ID NO: 12636 - DNA, 1472 bp, Vitis vinifera
  Intron number 2 from transcript GSVIVT01027110001 (locus G SVIVG01027110001) derived from phytozome v7.0 (chr-ID chr1 5; pos 17800498 to 17801969 reverse strand)
gttaagaacctgtttagccattacacttacctactgttaacttgatcatgaaggagatcaacggtttaccatttcaatatggacaacttgaaccttgattctgtagctctagtttctgttttaatcaatactgattggttaaccagaaaaacaatataaattactgatagatattcatttgagtctctttttgaatgtactaattaatgcacattcaaatgtaaattaatctggtgacatttaatgtcacacacatcagcaagtggtaaagaaggttgtaagactagcatttttccaatgcccttcatcaatattctagattttgtctcatttattagaagtttgtggtagttgagagcttctccattgtggcaactggaaactgagatgatgaatggcagttagtatatgtaatcccagtaagctgtttgtattgtatgaatagatttgcagtaaaaccctttaaagcaatgcccatgcaccctcacagtaatggaggtaggaaatgaacaccaaggctcctactgtttcttgcttgcttcagaaacaaggtgtgctttctctctttaaatcataacgtagaaaatattttttctgattcttttcattgtaaccacacaggcaaattcttggtttctattaatgctgccacaaagttattattgattataattgaaggtaatgaaatattatatattggcctttcattgtcttatctatcaaagatttgtttctgatatattatttagtttttagttatcataagagagggtgtttactgtttattgattactcatttgccatgatgaggaggatggtctgtgttattcttctttcaccttctggaatgatgttgtttaagaaaattaatataaacaataaaactttcacacattgtgtagaaaagatttatgggaagttaaaacaactttcttctactatttactgtgtgcttggattcttatcacctcttatctttccttcaatgaagatgaatttggaaatgtttacaaaatctgactggtgatgggatgatgagagaggataggtttctggtccattaattttggaaaaaagagatgtgagatgaatagggtgaaagtctcagtctctgaaatgaatgtctacgcaggcgtcgtctctgcttctggagcctatggtggatacttcactccctatcctatcaatactcaatatggctgagttcttgagtttaaaaacttggaacatgttgttctctaaggtatctacgggtgtaattggtcgagattcttttgcatgaactttaggctagttgttaaagacctacctcgttgtatttttgctgctagtttatattcgctaatttggaaccttctctcctacaaaaaagctttgggaatccttcccaatctggtatctctttcactaagtcaattaaccctggttcaatgttagactttggaaaccctcgtactacacagattgtttta

SEQ ID NO: 12637 - DNA, 6079 bp, Vitis vinifera
  Intron number 1 from transcript GSVIVT01023286001 (locus G SVIVG01023286001) derived from phytozome v7.0 (chr-ID chr1 2; pos 20101439 to 20107517 reverse strand)
tcgaagactcccgctgtcaagtgggtcaaagagtacttctctccctctttctctcccctccctttcctaccattcattatctgaagtagttgttttggtttcggagaaaattgagctgaatataataaaagtagtggaagtctttttatttatttattttttatgttttcctttttaattttctgtgggtgtttgtttatagggctcagttattatttctgtgagttgttcaaggaatggtgttttgatttttaccatcctatttgtgacattcatgatacgatgttgacgtttggtgtcagggaaaattgaggagaatattagaaaaggaaggaaagttttggttatctgttgtacagtttctagggcgcaattgttgtttctgtgaaatgggttaaaaaaatggtggttttctctttgtcctccttttcgtggcattattatgtaaagtgattgtttcgtttttgggaaaattaacgaagatatgagaaaaggaaagaagattttgattttctgttgggatctgtttctagggcttaattgtttttcctgtgaacttgggttcaagtaatggtgtttttctctttactgtcctttttgtatcattcatcatgtaatgtagttgtttggtggctgataaaattgaggagaatatattaattttctgttatcggtttctagggcttagttgttgtttctgtgaagtggtttaaggaacattgtttttgatcattaccttcctctttatggtgtttattacatcaagcggttgtttggttagtagaaaacagaggagaatgtaagaaaaagaaatgaaattttaatttctagggttgaactgttgtttttaggaaatggttcaaggaatggtgttctgctctttaccctcctctttttggcattcatgtgtaaagtagttgtttggtttctgagataattgcggaaaatataagaaaacagaaagaattttgattttctagtgaaatcagtttctagagcctaattattgtttcagtcacagttgttgaaggcatgcttaaagtgtccctaggctcaaggcacaactactccctggctatggcgcctcgcttgccaagacatgccttgttgaagaggcacgccttgtctactttatttttttctttttaagcacttttattcttgaaattttttactatatattcaaattcatgtaattttattacttttttattaaatgcttcttttaaatgtttgaaatattaaattttttgttacttggattggattttgaatcataatttacaaaattcatgtgcatcctatgttgcatttcactttgctcaagctcgtgctttgcaccttgttttggatccatgccttaagaggcttttgtgccttaggtgtgtcttgcaccttttaaaattgtggtttcagtgaaatgattgaaggaatggtgtttttctctttaatcttttcttttaacgttaccctgtgtagttgtttgtctctgaaaaaaattaaggaaaatgtaatggaatagagatattttctttaatttttggtggtgcctgtttctagggctgaactactgtttatgttgagtttgtgagacaatcgaggaaattgaaatcttgcatgtgctgttcaatgttttcctggtaatgaaaaactttcactttcactaaattgagctcagaatacttgttagacccttgtttctgccttattgttggctaaataggaaacatttgtccagctgttcaactgttattttttgtctgtgatgaaaagtgttaaggttgcaacaatttcactcttagggagggtcaagcagtaaaattaccaatgtaagccttgggatggtaaatccttggtaggggtgatgagtgatgtaagaccctgctagccacagtatggtgtaagcttggagatgggtataagttccaagtggtgtgacatcgaatagataaaaaatgtttaatttgatttcactggcaaccgattgatttttagatgagatgtctaatgtcttttgcacaacaattggtattggagccaaggtataggtcctatataccttgatttgctcgctctttttaccatattctcttctttacctatcacaaaaaaaaagaaaaagggaagcggccgtgggcaggatgggtggtgggggagtaggagaatggtttgagtcagaggctggttgaagttgcaacaatgccgctccaggagatggcataagaagtaaaaaccttgttgtaagcctctaggcggtaaaattccttggataggtgatgagtgatgtaagacctctctagaagccatgggatggtgtaagccccgggatggtttgctataaagtttcaagttggtataagcccttacgagtgtgaccttgaatagataaaagaggtttaacatgattttgattgacaatcaattggttttcaaatacgatggtttatgccttagtctcaacaagtgaggggttttttagtgtaatggtttaaatagctataaatctataacaagaccagaaagaagaatgattttattacatttatttattaatttcctacctctattggtacttaaaaagattatgattttaacgtaagacttgcgctgggatagaattgttactttggaacaacttacatgaaattgacccattttcaaacaacttaaaaattaaagcaatggagctggatatggtcatctgaaaaatggatgctattgtatgaatttatgcttctttgacctctcctctgtttttacttatgaattttcaaaattaattatgatatttcttaaaaatagggtaaataataaattcaaaattcaaattatgtaagcttattaatttgcttaagaaaggagagaataataaatgattgcgcataaatcttaaaaataaataagatacatgaggtaatgacagcatgcatagcgaatgccacccttttgcatttatgtaatttttgtgccttgcctgtctcatcagaaaagttaaaaatggaaaccattgtaagagagtgggaccccttgctgatacaaaaaaaataaaaataaaaataccataaactgacagtatcttatatgtaccttgactttcctcagtttccaaatccctctgtgtatatgtatgcttgtgaaaccctaaccccagccttaaaattgagggtcaaagcactaatggggagtcggctgaactaccgtatatctcaaaaacactccattcccaaatccaagacttctgccgtcaaatgggtcaaagaatggtaatctaccttctacagatcttaattattcaaattggttgtttggtttcctaggaaacaaggagaagagataaaaagaaaggagaagcaattgttttttcttcttttctttttcttctccaggtcacaaaaagtttaaggcatcaatttcaagggttcaatattgtttctcttttgtttatggaaagatttagaaggaaatgacttaaggttaaagaattttatgttttatgttgtttgggccttgggtttttggtaatgtaaaactcacctatgctaaggaagacaatgggtttactaggcataatttcatggtggtctttgttttattgtgtggcaaatatgaagcatttttctacaacatttaaactattgctgtcacttggttgccaggaaattaaaggaaaaaaagggaaaggaagtatgtctttttgttgttttggattcccataagtaaaacacttccataaaataaaggaaatagttgaatcatgcttgttttgatggcagtctttgtttttcctgggccaaaaacaatgaaaattttgattcgagttttttgttatacattttcctctgttttctcaaaatccatattttgggtttgcttttttttggctgttgttctggatcctagggttttataatttggttgcaatgtattgtccacttcacttgtatgatgatggaatcttaggcacttatgtaagtgactattttcttccatatataaaaaatcttctacttggagcattcttaactcaatcttatccttagaggaaacattgtcaattgctttttgaaatttattaagtatgcattataaatttttagatttctagtagagtttgagggaatccagtaacaatgcataaaaaataaatagtgatttggaaagatttgccaatctgacatggctttatagttgccttctgaaaattgtaaagcagtgattctagtaaataagttttcaataagatcttattgactataggcgttctagatttcattttaggtctaaatagaatagaaaagtttgagaattaacattcaagtgtaaaaatcactttggtgatgagtgcagtctgtagtgacagcaactactttaaacatgtaggagataaagtatctgtgtgaaatttatcaaaaactctatgaagctaccttgatatttttagtgacctataatcctataacaaacgaccaaaacttttgattttccttatttaatttaagaagattgatacttagaaagctagagttataatgcatcacagatttggttgcagacatgacagaaagtaaagcaaggcaagaaaggaaataagccaaataagactctagtatgtgtggttctgttaggtggtattgtgttgtttgctaatgtggtattatgtttgctgggatctcttaaaattagtgtgctttttggcactttgttgctgatatggcattgtggtttttagaatttgttacaaattgatgcggtgaatgagatacaggatccaaaggtcctagaagtttttagtataaaaggaggtgtaactgtaatcttgatgacagttttcagaaatatatctgaatttccaaatgtggagggaggagctctcctctaagaatcttttaacttcgtacttattttccatggcttctagcttgtttaggagatcagattgtttgtcagaagactcaaaactaccagattgctctgaaactacattgcactataaccatgtagatttaggcagctgataccaattttcgacatcatgtgtgtgggtaagtggtctgacagattgttattgaatttaacataacttaagacatgcaatttatcaaaaacataacttaggcatgcaaattggatcctaaattttccaaagaagtgattataaatccttgtatattcatactacaaaaaaaaaaaaaaaaaaaacagaaaagggcattgctatactgctcctgacatagaaaaagccattagtaaagttcgtaggggaacatctctgagtatctgttaaggttgaggttacaaggaatatggaatttttaaaggttctctttcagcttccaaagcatatgcccttccacttcggaagtctttttcttgtggtcctcttaaaggcactgaattataccaagggtacatctccgaactcttttttcttactctttcacaaacttctcatttcaattagcaaggacattcttaattgacttggaaggaatcccactgcatcaaaagattgagaaaagtaaagatcaggctggattggctgatgccttattccttttatgcaaactaaccaattatcccaggagaagcccttctgcatttcttggtcaatggtaaaagttctctctagtggcttcccatgcaaagagagccgctttggaggagatgatttgcaccctaattctgaagtgggaaactttcatcctccggtctaatcaatcttggaaaattgaaccatctagggggcattgaggcctagcttgctggcaagaattctcctcttctgattagattgatgcactctggtgtatctctgggagatcaactacaaatctgaatccaaatattcattgaagctcaaagatggcatgtaacatttgccagtcttggaatttgtgttgagacaagatcatgcgaataacaatgaaacatcctgtagtttgttttttctctttaatggttatttgtgcctcaatttattgcattatatttctcatttttattgtcatggaccttgtttataacctgggatattttacttttagggtgccacaagatcttgtagcaactggtgggaagt

SEQ ID NO: 12638 - DNA, 3059 bp, Vitis vinifera
  Intron number 3 from transcript GSVIVT01020601001 (locus G SVIVG01020601001) derived from phytozome v7.0 (chr-ID chr1 2; pos 3920462 to 3923520)
gaggtattttgatactttggcgatttagtgttcatagattcttgaataatgagttcccttttctctcttcatatatatacttatcaaaaaaaaaaaaaaagaaagattcttgaataatgagttagtttttgtattctcgatgataatggtttctaatgtcatttggattgtgtgttttaacaatgtttgctagcaatttttgagctgattttcttgcttttgaaagtaaaaattgcatttattttagctttgtaaaacaatatagatacttccataactattacctaaccaaattgtccattactgttttttattaatttaattggtaagaacaagctgcataacaaatattatatcaagatcattaggtttttattgctattcttataattctgcatgagagtgcccatgtataagatatcaaggcaacaacttgattttcagtaattccattggtacacattaatcattaaggaaatgcactttgtgctgctcaataaatttagcatgtgtttcttgtctaagcctcaatggccttttttcagtgctgttgggcaatagtcacggggcaggtgatagtgttgttggtggagtttcattagttggggaagtttgtgagaagtcttaatggtttcacagtcttggtgtggggtggggggttttgtttggggggatgagtacgtgaaggacttcaaacctgtcagtttagtagggggtctctagaaacttttgactcaatgtttggaaaatagattgaagaaggtttttgggaaggtaatcttagaggctcaaaatattctgagagagagagagagagagagtaggctgattttagatgtagttccaatcacaaatgaagctatggactccatcaagagattttgctgacaatcatggaaaagattgttttggtaaaaaatggttgaagtggatgggatttttcatttccacaatatgcctctccattctggtcaattgtaccttgattggtttctttcaaaattctaggaggttaagataagggaccctctctcccctcatctattattggtggtcatggatgtttccagctgtcttgttttaagggcagctcaaaaatgttttatcagtagtttcaatgttggggggtagagggtaaatgacattttttttcttttattgtggaaatgtggatcggctagtccattcaaggtgggtgcttctatgttccgaatttatttttggtttgaaagttaatctgtagaagaatgagcttatcccggtgtgcaaggtcattgatattgagaggtggggctgttgctttgggtcgtagggtggggagactccccatgtcctatctaggcctttccttgggagccccatttaaatctcaggctgcttggaatgtggtgcaggatcacttaaacaggagatcggtctcttgggaaaaaaaaagggaaaattgtttaaaggcacaaggcgctgggttcacccttattaaaagcgctctctccaacttgtcaatctattatatgtgattgtttgtcattccaaaggtagtgaagtatctaatggagaaaatcaaagagacttcctttggggaggaaagcccttaggcaataaggtgtgtcttgtcaagtggggcatagtccataggactaataatcttggtggtcttggtttaagaaggcttgaaactctcaacaaagcccctcttgaaattctaaacattgtctttagaaaaatgttatagttggaaagtttggggtgagtgatgatgggtggggttgcaaagagggttgagagctttatggagtaggactttggaaggctacaagaaaaggatgaagagggttggaggactaccatctttgttggtaatgcctttaaaaacaagttctagccaggtgggtggtgtggtgagtccttgtttaaggatcatttccctccttgtttagtattgcttctaatacaaatgctagactagggagtatttgcttggaggagaatgagtgtggttcttggaatcctttttttcgcaggagttttcatggatgggagttggaaaaatctcatagattctttgatttcattcagccagtgtcagttcgagattcggtggaaggtggattggtgtggagtggaattatggttgggagcttatctgtcatgtgttgttatccttccctttatgacaatatctttttgaagttccaaataaagggatttggaagtccctttgtgtatgtttttttaacttgggaagtggttttggggaagattttaaccatggacccattgatgaagaggggatggcaattggctaatagatgttgtatatgtgggagtaaggacgaattgacttgccgtcactgttctgaagcctgcatgctttgggacctggtgttggctttatttggttatcagcgggttctcccaaagaccattagggagcttttgttagcttggcaaggttcaagaattcaaatacattgaagcaagggtgcatttggaaggagcaaaatagcagaaccttcagggataaggagtacacaaatcagatggtaaaggaccttttcttgaaattgtttttttgattgggctagggtccatttgggaatcctttcctgatggaatttataaagggctgggtttctaaataggatatgtagattcttttgtgctgtgatttttttttattttatttgtttttttgcttctatgttttccattctccttgtataccgtcaatgatgtactagggatgtgccccccttttttcttggtgcctttgttattgtatcttatttacccatcaaaaaaagaaatgtatttgtcgtccaagtgttggtgctttctcttttgttatcttttgtctgtttgttatcttttgttatcttctcttttgtctgtttgtgctttctcttttgtgcatcaaaatttttgcactagaagttgatatgttattacacttcatctatagttaagattgcaatgcatttaaaatgtgtagttttgtaacttttttttttcttctatttgcagatattcgtctttgggatatagcttccaggtattct

SEQ ID NO: 12639 - DNA, 10250 bp, Vitis vinifera
  Intron number 5 from transcript GSVIVT01011753001 (locus G SVIVG01011753001) derived from phytozome v7.0 (chr-ID chr1 ; pos 4527307 to 4537556 reverse strand)
cgagcatctcagatcggtcaaagttgcttaataaggtttgtgcattaggtattggctgtctatagcttgctcttatatcaattacgaaggaatgaataatttctcactcttaattctgaaaaaggatgagtacaacttatatagatacaaggttgactaggctatagttaatttagaactaaatcagggaacctaattacatgcagatttctaggaaagaaataaaatatacagccttacagatcaattataatatttacaaacaaattatagccattcaaatctggacataatttgtcaaatcttccaacactccccctcgagcaggtgcaaagatgtcttgcattcctaacttgtctaagatttgatgaaaaaccagatttggtaaacctttgatgaggatgtctaccaactgcctagttgaggagacatggtatacaaatctgtctggaatccactttctttttgattaagtgtcgatccacttccacatgttcggtgcaatcatgatggaccaggttatgagctatatttatagctgtcttgttgtcacagtacatcattggctcgtttatcttaatgttaagatctatgagtataattttcagctatagtagctcacaaataccctgagccatagcactaaactcaacttctgcactagatctggccacaacagattgttttttgcttctccacgtgactaaatttccttttggaaatgtgcaatgcctagtagttgatcttctatccaccattgaacctacccaatctgcattagtataggcttccaacttgaaatcatcattcttttaaaatgttattcccttaacccgaggttgtctttagatatctaataattctatacatagcctccatatgagacttaagtggagaatgcataaattgactttccacactcataacatacactatatcaggtctagtgtgtgataagtaaattagtttgcccactattctttggtagatgccttggtcaaccatggttcttcattcttgtcccttagcttattgtttgactctataggggtattagcaggttttcactctagcatgccagtttctttgagtagatcttgtacatatttttgttgagaaataaaaattcccttttttaatcttgcaacttccatccctaaaagtaccttagactgcccaagtctttgatctcaaattcttttgctaaggtatggctttaattctccaatttcttccaagttattactggtaacaatgatatcatctatgtacacaatcaaaatagttactgtaccaagaggggaatgtttgaagaagtgtgtgatcaccttggctttgacgatgacccttcttcaccattgacttagtgaatcttccaagccaggttcttggggtttgcttgagcctatagagtgattttctaagctcggatactttgtttgtccaatatttgtatatgaatcaagggggaacatctatgtatacctcattctctaaatcatcatgaagaaaaacattctttacatcaaattgctgcaaaggctaatcaaagctagcaatcaaagataataaaattctgatattgcttatctttgccaccggtgctaagttttcttggcaatctatgccatatatctaagtgtgctctttaacaaccaatcttactttgtacctctctatggttccatcagccttgtatttgatgttgtagatccatccacatcccattgttttcttcctttcaggcaggtctataacctcccaagatttattcttttccgaggcttgtagttcttcattcatggcatctttccatggttaactggtcaaggcctcttggactgttttgggagtttcattagaggacaaatgagcaataaaggcatagtatctcaatgacaatctctatggcatcaagtcatattaagcatttatggatcacactctaatggttgggatgctaacactttagtcagatggtcacatcgctgtccttggaaggctattgctcaagtctttcaggagttttccttgtttactcagtttgtggtagaaaatggggaaagaatttggttctaggaagatttttggtggggggaccaacctttgggaacctaatatccaagactatttagagtagtcttggataaaaatattcctatttcttcagttctcagttttgttcgtcctttctcttgaaactttaatttccgccgtaacctttcagattctgagatagaggacttagaaggcctcatgtggtcacttgatggattgcatctatccctttcggtttcagatgtcagattttgaccattatcttcttcagggcttttttcagtcaaatctttctttctaaccttatcatcttaattttctggctctccttaggtttttccttctaagtgaagtcctttgtctggttagtggcacacaagaaggtgaatactaatgacatgctacaagtgagaagaccctacaaagcccttagtcctgatatttgtattctgtgcatgaagcatggggaatcagcagatcaccttttcttacattgctccttgacgattgggttatgacatagattatttcagttagctaagacggattgggcccccccgaggagtatctttgacatgatgtccatcaaatttaatggctttggttcatctaagagggggatagttttgtggcaagtttcgagcatcgctctaattcgggttgtgtggtgggaaagaaatgcgaggatttttaaggataaagtaaggaatttatagtatctttggaactctattgttttctttgcttctctttgggctttctattccaaggtttttagggggactccccttaatgtgttacaacttgactggttagcggtgtgtactccataagaaatggtccattatagagagttcgcttggtttcagtgtaatttcttatagtttagttttctttggtgggaggatttctcatccttcttttgtacttctttttttctattaatatatctctgtgtcgtttccaatcaaaaaaaaaaatctcgatgacaatctctgtgaggacacaaaatttgagataagatgttgggtgcatggtctaattcctttcgtaagagtagtaggcaaatccaaagcactactagtatgaaaactaggattgacatttccattacctgtcagtgtttcagagattggaggatgtgcaggtattatggatcttttcctcttggaatagacattgaaattaggtgcttcaggtctcttgtgctcagtctcaagtgactgaatctgcaatgtagcttttgaggaatttgagctcttgtcaagacttgaggaacttggactctgttcagtttcaatggacaggctttgaagttgatatttttggactggttcactctcaaaaggagtaagatgagaaggagaacgatcataaagatcagacgaatgattagatgtagcactagtaaaacgtgatctaaacagtgaccacaatcatgctctacaacctgagcagaatcaaaatcctgctctaaaaccttactagaatcctactgtcacaccctctcccgtaaggcctctattgcactaccaccagccatctctggtgcttgctctgataccaactgtcacaccctcgaaaatcaccctaaaattttcacctggtgcacggtgctaaggacccttccttcctagccttctcaaaacgcacacaaacaatggcaaaccaaaggaaacagggacacaacgatgttacatgaaatccttcccaacttgtattaatctcaactacaagatacaaaattgtttccttgagttagagggcaatgcttacatcccaagcattcagagattacatccctcttctccctctctctcatctcaaggctgtaggagcccttttaaaagactcttccccgagtcagagggcaatgcttacatcccaagcattcaaagacacttccctcttctccctctctctcatctcaaggctgcaggagcccttttaaaaaactcttccccgagtcagagagcaatgcttacatcccaagcattcagagattacatcccttttctccctctctcatctcaaggctacaggagcccttttaaaagactcaccctgtagtttttcccttggtggttatgcaaccgccctgaaccgcttgcacaaccacccaccacccagatggtggtctgctgagaaaccacccacttgcatcagcatcagcagtgcctcagcccactaccagtccatgcagctgactgactggatcactagctgtcccagctagtgctctgactagctgccatctcctcaagcttgcctcattaagttgccggagagccctcccctaacaagctgcctccttcccctcaaggtgcctcttgtgactgggtgcccaccaatgcgtctttgatcaaggctcttggaaccaagcagcatgcaccactagctgaccaagctgcatcagtgtgcctcccccacactgatgcgtgagcccaagccatgtcaaggtgcccatggcctgggcctgttgttcccactcgtcaggttcagcttcaacgagccatggcattgtgccattatacccggacggaaattctcactcattccacccggatatctcacattcggaattctgtccagccgacgttccaccttctccggatatactcggatatctcacatccggaattctgttcggccgacgttccacccttatccggatgtctcacatccgcgcttgtccgaccgacgttccatccacccggatatctcacatccggaatcctgtccgccgacgttccatccacccggatgtctcacattcgaaatcctgtccgccgacgttccatccacctggatatctcacatctggcgcctgtcgccggatgggagaggaggatgattcaacttccccgggcagacatgtctggatccttcggtaacgcctatccggagtgcgcatttgacttgtccgcgatccccacacttagctcctggggtttgaaccaccaaacctccaggctttccttgctttccgcctaggctctcatgggtgaaaggcctacccatgaagcctatttctccgggtctgaatcaagtggctaaggggctgacacctaccatctatcttccacaatcttgttactctccccttgaagacaggtttcaaagaaataaggtttgtttccaataaaggtaacatccatggtgatgtatttccttttgttgggaggatggtaacatttatatcctttttgtgtgtgagaataccccaagaaaatgcatttaagagcctttggatcatgtttgcttctcaagttgtggttatgaacatggacaaatgaatagcatccatagatttttggaggaagagaaacaatgccttgaaaatctggaaaggactctaaaatagtatatatagaagatttgaatgcaagaacctgagatgacatacggttgatcaagtagatggttgttagaatgactttaccctcatagattttagaaactttcatttggaatagaagagatttgacaacctctagtaaatgcctacttttgctcttagcaaccacatttagttggggagtgtcaacacatgatgattgatgaacaatgccttcattttgaagatacgtagtcaagtcattattaaagtattcctttccatagtcagatctgagtgtctgtattttaactccaaattgtgtactaatgagtttatgaaagataggaaaaatggtggagacctcagattttgattttgagggataacccaagtgggttgagtgcaatcatcaataaatgtaaccgaaaacagaaattggagaaaaggtggaggcttcggctatgcttattcttcaatcaagagactaattacattgccttttatagactaggttaagcacaatcagaaaacttaactctagtctaaaagataggaacagaaaattcaaaaaacaaattagagataaataccaacattaatatcctaaataaataaaagataacacaaagataaatacataaaaaaataaatatacctatcaaaaaaaaaaaaaatctagaatatccaatagtaacaaaccattgagaacctgaatgatttggaacatgagaaggaccacaaacatttgaatgtatcaaactaaatggagaaaaaagataaatataagataaatacataaaaaaaatcaatattctagaatatccaatagtgacaaaccattgagatcctgaatgatttggaacacgagaaagaccacaaacatttgaatgtatcaaactaaatggagaaagacatttaggattttttattgaaaatgaaactcgatggtgcttagcaagaagacacttgacaatgaaaattgagatagtcaaagttttcaaacaaagctggaaacacctttttcgacaatgaaattggaggatgtcctagctgtctatgccaaagccaaatttgatcaacttttgaagaagcggtagagaccaaaccttaagaccttaaaacacccatcttccaattagtatctaggtagtatagtctatctttttcctcagcatgtccaatcgtactccccattatagagtcctgaaaagtgcaaccagaagaagtgaatataaccgagcaattaaaatctttagtgatttttcccatggacaagaggttatagaaaagactgggaacatgcaacatggattttagagacaaagtggggttgattttgattgtgccttgaccaactatagaagaaaaagatccatcagcaatctttattttttgctttccaaaatatgtggagtaagtggaaaataattttgaaaagcttgtgagtgaatagaagaaaaagatccatcagcaatctttattttttgctttccaaaatatgtggagtaagtggaaaataattttgaaaagcttgtgagtgatttgctgttggggtaatgcagctgctctggtcatgaatcttgacccagggcattctggagaggaatctctattgtaactagaacatttttttaatattatttttatttttattaatttttttatcctatatgcttgataagatgtcatttggccctcttctggaacttattttccattacagttcactacttgtctgatgtgtattttatcattggagccaaagttaacttttaatataacagccagttactgtcctttgaaagaacttgatttagtatcacaaatttcttaagagcgagagtggttggagatctgaagaaaattcatatcaagtgtcctcactctgccatcttttgaaggtcctatatagtgttattggagtttgtacttgggtgtgactttaaattcattgaagttacatatctctgtgtcagtggttacttctgaatttgctatccccttttggtgtgacaatagatggtggtctcttcactttaatgggaaatattcttccaagtcctccttctacttccttgactaagtatagcataattgcacctctttttgttgaaaagtgcatctcatttccttcaatggtggaaattctaactgggctaacagttcataatggggcaaattaaaatttgttccttttgataattaatgatttcctttttgataatcaatgatgtgtttctgaaaaaatgggggggcttcacaacttatttaaattttgtaattttataggatgataaaggactgtttatcttctttcattcatgggttctttgatttggcagaagttctttgccttaatgtgcttaagttggaatttttgtgagtgggactctattagggtcttaaaagagttgttatgtcatgttatttggttgatctaagtgaaggaaatagtataatttgtttatgatgtttatggattggtggagactgggataatattttggcccatgtttctctattggcttcagtggctgtggaattttgaggatttcaatgcatctcttattttgtagaattgaattccattcattacttctgtaattgttattgtaactttttgttctgcattggaaagccttgctattgggcacaattaagttcaactctggtgagtctctctggaaaattctgggattatggtggatggagggtaagggatgaggagcttatattttgatcagcatttatataccttatgattgagacctggtagtgaatatggaacggacttcttaattgttaagcatcatgttggatagtgtatttcctagtttccttcttatttctcatatcctgtagtttggttagggatcatgcaaccaaagtgatgtttaaacatgcatttgatctcatggtgaatgttgattggttcagctggctgtaattcccattttttttcctttattttgtttaatataagtttagggtctgttcgttagctgaaatgaaagtagtttttttctttttctttttttcaaagaaatattctcagttttggaaaataaaaacaatgaaaatgttcatcttttggcttggtttcaattgttatgaagtgttcatattttttaaaatataaaaataagattttgatgttttctaaaaaaaatgaccaaaaacatttttgaaaacagtttgcaaaaaaatgctactaaacatgtttttcttaccagttcatttttttttctgtttccaaggaaaaaaaactgtttatttttattatcatttattattattttttaaacttaataagacaacaattccgattgatcttcacttggtatccatgacatatttgcaccatacatgtcaaatctctcattgggcatagctactgagatccatacagttaattatatgtctactagaaattagttagctacctcctattttcttcttggattcttcctatttgtaggtcatttgtggcacacgagaagggagatttttggttccttgcttggacacttgagttatatgtttgtgtgtgtgtagttttaggggtttattccgttttttgtttgatgatttagttgtcccttgagttcacctgattccccaatgaaggttcacttctatatatatatatgaaggtttttcttttggaaaggtattctttttctattttccttagtgtgtttgttggaaaggtattcctcttgtgtctagttgacaaatggtgggtatcgaggatgacctcttgtatttgtttttgtttttgtttgtctagaaagagtagaattaaaggatgttcatccttaaagggtgtcgtgtagaaggcaagatgaaaagatgatgtcctaaccactagatgcaaagttctctccatcctcgtgtacaaattcccatctttttttcttggagacccattaaaaaaaaccactccttagttttcaggtttgcttttcattttctgaacaatcccttttgcgagattggattcttatttttattattttaggcttatcttagaggtccaaaaggtgttaatctatttattcctgagatgatccttctaagcgtatgagaatttcttcatctcattctatgagtcttttttctttttaataagtgattttcagtttttctctgcttttttttagctttcttcaggatttggcctgataagataggggctaggtttgtttgccatctatgtgcctggcccagccaattccattaaagtatgcttttgttttgttttgtttttttttttttttttttttgtgaagaccttttcaatgctttcaatattgagcctaccaaatgtgtttctgagtctgctaaatgtaatcgagggttgtaggcagtgttgaccaagctcctgtgctggggactcagcttccaaaccaggatatgtgatggcatgagaaccatgggagagggattggtggttatcaaggattttttgtggttgtagtgttttgatttgcattgaaatatttccctccgaaatctctatattctcggtcggagggtcttccaaggcttgagaattggtcctttgagatcttattgataagaaaaagaggggttaaggtctatttcatgcatgttgtgttttatttcctgtgattctatggctttatgtgtgcattgtatacctcatgtgtcctaggttagcatcctcctttttttgagtgccttgttttacgcacacacccacccacctcatatttgcctgccaagaaaggtattcctcttttctgcaacttaagacatccaagtagtgtttttttaaagaaacttctcatattgttgcactttgctttgcttacaggtatcagttttg

SEQ ID NO: 12640 - DNA, 13310 bp, Vitis vinifera
  Intron number 3 from transcript GSVIVT01009762001 (locus G SVIVG01009762001) derived from phytozome v7.0 (chr-ID chr1 8; pos 11073223 to 11086532 reverse strand)
attggcaggtacacttcataattcatcttcttatgctttcttccctattccccgttgtctaaaggaccactaatttgaaagattcttggtggaattaacattcatgaactatgcttcttagtctatgcgtcatagtcttacatttataattgggacacaatctgtggaacatgattatgtttgattctaaaaatattggtcactgactcattgcaaatttgacattttcatggtgagattgcttttctattaaatattagggcccatattttaagaaatattaccttgatattgggagatgaatggtagcttctaatgcatttatgttgccatgttggtttttttaatgatattaggcattaggaagctttgttaagagagcatcatattcaacttttgcctgttaaaataatgttgtagaaatggtaagtcaggagttcatatttacttcaatgtaaaattgtggacatttttgttggagtttggttaccatgtttttctcgtaatattcagttggtagctagtgtagttatgtttctattggagaatccgtgcagtaattgttggattatacaacctgtatagattgaaatttaatttgggattaaattagttgacttggtatttgtttcctataattagtggctaactgatttagtggagtaattttaggcctagaatagaataatttctttttctttttctcattatagacattataagtaggttgtaaatatattcagtgaatacacgagtattatttagaaatctttctctgttttcatggtatcaagtcttatgcttagtagccttttttccttccatcgactggcccaattgctggcattagtcgtaattttttccagcattaattgttggaattgttaggtccttccagccttcattgtcggcattggttcgaaacctatttttcagtggctccttttttctagtgtgtgtttccttccttggtgtggatttggttgtacaactaagtcccagccccccacccctataaaggggaaaaaaacacccaaattttgccctcctcattacagtaatcccatcctatttccggttttctcaatatgacagaacaatctcctatctcttccaccacttcccaaacaaatataaacactcaaaaccagaagaattccggagtatttcaaccacatttaaactaaatggaggcaattacctagagtggtcacaattggaaaaaacttacctgaaaggaaaaggaaaattgagtcatttacttgggccaaagataagaaagaatgacccaaaattcaatgctttggatgactaggattttctaataatattctgattatagaactcaatgcaactagggatcaacatagcttgtatgttcctctctacaaggtagatttgagaagtcgtcaaaattattcaaaggttagagatgctggtcaaattcatgaagtacagattagaattcatgataccaaacaagataattttcagtgcttgaatattacaatgttatatgatatttatggcttggatcaaatgcatatcagaatttaaaaatggagtgcagtaaaaaaccagaagaattccggagtatttcaaccacatttaaactaaatggaggcaattacctagagtggtcacaattggaaaaaacttacctgaaaggaaacggaaaattgagtcatttacttgggccaaagataagaaagaatgacccaaaattcaatgctttggatgactaggattttctaatcatattctgattatagaactcaatgcaactagggatcaacatagcttgtatgttcctctctacaaggtagatttgagaagtcgtcaaaattattcaaaggttagagatgctggtcaaattcatgaagtacagattagaattcatgataccaaacaagataattttcagtgcttgaatattacaatgttatatgatatttatggcttggatcaaatgcatatcagaatttaaaaatggagtgcagtaaaaaaccagaagaattccggagtatttcaaccacatttaaactaaatggaggcaattacctagagtggtcacaattggaaaaaacttacctgaaaggaaaaggaaaattgagtcatttacttgggccaaagataagaaagaatgacccaaaattcaatgctttggatgactaggattttctaataatattctgattatagaactcaatgcaactagggatcaacatagcttgtatgttcctctctacaaggtagatttgagaagtcgtcaaaattattcaaaggttagagatgctggtcaaattcatgaagtacagattagaattcatgataccaaacaagataattttcagtgcttgaatattacaatgttatatgatatttatggcttggatcaaatgcatatcagaatttaaaaatggagtgcagtaaagatacgataatgtattaagagttcattgaaagggagagagtttttatttcttggttagtttatatgatgattttgattaaattataatccaaattcttagtaaagaaactcttcatcccttaagggaaacttttgcaattgttagaagggaaaaagagataaaaaggcattgtgttagatcaaaaccttacagatggatcaacattagtcactgcctaattgaaatcgttgtcgttgctactggccagaccactagtattgctactgctgcctaggccacagacattagaaggaataagggcagaaggtctagtgacaaggactctcactggtgtatttactaccggaagctgaaacatacaagagtcatattactaactccatagaaagcctccaaatgtttttggaagagaaaatggaggctgagaaggaaaccacaggtacaaatgtcaagttaatcttgctaacattgatgaaaaactctcatacaataatgtcagcttagtgggagaattgaatgaagatgtcaaaaattaaagcaattcatatcataacttgagaagccaagggggacaacatgttatgctcaaataggtaagcattttctcaccctaaatgtcttaaaagaacggttttcaagcccttagattatgacttaggacctttggcccatatgactaattctttgagttgcttcctaacctacaactcatgcttgagaagtcaaaaaatcaaaaatgcaaatgaaaactgtcaccatagctggttgaggaaatatttctgtctaaaaatgttttgcattgttctaagctctctattaactttttcatttctagaatcgccacaaatctgaattgccatgtgcatttcacaccttttgagtgtactttacaggaattttgtatttggaagatgattgagtgtgctaaagagaaagatggacagtattttgcttgaagctaaaagtggtgcaataggctcatgcctctctcctagtccaaaaaaactaaagtttggttattccatcttcgcctttgtcatccaccatttaccttattaaacaagatgtttcctagtgtgtttaaaaaattagacattcaaaatttttattgtgatgtctgtgaacttgattagcaccttcgactatcttttccttagttctatttgtttcaatttaattcacaaagatgtttgatggcatacaaaggtccaaagcatttccaaggtaaggtggttaataccttttattgataattgtatgagagttaattaggtttaccttatgaaacaaaatttgaatgttagtactatgtttcatgtttatcataaaatgatgagtacccaatttaattaagaaaatctaaacctcgagacctaatagtgggagggaatgctttaaccaacatctatcaccatacttacaacaagaaagcatttttcaccaatcttcttgtagtgataccccacaacataatgatatagcaaagagaaaaaacaaacatctgcttgaaatcactagagccttgattttccaaatgaatgttcccaaaacctattgcgggtaagttatccttactattacttatcttataaacaaattaccctttcaagtttttgacttccaatcacctgttaggggctatcttattaacaaattaccctctcaagttcttgacttccaatcacccatgagttaactttgtaagttctatccctaatttgatggttatagttgtatacctcctagaatttttggttgtgtagccttcattcatattcatgctcactaaagaacaaaacttgatcctagagccccaaagtgtgtattaaaaaaggatataaatgctatcatccgactttcaagaaaattttcatgtctatagatgttacctttatgaaaattagtcatttttttttcaaccttatctttagcaggagccatttgtagaaggtaagaagtttttttctaagtttgtttgtctactatattaaaattgcccatgggtctgacttcaaaccagtgtttgtttttatcctaagctcttagagtcattccttaattcatttgtaagactcacctaaactcactaattttgaacttgcggttcctaaatctattattcttgattatgtcgtctaaaggagagaacaagagagatatgctacacacagttcaaggtttactctaggagaatgcaatattctcttgaatcttgaagtgttgctccaattgtcatctcagaagaaggaactgaaactcaacttgagtcaagttctaatgtgtttgatgatcttcatttacctatttgttaccgattttaacaccaccaacatgcccaaaattgttcaagtggcattagggattggaggaaggtaatgcaagaggaaatgagtgcattgatacttgagagactatgatcatccttcttggaataaacaggctgggtataaattagtgtttatggtaaagtacaaggcaaataagacacttgaaaggcataataagattagtagctaagggatatactcagacttttagtatagattaccaagaaacctttgctcctatggcaaagatgaatactattcatacattgctatcctttgttactaactttgattggttcttgcaacagtttgatgtaaagaatgcattcctctatgggaatttagaggatggggtttatatggagataccagctggtctagaataaaatttcaagtggaacaaggtctgttgggttgaagaaggttttgtatgggcttaaacagttccttagaacttggtttggaaggtttactaaagcaaatgaagaacatgaattatatctaaagccacgaggaccatacactatttgttaaacattcgaagaatggaaaaataaccgttcttgttgagctgtaaatagaataggaaaattattttcctattatgttagtttcctatttctataaataaatagttttatgatttaggaataagttagtttaggaacaagtgagtttcctattatgtctcttgtttcctatttcttctcttataatctcctatataaactgtgtataatcaatccaatagatagaacttattattattcatcccatatttcgtgttagttctcattatttgtgttgatgatatcattgtgataggaaataatttagaagaaatgtggagattaaaagagatgttggaaaaaaagtttgaaattaaaacctaggaagacttaaatactttctagggattgaagttactcggtcaaatgagggaattgtgatttcacaacacatgtatattttaaatctccttagagaaaccaaattgttggggtgtaagttggtaaatacacccatatggttagttaatttacctatcacatagtagacctgatatagcacatgctatgagtacggtgggctaatttatgcacaatcccaatgatgtacgcatggaggtaagttgctcagatacatacttcaagttaactcctaacaatggtattttgtttcagaaaactaggaggatgacacttttggtttatagagatgctaattctgcatgatcagtcatcattaagttgttaacatctagctaatgtacattcttaggagggaatttggtaacttggagaagtaagaaatactttgtggttgccaggtcgagtgttgaagcaaaatttcaagccatggcacatagactctggataaaaattatttttagtaatcttagaataagttgggaaggttttacgaaactttatagagataacaagttgggttttggtatagcctataatccagttcaatgtaactgaattaagcacgttaaagtcaatcttcattttaccaaagagaaaccggatggtgggttgatatacaccccctatatattctcaaaaagacagttaaccaacatactgcctaagggacctgcagctcaaccattccaatctatcacaaacaagttgagagtgaagaccttttactcgccaacttgaggggagtgttggagaatgcatgcagttgcttgattgtacagtttgtatacgttgggatttaatttgggattgtttctttttctgtatggttggcttggtatttatttcctataattagtagctgatttagtggagtaattgtaggtctgaagtggaataatttccttttcttttttccttgtaaacattataaataggctgtaaatatatttaatacatagacaagtattattcaaaaaccattctctattttcattctctttggaacttacttaagagagtccaaggaaagtttccatgttttatagttgaggtacatgcaactttgttttctatattgaaagaaaggggtggctaatacacatatggaataagaagccactgcaatctataggtggtgtaaatttaattttaactggcttgatatatgttttttcatattaataactcaaggtagcataagtgttcaataaataaataaacatgtatgtatatatatacacatataaataaacaaaaacaggtacccttagaatgtggttctcttgtattattttatcttccttcattgaaattgctgagattgatttgattacatgattcaaaggattaattggcaagtcacaacttgcttatgcaatagttgtacgaagaggttggagcttgatgaaatactagtattttcaagttgacttgagtattaaattttgattctatttagatggatatgcttttgtggaaattcggtatgatttgaatggtgatttgtaggatattgtgggaaagattaaggctccaattgtggcagatattgtggtgatttgtgtgattttattttttccatatttgtattttttccatattttgctccatgtgtatatgttaaatagggacccgattatgtaaacatatacaatagaatgaatttttgagtgattctcagtttcttcatggtatcaaagcatggtttgctctaaaaccctaatcaatcgatggctgcccaaaaaggagacgtcatgagtccagtcaatcggcaacccatgaaaaaaagtcggagataaactccacaatgggttcggtcggtgcattcgacaactctccactccatcttaccgttgaaaaattgaacgataagaattacaaaaagtggacgcagacaatcaaacttgttattaacggaaagggaaagtaagggtttcttatcggcgagactcggcgaccacctccaaccgatgtagcagcatcccagaaatggcagtccgaaaattccttcatcacctcatgcttgattaactccatgaagccagtcattggcaaaacttatatgttcctcccgacggcaaaggatgtgtgggatgcgatatgggaaacatattccgatgccgagaatgcttcccaaatctttaaactcaagacacagctctggcagatgaagcaaggagatcgggaagtcacagaatactacaccgagatgttgggtttgtggcaagatctcgatctcaactgcgaagaggaatgggagtgcatgggtgatagtatgcggttcaagaagaagatggagaacgagagggtcttcgagtttctagcggggctgaaccgcgagcttaacggcgtcaggagcaaagtacttagtcgtcggccgttgccctccatccgagaggtcttctctaaggtgcgatgagaggaaagcagaaggagagtgatgttgagggaacatctcttgtctgggcccgaggcttcagcccttgtaacccgtgggcctcatgctggatttggtgggcctcactttggatcaggcccaagacaatccaagaggacttattgtgagcattgtaagaaattgggccacactaaagacacttgctggactttacacagcaagcccccggattgaaagcccatagtcatcagatctccaccgaaacccaggcagacaaaacacccatagaaattcatcaatcaacttctagtgtgggtttaaatttcgaccaacttgcgaaattatatgaatttttttctaatttccaagcctctggtcagtcttctactactctatcctctggttctttggcccacaaaggtacctttctgacaacacttagcaccatgtttcatattactccctggattattgactctggtgcatctgatcatatgactgatgctcatcatttattttctacatactctccccgtgccggtaatttaaaagtaaaaattatagatggtactttatccctagttgctggcaaagggagtattcgtatttctaagtctattactctcaaccatgtcctacatgtacatatttatcttgcaatttgctgtttattagccagtttaccaaacagtctaattgctcagctaaattcctaccctttcattgtgtttttcaagacctatcatcggggaagatgattggtagtgctaaggaacgtgagggtctatattacttcgatgaaactgatgtgcgtggatagtgttctcttactgtttgtaattatgcatctcgtcctagggacagtgaacttttgttatgggacaaaaggatgggtcatcctagttttcagtacttaaaacatttatttctttcactatgttcaaataaagcttcattggattttcagtgtggagtgtgtgaacttgccaaacatcatcgggcgtcttttcttaaatctaagtatagactttccataccatttactctaattcataatgatttatggggacccttacctacccctaataggacccataaaaaatggtttattacttttattgatgatcacactcgcctgtgttaggtatatttgttgactgataaaattgaggttcgatcagtcttcatgaactttcactctatgatacaaactcaatttcacaccaaaattcaaattcttcgtactgataatggtactgagtatttcaatcacttcttaagcatttatctacaagaaaatagtattatccatcaaagttcttccgttgacacccctcagcaaaatgggattgtagaactgaaaaattgacatattcttgaagttgttcgtgccttgttgtttacctctcacatgcccttataattttggggtgactccattttgacagccacataccttattaaccgaatgcctagtcaggtcctatcttttgtcacacccctctagaaattccaagagttttttcctcattctagactcggtgcacatcttccacttcgtgtctttgggtccactgtgtttgtccacactcacggacctaagtggaacaaattggatcctagagcacttaaatgtgtctttcttggctactcttccacacaaaaggactacaaatgctatgacccaatttcatagaagctatatgttagcctagatgtcattcttttagcatactccctactacttgcttcagggggagtccgtgagtgaagttcgaccacccttgaccttagagtacctcgatgttactatgtttgaatccactccgtgccttatatttaccctttcgcctaatacaaaaaaacatttgaacttaggaggagatacagaattacagacaaataaggaaacactcgtctacttaaggaggccaaaatcgaagtccaatgagacactcatctccgaagcactaaaagagttagaaccggtgatagttccaacccctcaggagtctggcttcaatcctgatcaggtaacagatgacttacccatcatagttcaaagtcgcggtatcagtcattgactcgggaggtcctgaggcacataggtctcggtatctcggatcggtatcgggtgatacgtaaaaaattctaatttaagagctcaaaataattttaaaaaattatgaaaattattaaaaaattaaatataaataagtagagtgaaaaattaataaaataaacttctattatattcaaattattcaaattataataaaagcactcttgggataatttataataatattaaaaatctctaaaaatattttaatttaatcacttgataataaatgtttcttattgaagatgaaaataataaaaagtaaacttttttttataaatttttttaaaattaaatattttgacttttaaaaaaaataattttaattattaaaaaaatgaaaccatgattcatctttaaaaaaataaatatattttttcttataaaatattcattaattttaatttttatataaatattaatttcctatttatttgatataagtctaatattcattattcattttctatcattataattttcatcaaattatttaaaacctaaatccccactaaatactcattatctacttaaaaaaacaaatacatattatttaaaacctaaatcctcatctctattaaatacccataaccctcattgaccagtcaaacacctatctctctctcaatatacccatttctcctctcaaccagctcctccgcaggcccatttctctcttctcccacttccatcagccacctaacatcgttctcctttgataacagcggtgtcggagtctagcaactctgcctccttctcatgtcacttagttccatctctggcaggaacttgggggatccgaacaagcaggcgtgcttcttcaacctcgccggcgactctaagatgcagggttctaactctctgtactatatatttttcattttcgtgggttttgatcctcttatcttctccaccatttctactccaatattaccttcttttttttccattaccaattacctaaatagctaagtctcaacatgatcttggagttgtctcaacgtttccatgggattcactctgagactgttcatttatcttcaattcaaccgagtttgttcacaagctaacaaaatatccaactcgggtatcggtccggtaccggccatggtcgaggcggatacgactcggccgagtcgtaccggtatcgactgagattttgaaacctattacccattgctcttcggaaacaacctcattcatatactctccatcctatctcgaaatttgtgtcatttaatgctctttctgcaaagtgtcgtgcttttacaactaaccttgatagaatctagattcctaaaaacattcaagaagccttagagattccagaatggaaagaggcagtgatggaagaaataagggcattggaaaaaaatgggacttgggaagtgatgactttgccaagagggaagaaaccagtgggttgtaaatgggtattcacagtgaaatataaggcggatggcacagtaaaatgatacaaagtccgcttggttgcaaaggggttcactcaggcctacgacatcgactataccgagacatttgcaccagtggcaaagctgaacactatacaagttcttttatccttggcaggaaacctcgactggcctctccatcagtttgatatcaacaatgcctttctgaatggtgagttggaagaagaagtgtttatgatactaccaccagggttctgtaaggaagaagaaaaaaccagggtatgcaaattgaagaaatctctgtatggtctcaagcaatcaccgagagcatggtttgatagatttgcagaggtgattaagaaccaaggataccaatagggacagtcggatcatactatgttcttcaaacagtccaacgatggaaggatgaccatcctaatcgtgtatgtcgatgacatcattttcactagagatgacacaagagaagtggagaggttgaagaaggtcttagccacagagtttgaggtaaaaaaatctaggttaaatgcggtatttcttaggaatggaagtctccagatcatggaagggaattagtatttcccaaagaaagtatgtacttgacttgttgactgagaccggcatacttggttgcaagccaagcgatacccctatcaaggcaaaaaaaatgacggaaagcgacgaaaaacccatggatagagagagatatcaacgactagtaggtagactgatctacctttctcacactagaccagacattgctttcgccgtaagcgtggttagccaatacatgcattcaccaaaggaaagtcatctggaagcagtgtataagatcctcaaatacctaaagtgttctccaaggagaggactattttttaaaaagagtgacagtaagaaggtagagatatatacagatgcagattgggcgggatcagcagatgacagaaggcctactacaggctactgtacctatgtctgagggaatctagtaacatggagaagtaagaagcagagtgtagtagccagaagcagtaccaaggctgtattcagagcagttgcacaaggcatgtgtgaaggactatggttgcagaaattgttggaagaactacacattacaatagagctccccatcaagctctattgtgacaacagagctaccattagtatttctcatcatcgtgttcagcacgacaagaccaaacatatagaagtggacaaacactttataaaggagaaaattgagaaggggactatttgcatgacttatatccctacaagggaacaattggtagatatattcaccaaggggttacagaaatcaagctttgaagattttatttgcaagttggacataattaatatctatgatccaacttgagggggagtgtggaaatccgatatgatttgaatggtgatttgtaggatattgtgggaaagattgaggcagatattgtggtgatttgtgtgattttatttttgattttatttttttctatattttgctccctgtgtatatgttaaatagggacccaattatgtaaacatatacaatagaatgaatttttgagtgattctcaatttcttcaactttatatgcctttttcatatcacagtgaaccttttgcagataattgcaactgtaagc

SEQ ID NO: 12641 - DNA, 5850 bp, Vitis vinifera
  Intron number 5 from transcript GSVIVT01008797001 (locus G SVIVG01008797001) derived from phytozome v7.0 (chr-ID chr1 8; pos 2187941 to 2193790 reverse strand)
tttggtatgtcatactttgcaccttcaaattcaaagttttgaaataacattcttagtgctaaactaagttttcttgatcgatcctttcacgtcaatccctatcaatcatataggttaagcaacatgtgcatcagtgcttgatcaaagataaattagacatagaatatattcaacttgtttggaaatatatttgccctttccaaaatgaatcttctgtatctgacaataaagtatcttcagtaaagttccatttgagatttagatgctgtattaaccataaatattgaacttataacaaagtttggctctatggttccagttggatccttgtttctgcagaggtgcagattttgaaaagattattttcaacattttcttataaaagaattcccttccacttttaccatgcttgaaaattccattttattctccatcttgtgacactaagatcgtttgctgaaatatcttcaagggtttgaaatacgttcatgagtttcacagccaaactgctctattggagcatcaaaccagcttgttgctctcttcctgttattatattagattggatccatgcagtatagctcctcagatcatgaagttaattaacttctttacaaaaatttccagtttttatctgtaaatatagcttttaagaaaatgaagaagaggtgatggaaatacatgagatgatatgaatgacaacgcaatataaagaaaacaatcaatagtttcatcttccaaaatctactcccatcttgaggcttggcttatgtagcaattagcaaagagttggtaaagatgtgggaggttctaggtttgatttccatcatggggaaaaaggaaaaaatatttcttaccaacaaaataaaggaaaaaaaataaaattcagcttcaccccattatctctcttgagtcctcccactttagttgaaagctagggtatccaccttttagtttgactactttagaaagaggtgacaacaaatattctatttcattttcttggttgcttttaggttttccacaaaatggctaatgtgtgcaataagagaaatttgttgactaaagtaagagttaatgacactagtttgtttgaggagagcgagattaaggttgaggtgtgtagagctttcccttctctgctctctgagatgggtgattagagactgagcattagggggtttgagttttgagattttgaggttttgaaaaatgacagttccgggggattaaaggagctattttgaaggaggaggcttttgtagctctttctagtctaagtggggacaaggtcactaggttagatggctttactatggctttttggtagtcatgttgggatgttgttaagtttgaggtcatgggttcttttagagagttttacttaaggtactttttaaagaagcttaaacatcacttttttggtatagatcccaaaaaaagatggtgtagaagatttgaaagacttcggactcattactcttgtaggaagattgtacaagttcttagcttaagtgtttgtgattgacttaaaaatgtgatgggaaaagtggtttctcattatcaacttgcttttgtaaaaggtagacaaattctgcatgcagttcttcttattaatgacgtcacttgagcttgaagagcaacaattcaagggttattttaaaaatggacattgagaaggcatttgataacattaacaaggacttcttacttgcggtcttgtctaaaattgggttttgacaaaagtagactatagttggaaaaaatggtctatttcgtcaacaagcttttttgtcctttttaatagaaccctatttggtttctttcaaagctctaagggttcgaggttgggcaatcccctctttacttatttgttcattttggtaatggagattcttagttagtatttgactagagccaagattaaaggctttatttcgggttttaaggtaggtaaaagaagtaagaagggtgtcacattttgtttgtcgatgacattatgattttttgtgatgccaaatctcttgagatatttgagttaggtttttatgtggtttgaggtaatatcaagcttaaaaataaatgtggataaaactaaggtaattcctatcgaggaagttgctaacatggaagaattagccttggtattgggttatagaattgggaagttgttgtttacctatttagatttccctttgggaacctcttacaaatctatgagggtgtgggatacaatggagtagagattcaggaagagattagcgatgtggaaaggtattgcctttctaagggagagagacttaccttgatcagaagcactttatcaaaccttccgatttatttcatgtccttgtttgtcattatgagaaagaccaatttaagactcgagaagatccaaatagactttctatgaggaggtgatgcttaagagaaaagatctcatttggctaattggaacatggtttactagagaaagaaggaagagtgtcttggcatgcacgccttttattttaaacaaggctttgcttggtaagtagaactagagatttgctactgaaaatgggtcgttgtggaaacaaatcataataaggaagtttggagaggaggaaggggagtagtgctcgagaggtgtgaggggaggttatggagtaggggtgtggggaaagccattggaaatgagtgggagggcataaaaagtaggactcacttttcagttgagaatgagataaaggtcaaattttggaaggactaatgatgtgaggatttaccttggaagaagccttctcgaacttgttctcttctgcctttaacaaagattgataggtattggaggcttggtagctagataaggaagcgagtgagtggaacctttgcttttcaatggagtatagtgactgtgtgagctcgaggaagtgaagtttctcttgcaaaaattgcaatcggtcttggtgaagagtgaagaggacaaaataagatgaaatgagtccattaatggcattttctaggtcagatccctcttttcatccttgacaagggaagataaagtgatgtaggacaaccttaggatggttgactacaatcaaataggtcaggtaaggtttttattttttagggtttaaggaaaggaacaagaaataaagtttatggtagagaaaaatgaaatgaaaaatatagagaaagaagatacgaagaagaagatataaaaaccttacaatctcactaaggccttttaggagtttcacgtaaaagaagatcaatggagtttcaccattgaggattgtaacactcgaaaaaaaaaaaaaatttactaacatcaattaattactttgatttacatcaattaatcttatttataggcttctctaagaaatccaaagtctattaggattctaataacccattatgactttaattctagttgtcttataacctgattagctaatcctaatttgactccaaatactaatcctactttaattcaattaatactaattttaatttaattccaactaatattaattccacttaaaatttatgagaaaataaaggctaatctttaaaagagaaaacatccaagagggggtgaattaggattaaaaaaatatttttaaacacaacaaatttaagcacaaaaggagcaaataaaaagagataaagttagagaaatcaaactcagattttataatggttcgacatttccttgtttatgttcactctcctcaagctcctaactgagttagggttccactaacttgaagcttcaaccaagcttccaatcacatttacacttggactctgactccaatgagctcttacacaatcttttcaagtttcaactcacttgaaagttttaacactcaattaacaagaatgaatctatcaacctagctcaacaatagctcaaataaaacttaaggctaggatgaatcacaaaggtgcactaaaggatatgcaaataaagatttaatgcaccaagaaaggaatgagagcttttacggcaagaataagtgggttagacaaataaatgcaggtgttctcttgctcataaatgaagtagagctttctatttataggtttctaatctcggaagccaaaaaaatcaaaaagcagtctcaaccggtcgagctagggggtcgaccgatttactagccgtcggagcatttaatgcttgacaagtgaccattaccctcgatcggacctcgatcggaggtcgatcacgaaggctaatacctcgaccgagaagaaaagactactggaagagagagagtgtttttttcactcctcgattggacctcgaccgggaagagggaatcagttgaccggtacccctagccgattgagccggttggccagtgcctcgactggttcaccatttttggcctgaaaatctatatttttttgttattttcccttctaacacttaggcaaggtctttaggtaaattaatatgtcaattttgaagtgatttgccttgggttcatttgataaaacttgggttttgatggaactgtaactttaaagaataaaccgagtttttcaaagatacatgaaatgatatgtaaatcctaaatgcactcatgcattcatcttacatatgtttcctatgaataaaagtctttcaaaaggcttgatcttgcatccattaggtcctttgatgaattttcaaattaatacctgaaattctttataattcaaatcaattagtaacttaattatggtttgttatcatcaaaacctgattaggagaacccttaggctaatagtttatttatctctttcctttcctttctagaatctagtatagtgtggagcacttaggtatcactgaaggttggtttctttgcttgggaagcgacttgaggtagaattcttactcttgattagcttaaaagcagttggtggactttgtcgaataggtgtcatcgtgttaaggcaaggaagaaacaacagattacttgcttttccactattccaaagcttgtatgttgtggtggctgattctttctctctttggaacggtttgagtgatgcattcttggttaaaaagaacctttcggttggcatggttctttcgtagggaagaaatgaaaaaaaacctggaggtatacgcccttgtgcttgttatggactctttggaaagagacgaatagaaggacttttaatgatgtttgagcaatcgaatcaaacaatcaaatctaagtatatgtagtcttttgtgaattaggtttaaggtgtacacaaaggactggtcaatgaatttgatagattttatagattggctaagtgtcaagtaaggagaaggttttttatttatttatctccttctcacctagtttaggctgcctttgtgtacatcgtgtgtacattggtgtgcctccttttaggcgcttttaatacatttactcatttgcctatcaaaaaaaatttcctggttgcttcactaactattagcactattagagctcttgtgagcatgtaaaatgtgatagaaacaaatcaaacaaccaatcctggtcagtacatctccgtaaaaaggagtactagtttggattagaaacagaatttctgctcttacagaaatgaatatgcggaatgagaaaaggtgttatttcaagcatgttcgttaaatttttcatgcatagtcactatcatcatgtctttaatttttgcatattatgtcagaatcttctagttggggttgttcttaaagcttggtcggacaatcaatatgcttaatcaaactttgacatcaccgaggggcttgttaaagttatccactaaaagggagaagaaataaaaataaataaaattgttgtgacaattgtcttgctttcttgcaggtacgttgga

SEQ ID NO: 12642 - DNA, 16290 bp, Vitis vinifera
  Intron number 7 from transcript GSVIVT01037449001 (locus G SVIVG01037449001) derived from phytozome v7.0 (chr-ID chr6 ; pos 13541272 to 13557561)
acgaagtcaaggtattttccattactttgtgaaaattttgaaagggaaagatttctccttttttttgaaaaacttgaaatttgaaactgattacatcaaataaatagactcagcaagagttgagatctgccacaaatttctcaactacattagctaataaaacaaaacaattaactcccaaaaatacagaaacaaacaaattttcctattaaaattcgaattttattaaatagaaaaaagaaactagaaacttctaacttttagctccaactaactcttaacagttcgacactccccctcaagttggtgcatagatgtctatcatgcccaacttgcttgttagaaattcaaagttcggcttgatgagtccttttgtaaggatatcaactatttgttgagttgttggaacaaatggcatgcatataacaccagtttaaaatttctccttgataaagtgtctatcaatctccacgtgcttagttctgtcatgttgaattgggttatgtgcaatgctgattgcagctttattatcgcaatataacttcataactccttcaattggctgccttacctcttctaggacacgctttagccacaacatctcacaaattccatgtgacatagctctaaattctgccttagcactacttctagccactacgcctctatttcttactcctccatgtaaccaaatgaccccgaacaaatgtgtagtaacccgtggtggacctcttattagtaactgaactagcccaatcagtgtcagtataggcttcaacaccacgatgttcattcttcctgaaaaatattccctttcctggtgtgctcttaaggtatctctagattcggtagatcacttcaaggtgctcttcatatggagagtacatgaattgactcaccacactcactgcaaaagctatatctggccgagtatgagataagtagattagcttaccaactaacctctggtatcttgttgtatcaactgaaacctttttgtcactatctccaagcctcaagtttggttccattggtgtttttgatggtttgcaaccactcataccaatttcttttaagagatcaaggatatactttgtgaaacaacaatccctttttttgatcttgcaacctccatgcctaagaagtactttaaggaacctacatctttaatttcgaacttagtggctaagctccttttcaacctgtccatctctgttaaatcatctcgagtgagaatgatgtcatctacataaacaattaaaattgtaattttaccttctgatgaaaactttacaaataaggtgtgatctgtttgtccttgtgtgtagccttgcttcttgactaattgagtaaatttatcaaactaggccctcggtgattgtttaaggccgtgtaaagactgtcttagtttgcacacctttgaaccatagtttccatcaaatcctggaggagagtccatgtacacctcttcttccaaatctttgtttaggaatgcgttcttaacgtctaattgttggagtgtccaatctaaatttactgtaattgataggagttctcgtactgtattcaacttggcaaccggtgcaaaagtcttggagtagtccacaccataggtttgggtaaacccttttgccactagtcaagctttgtatctttccaaggtgccatctacattgtacttgattgtaaaaacccatttgcagccaattgttttcttccctttgggcaaataaactacttcccaagtctcattttttccaggagccctaatttctttaagaataacttccttccattccagaacccttagagcatcttgcacattttttggaatttctacacgagagttgagtggtaaaggcataaaacaagggtgacaaattttcataagatatgaagttagacataggatgctttgtgcaagttctgacacctttacgacaagcaataggaacatctaaatttttgattgactcaaacttggacttagaagggcttgacaccaaaggaagtttacttgacaactcatctgaggaactagtaaaattctcatttatacttgggattcatggagttgctgcaaagttgaatcttcttttctttgaagatgtctcttccttgaatagacatgaagctcatgttctattttacttgttttttctctcatcttcactttttcatgcttatgtaacgacattaaaggattggttccattaatttcatctcctaaactacttgattcttgatttgtgactagtgttttggttcaagtgttgatttgtggctgtagtgtcttgattcaggtgttgatctatggctacagtgtcttgattttctagagctgaaggaatagggtgttcaggggtaaattcaactaaaactggtggttttggctctatttggaaaatatcgccaacacaagaatcttcactctcactctccccctgaagatgattattatcaaaatatggggttgtctcaaagaaagtcacatccatagacacaaataattttcttaaaacagggtcaaaacacttacattctttttgtgttggtgagtagccaacaaagacacatttcctagctttaggatcaagtttcccatgattgtggctatgaatatggacaaatgtagtgcatccaaaattttttagtgaaatatcaatgacaagacttgacgtgggaaaacaatttttaaaaacatccacaggtttttgaaaatgcaaaactcttgttggcatttaattaataaaaaatgcagctgtaagaacaacttcaccccataaacatttaggtgtcttagttgaaaaaagcaaggctctagcaatttcaagaagatgccaattttttctttcaactactccattttgttgtggagtatcattgcaagaactttgaagaacaattcctttttcctcaaaaaattgccctaatattttatttaaatattcctttccattgtcacttctaaacacttgaagtttttcttggaattatgtttgtaccatattgaatttttttttgaaaacttttcaacatcggatttttctcttaacaaatatgcccatgttatctttgtgtgatcattaatgaatgtaatgaaccatttttttcttgaaagagtagtaactgtagtagggccccaaacatcgctatgaatgctagaaaaaggtttgcagggtttatatggttgtagaggaaaaggagaacggtagtgttgtgccaattcacaaatttcacattgaaatgaagatggatttttatttaggaatagattcggaaacatgtactttagatactgaaagtttggatgtcctaacctaaaatgccataacataatcttattcgtaaaaagaggtttgaaacaagtactatgagtttgtccctctaattcagatccatcttcaaagaaatggagtcctccactttgcttagcactgctaattgtcttccccgagtccaaatcctgaaacgcacaagaagaatggaaaaaatgagcctgacctgacattttagatcatgagttattttactaacagacaaaatattacatgacaagttaggaacatgaaggacattatgcagagtaatggaaggagaaataacaattgagcctttcccaactatggctgagaaggatccatttgctatttttattttttgtttccttgcacaaggaccatacaaggaaaataatttagaagatttggtcatatggtcagttgctcctgagtctataatccatggacaattaaaattgggtttgacactgtagagggaaatggtaaggtagttacctttttgggctaaagaacacaaggaagaaggatttatagtgggactcgaggactggagcaatttacacacgctgtctatttgctccttcatgaatggaagctatatttgaaaaaacttggttggttcccttgatcttcatttgagacttggaacacacgaccatctcccccattctcctttttccaattcggaggcttcccatgtagcttccaacatgtctcatgtgtatgccatggcttcttacaatgatcacaccatggtttttctccttgtttgaagtttctcttttccacatttgcctttggtccttttgttatgagagttgaactctcaatttcagggttggtctttggttcctgcttttgtagcatgactcttcggcgagacttttctctcctgatctctgagaatacttcttgaagactggggagaggttttcatcccagaattcggccccacacttcatctaattctctgttaagacctactaggaacaaatacaacttgtcatcttccttactcttcatatattgcatactatcagtgggagaaccccattcctcttcataacattgattcaactcctgccacaaagttaccatttcattatagcacacagtaacttctctatctccttctctagattgccacacttagtctttaattcaaatatttgagatgaattctccagatccaaataagtgtcacgaacaacatcccacacttcttttgttgttggaatgaacaaaaatggctttccaatactcgactccatcgagttgatgagccatggtattaccatggagttttcagatctccaactctttaggcgtggatcattgtttgctggttttttcacctcaccagtcaagtgaccaagcttccccttaccatcaattacgagcttcacagtctgagcccattccaagtagttttttccattcaacttattcatagtcaattgaagggaatttgatgacacaacaaacaagtattctgtttcattagataatgcagtagagttgttttgaatgctctctactgcatcccctgtagtcgccgagcctctgccagctccagccatagcagttttcaccatcagaaactttgattataccaaagctttgataccatgaaaattttgaaagggaaagatttctcattttttgaaaaaattgaaatttgaaaccgattacatcaaataaatagactcagcaagagttgagatctgccacaaatttctcaactacattagctaacaaaacaaaacaactaactcctaaaaatacggaaacaaacaaatttccctatcttaaataattcgaatttaaaattcaaattttattaaatagataaagaaactagaaactcctaacttttagctctagctaactcctaacatttcgacactttgctgttcttttgttatttttgttttcatgattatttggaaagtagcttaaaataatatttgttgtccatggttagagaaatgaaaataccacactttccttctaattatttcgtaattcacactagcctttggacttagcattccatatgaatgagttaagtgagcaatctgagctttgaacatttgagcattcttttgaacatttaatggagtcatgaattgaataacacatctaaaattgaccttgatctattactaattgatgtaggacgatagagagaaaagaatataggggagaggcattaaagtagaagagagaaattccaaagaattatgaatattattattcaaaagtctaaagcatctaatatcactgagcctatatatagatagacaatcctaactctagtagaaaattaattttaattatctttactcgaataaaactttcactaaataataataacctaaaataaataataaataaaaaataaaatattagcacttcttaattcttatatccatcactttctacatttacgcctaagataagtgtctaatttaatatctttgtttcctatctatttcataaactatgcctttctttagagttattgcataattttttatttgagcttttattcccattgtgtgcttccattttagaagaaatttggtattaattgaagtaattcacatctcatctcaatattacataatttgtccttatttcgtttttttcctaacctttgtttgtgccaaaatgaatgttgttaaattagaacaatcccatttggccctttaggggatgtgcaaaacctcacaaccattatgacaattgtacaagccaatcttacacaggtgaaagatattgtgacctaaatatgtttttactttgagtggtatgacatgactgacacttaatgagttcgttttactaaaatgaatttggtatgctctagaaagggttattggtagtcaatcttgtgtgacatcaaccgtttacaccaagtccttattactatgtgggaagagatgaagttaagactaacagaaaagcacttatcaagctatcatagaaatcacttgttggattaactattgacccttcgacaaactactacctctattaatgagtatatgacttaatttgaggaactaatgttatgttatggaattcatgaggattactgggtcactattgctgggcttataaatggattgaaagttgaaattgaatgtgaggttagtttgcgttcttccaagtccttagagaaagcttatcataaggcttgggaaactgagaagtacttcccttcttatcctatgaggcgtgctcctttcccacctactttcatcaacttcaccctaatacctttcataagtctactaaaggcacaactggttcttcctcgaccaaacaatgggttaaatcctagttccacttcaacttttaagactaacttgattaagtgtaagtcaaacaattcatgtaattcttgtttatttgcatcccaaattgactgtcatcattgtcatccaaaggggtgcaaaggctgtaaatgcccccaacatactctgcccttagaacatgaggatgcctccctaacctaggaagcttatgagtatttccaacttgagcctatggaagatcttgattatgaggaggagcattttaaggttaatgaggatgaggaagttttatctatgatacaacgtatcttatccactcttattgactgtgatacatgaaaatgtacaagtatttgtcatgcttatattccttgtaaggataaagtttctaagttggtcattaattaaggtagcaccatgaatgtagtgtttgaatctaccctttctaggctcgatctaaagcttgagccccaccctcatcaatttgaggtagcttgggtagataaaacttctttacttgtcaaggagggatgtctagttcctcttatgtttgggctttatttggaagacatttattgtgatgccttacccatgaatatcgctcatttcttgttaagatgtccttggctatacaatcatgctatttagccatggaggtaggacaattgtcttaaaacttgttaagctaacacttaatgagtgcaagcttgttgatgagtctactcatagggattaacttgagcaaagaattcaaattttgtcccttaagcaatttaagtgtgacagacatgtgagtttagtacatcttgtcatagctaaggaaaaccacacttcatttgagttcaatttggtttacctttttgaggttactcctttcctagatgaatttaaggatattatgcctgagggcttacttgatgaattaccactcatgatagacattcaacatactatggacttagccccatgatcacaattattggcggacagatcctgaattgaatcgacaaatagagggtctcttagttaagggttttatttgtcataatcttaatcctcatattgttcttagagaatgtgtgtggatagtagagttgtcaccaaaatcacagttaagtagaggtttcctattcctcggttggaagatatgttagatcagctagtttgttcctaatggttttggaagataaactaatgcaatgggtgccatcaatagacttggggataaatggaaggcaaccttcaaaacttaggatgggttgtttgagtggttagtgatacctttgggaatgtctaacacccattgtactttcatgagagtggtgacacgttttggatcattcttcggaaaattccttattgtatattttgatctattgttgacaaaggaggagcattcaagtcatcttagacaagtctttcatacctttagcattaagaaattgtatgctaaccttaagaagtacactttcatgcaaccccaaatgtgtttcttaggttttattgtgtttactcaacagatctccattgacctgaaaaggttaaggtgataagagattggcctaaacctaaaactttgactgcaattcatagtttgcatggttttaacttcttgttatgggagatttatttaaggtttcagtaccattactaccctaattattaagtgcatgaaaaaagaagactttcattggattgcagccataaagcattcccaatgattaagcaaaaaatgattgagactcctatttagcgacaccctgatctttctaagggttttgaggtagtttgtgatgcttcaagagtagctataggcaaggattaaagttttggtaaacttcagcagattctgggtcaaagtttcaaaaatcagctaggcatgaaatacaaatcaggaaggaaagtcactttcagtgatttttgttgaaaaaaatcatgcatttcagatttttttttagtgactttatcaccgattttcttgccatggccaatattttgatgattttatcatcaattttctacaaaatcatcaataaacttagccccacccccccccctacagctaaattgcccactccacagatgattgtttaaattaagagcaaggggggagtgatggagctcaaacttggccctttcagtggcaagtggagagctttacaataagctactttttcatttatatatgtttgtgcacacaaaatatattatctcccttaaaacttatctacggaatgaactatttaaaatataactttaataaaaaattaaaaaaatttaattattttattgtcaaattccattaactgcatggtaatcttcttaatgagttttttaaaatatattttatatagacaaaggaatcataaattagtaaagaaaattataaatatttttaaacaaaatataattgtttgtatatcatcatttgttttatgtccttaaaatacacctagactacatagattatcattttaatattaaatttgttttcaagtattgcttattattgccttatcatacatatattgttttccttcaaaaaaaaaaaaaaattcaatagtttttatcatttcttagagttcttttccaatatttctatgagcttaaatcaatttccatctttatcaaaaactttttctagagcttaggatttccatctcatatttccataaaatccaactatttatattttgtgaatttatgatattgcaggtactatttgtaaccaaaagagtttcaccctttactcttaaccatcaagcccttagataacttaattcccaatgtaagttgaatatgaaagacatattgggtggtttgaattcctccaagactacacttctatttcgcaacatccctatggggtagaaaataaggttgttgatgcccttattatgttgccactgtcctccactctatgagtaataaaatggcagggtttacatgaattaaggatgagtctcctacttgtacagattttggtactatttttacgtatcttttagatagtcctaatagaagtgatgccaactttctcatttgggatggttatctttttcaagggagttaaattatgctttcctcgtgcttcacttacagagtttgtagtctgggagttacatgctggaggtagctagacagtttggcaagggtaaaagtatagctctagttgaagataggttttataagcctttgttgaaaagtttttttttgttgataagtaagagaagaattgtattgctaagaggtgctaaaatagcgactcaagatgtatagaaaagaaagggaaatactcactcctttacgagtaaagcaaaaaactgtccataaagatgtaaaaaaaaaaaaaaaaccctccctcaatgggaacccacccaatcattgaactcaacaaaggtggagggaccatcttttataaacaaattagtctccgaccaaagtgagttaagaaaggaagttttcagcctttggatggacagcgcttcatcttcaaaggcgattctattcttagtcttccaaacagtctaaaaaatgcaaagaggacccgctctccaaacagtcttgcacttctttcccataaaaggaaccagtccaacccaaaagagtttccctaactgacgatgggaacacccaagacactccaaaaagggtgaaaagcatctcccacaatgcttatcttttcacaatgaaggaggtggtcaatggattcctcttccacttaaaaaaaataacatctatttgctaaggcccctcccctttttttaacttggtccaatgttaaaactttaccccaagaagccttccaagcgaagaagcttacttttggctacacacacgacttccaaatgttcttcattggaaacaaaactgaggagccaggctctagggctttgtaaagagactttgtcaagaaaattccatcctttgtttccatccactgcaccctatcctcctcctccatgatcagtttctgaccacacaggcatattagaaagcccaccacctcttccatctcctaatcgttaaaggacctagtaaagcaaagactctaactccccccacttgctgtcccggccaaacatccttcatccaagcttcttttggatcagctagagcgaacaaggaagggaaggaaacacacaaaggtgtatccccacaccaagtatccttccaaaaactcaccctttggacattccccaccacaaaggagaatctactactaactaagtgcccgaacttcctaattgctttccacaaccctacaccatacccctcgcttacatcccgagaacaccaccctccttgatcctccccatatttccccctaattacttggttccataaaaccctctctcatttgcaaagctccaactccatttgcaaaggagggccttattgagtgtagaaagactcttaacccccaaacccccttttctcttatcaagacatattgttgcccatcttactaactgaggtctctgaactaaagccccacctccccacaggaaatccctctgaatctgctccaaccttaacccgacccccctttgcaattgaagaatagacataaggtaaataggcaagctggacaacatactcttaatcaaggtaactctccctcccttagaaatatattgatgtttccacatatctagtctcttatggaatctctcctccacttcatcccaaattgcaacagacttgaagggagcacccaacgacataaccaagtaagtggagggtaatcttcccaccttacaaccaagctcaaaagccaactcctccatattctccacattgcccattgggaacaactcacttttatccaagttaactttcaaccctgatatagcctcaaaccacataagtagccaacttaagaaggtgatttggtcctcgctggtcttgcagaaaatcagagtatcatcagcaaaaatcaaatgggagattttaaccccttctccccctctacccctaactggcaaggtgacaaaaaacctccattaacaaccctttttataaggtagctgagtgctttcatcactaccataaacagataaggcgaaatagggtctccctgccttagacctctagagctttgaaaaaagcctgaaggggtgccattaaccagaattgaaaatctagtagtggggacacaccattttatccatttgatccatttatccccaaaacccattttttccaaaaccaaaaacaagaaaggccactccacatgatcatacgccttctctaaatccaacttacagagaattgctcctcccttgctcttcataattgaatcaattgcttcatttgcaataagcattgcatccataatttgtctaccctccacaaaagcattttgggcattggaaatcaccttatttaacaccagctttaacttagtagccagtaccttatccaaccacttgtataaccctcccactaggttgataggcttgaaatccctcaagtcctctgcatcccctcttttcgggatcaacactaagaaagttgcattcacactcctaacaaaacgaccatcatcataaaaatccttaaaaaaattcatcacttcatccttaacaaactcccaagaaaactgctaaaaagccatggagaaaccatccgggcccggtactttgtctttgctaaaattcgacagagcaccaaaaatctcctcctttataaaaggtttctccaacccttttgcctctgtagaatccaacctctcaaaggacagaccacttaagctgggtctccactcactagtggcagaaagcaaattttgaaaagctctacccacttcttcctttatatcattgtcctcagtgatccatgttccattaacttttttttttttttttgataagtaaacacacagagaaaatatatatattagaaaaaaggtcacttaagactgacccaaaagcatacagggggtatacaagaggcgcctaaaagcaagaacaaaaagaagaggggatacacaaaatcaccaaccctcaactagaacctaaccaatcaaaaaaactgaataaaagaagaggttcttcatttacaaccgacttagtccaaaaccaaaggttacatacaaaagattttttcaacctatgaaccgaaggctcctcattttcaaatgcaatcctatttctttccttccataccgcccgaaaaagacacaaaggggctgccttccacacctttctacgcttcttgcccatgttgataccatgccaaccaaggagggtatctctaaccgaaaaaggaaggacccaaattatgctaaaaagagcaaacaataactcccataaaactcttgccttggtgcaatgaattagaatatgatcaatagactattcttccgcacaacaaaggaagcatctattagctaaagtccacctcctctttttcagttgatccaaagttaacaccttaccctaagaggcttcccaagcaaaaaaacccactttagtaggaacacggggactccaaatgatgctattaggaaactgaacaacacttcttgagactagagcgcaataaagagatttaactaagaaaatcccatccttagtctctttccacaacactcttatcttccaaattaggattaagtctccttccccggattgtaaaaagtaatctctccacctcctccacctcccagtcattgaagggcctagagaacctagggctccaaaccccttcctctcccgaagagtcccacaactccactaaccaagcctctttaaaagtcgcaaaagcaaacaaagaggggaaagaattacaaagagcgaagttcccacaccagttaatggagcgaagttccattaactttgactctggccatttggttccttcttctatgcgcattagccattcggtggaaaaagctcgtgttcttatcccccttcgtcaaccaaatttcccttgatttctatctctaagacgtctcttctaaaagagcctacttcttgtaattctccctagcttctcccaaaatcctcctcttccaaagacagtgatcgaaaattttcctctgtatcccaacaatttacactgttcaaggccaaaaccttctgaacttcaatcttcccaaacacttctttgttccaattactcagaaaaggtttcaaagctttcatcttttgaacaagaatgaagctagtagtcccactgaactttagcccctcctaccacaatctcaataaatctttaaaaccctcctctttcaaccacatattttcaaacctaaatggggtgggacctctcctcaccccttcccccttaagaagaattggaaaatggtcggacaccggtctagcaaggacatgctggacgactccaggaaaatgagactcccagtcattagagatcaagaaccgatcaattctagacttcaaccgattacttaagccgcctctccaaggaaattgacctccttgaaggggcaaatccctcaattctaagtcctcgactatctctgagaatctcctcatggcaggggataaaataccacctctactacacttcgaggggtatctgatcatgttgaaatctcctgccacacactagggaacgtagcctctcagctaatgtagcccagcccccaatgaaccccttaccttcagggaaaactaaacaaaatcttttagcttccagatctataactgaacacagaacgaatttccccgcctcatttacgcgcctttccagcttgaactttctgccctcatcctcccagctcttaacaaaccttcttgctctttcctccctacaacattcttctactccatccaacaacctccctaggcttaagtctcctaaatgaatccaagaggataagcctctacttctttccaagatgatacctctaagcttcccttgaacttcctccaccgagacctcaaatgacttcgattccaccgcaaaccagtaactacccccctctcatgctctctattttcatctacaaattcctttgttgaaaagtgatgatgcttgaatagtgtcccaacgttgtacctgttagttaggtaagggtaagaaaaaaaaacacaggtttgtacactccattacttgttccacatacaccttggcatgatcttagtttatacttttcctagggctgcccaatactgctacaggtcaaggttttattttggtaattgtggatagattgtctaagataacccattttaccctatgttcaaagagtgttgatgcttcctatgtggcaaagtcatttttgaatgaaattgtaagtggtttaccttctaccatagtgtttgatagggatgtcaagtttgttagctatcgttggaagatgctttgaaaattgtttggaactactttctagtattcctctgctttccatcctcaaatagactgttagacagaagttgttaattgtactctaggtgatttgattaggtgcttagttggtaagaaacctggtaattaggatcttggtttacccatcgctgagtttacttacaaccactctgttaatcagtccataggaaaaagtcattttgaagttgttcatggtatttcaacttgccaatccattgatcttgtttctttgcctactgatttatcattcttctaattctgcctgtctttgttgaccttattcatggcttacatgctaagatacaacaaaaaattgttttatgtaatgttgattataaacttgttgctgatgtacatcaaaggaataaagagttcggagagggtgaatatattatgattcacatttgtcctaactgttaccctaaaaattccctaaagaaacgccatgtgcactcacttggcccattccttatccttcaaagacttggatccaatttccattgcaaataaactataagttcagttttcaatgtggcagatttatttccatactgaggcacatttgagcttccaacgttgcctccttctgtttttgcaagacaatcctctgatcttatgtcttgtgctccttctgtttgattgacgtcaactgatttgattttggttatattggcggatcattatgttggttccctagctggtgatggttaatgcttccttgttcaatagaaagatcatcttactatcgatgatacttgaattactgataaggagtttcaccaacttcttcttgatcttttagagcaatatttgcaacataactcataggagttacgtctttttttctaggtgagacaatgatggagataaagatgttaaatcacactcttatgttatgcatacatatagaaagtgatagatgtaggaaatgataatattttattttgttatttgttgtttattttaggttttttattatttagtgataattttttatagagttggattattaaaattagtttcctactagagttaggattgtctatctatatataggccaagtgatgttaaatattttagacttttgattaataatattcataattctttggaatttcttcttctactttttatttttttcccctatattctttttctctttattgtcttacatagctctttgttttttagtttcaagtttatgctgcttaagtatcatctctcataatatatatttttttttcaaggctcccatgatcaccgagtatcaccttatataattttcttaattccaggctagtgag

SEQ ID NO: 12643 - DNA, 681 bp, Vitis vinifera
  Intron number 8 from transcript GSVIVT01020995001 (locus G SVIVG01020995001) derived from phytozome v7.0 (chr-ID chr5 ; pos 15773371 to 15774051)
ttcaacgtggagggagctttcataattattatgtataatgccgaagttaatgctgattttggtgttaaagagatatttaagccaaaatgtaacttttaaaaattattcaaatattgaaaccaagaaattctttaaaaatgaatttctttagtgatgttatttgctggattcaaagttttggttttttttattttatttttattttttattaacaaaatgttctatatttttactaagacaaataatttattaagtgaaaaaatgaagacaaattataactatccttctagtgaaacctagaaataagggaagagtgcaaataagagaccaaaagagtgacaagatatgaaaatcagtgtagtacctttagaaacccaaagaaagtatgaagcttctgtaggcaaaaatcccctgcaaatgtgcatactttttgtaggtttgggtaaaaatgtagaagtaatagcttcaatgggctaatgaacagaagcaatttcacaattccttttatattagctaaatttatcataacttcaaaattttatttaggtaatatcaaaacttaatgaaaaattatgttttcatacaaaatctgcacatgctgcgtactaacaaggtaatgcaaggcttttctgctgcatgcttgcagtattttggtgggacaaactttggccgttcttctgg

SEQ ID NO: 12644 - DNA, 3541 bp, Vitis vinifera
  Intron number 2 from transcript GSVIVT01005159001 (locus G SVIVG01005159001) derived from phytozome v7.0 (chr-ID chrU n; pos 18835303 to 18838843)
agagttgtgaaacccagttgcaacattaagttcaagtttctataacttcactgcagctaatgctcctccaccaccaccaccaataacgccatcgccttctcttcccactaatgtcagtactcctccacctccatccaataccatgtctacataaggtacatatattagttagtttgtctccatgttctgaatcttattgagtatatgattcactattcaaattaaccaaaatgatttacaaagcataacaaattgttaaagccagatggttagcatccaatgtatattatcgagtttgagtgaaaggcaactagtggtaccaaaaataggtaccttcccatcaagtaccctttagagaaaagcacatttccaaagtatcatatgcaaagaggtacctttgtaaatccacatctgatgactggaatgttcatactggccaagctaacaaggctcgtgattcttaacttggattctagctaaaaagttgcaatcaccaccaaaattgaccgaggaagtcaacgaacaccaccatataaaaggtaatccaattcattgtaaagataagataaatctaatacaaaaaatacgtttccagcactcgtttgataaaattactaagacccgcaattaaatcaatgcttttgtcttttttcctcggcatgaagacatccaagaagtcatgatgactatgcatgaaaagatggagacccttcagtattgttacttgaatacaaattataaatctcacctaaattttcaaatcaaccatttgtagaggggaaaatggtaaggtctgaaaaagtgaatctcaataatggactacacctagaggggggttgaataggtgttgtagaacaatttaaaaaatctcccaacaaagattacctaacattagactttctcaatgtcaagaattttctcttccaacaactactcaacaaagcataaaatccacaagtaagaatgtgtggaacaacactctcccaataatttataaatgcaaaccacatgcaactgcttcaacaatcctaaaaaataaatcaaaagaacaattatctcttcaactcacataaattcacttcatgatatcattaaccaaaatgagcagaaaaattattaaggatattccatggatcatcacacttatatcatctcatatttcttctattcaacatctatacccaagtaatcaatgatatcaaaaaaaaaaattaaatcaaagtgtagagtaagagaaagagacaattaacaccggattttaacgtggaaacctccgaagagatcaaaaaccacaggcctaccaccgattgaaaaactccactatgaagaataaaaactgagtacaaggttttacctagctcaagccaaccaatccttctcggaccacttgactagtaccttcactttcagcttctcaccttcatttttctgagcacacttggagtccgcaccaagttcaatcttagcctcttcttgaatccatacaagaagaaaatgagttttgcacaaacccaaatagaatgagagattgagatatgaatgaaggaatgaatcaacctatttattgcttaagaaaatccattaaaaactagtttggaaaacattaagagaagtggattttctttgcaatcaaaaaccccaaattaggaaaacaagatgagaaaatgaaaaacacatggagtggttcctctctccacgttttctacagtcactctccagaaaaatgagagaatattgattttttaaagtgtaaaaagaagccctcaatctaatggctgagatttgatctaaaaaaattagttggatcgatccatccttgcacctggatcgatccagaaacaggggaataaaagtcttgcaccaaaaaccatttctctcaactttttaacacatttaaagattaaaaatcgggttgattcacattcaatcactacacacttggctactgattactactcaaaaagtgcatttttataaacttaaacttaattgtactaagcacttttgagtagtagttagacctttttatcccaattggcatgttaaggacctaacaaatgttactaaccaatttctggtaagttttagtgtttttggtagcttttttatcactgaaacaggccaagattgagggagagttttgtgcaagttatggcaaggcaagttgaagatcaatcacatgaagaatccaagctttggagcacttcaaaaccctttgccaaaattggaaaggggttgacaaagctattagtagtaagatggaggaaaacagagcatttcgcaaggcaaaatcatcaatttcgcaaggtgtgccaaaatttggcaaggtgtgctaaaatttggtagggtgtgccaaattttggcagggtgtgcgaatatcactttgtgcgcatcggccttaggaaaaaatctccaaaattgtaatttttcctttttactcattttgtaatagataaatgacattagggtttgtttaggaactacaaataagggttggaaaacctctcaaatgatattatgttatgttttagatattttgtaaaggctagttttgaaggaaatatacgagagtttttctctacctttccttctcattttctcatcactttttctatagctaaacaccctttgaaaatgatttcttagatgatgaatggctaagtttcacgtttcttggagtgatggaagctaggtaaaggactcagatgcaaaggtgggagttttccttgctttaaatgaaggtagttgtgtatcattaatggtttgtatttcaagtttcaactttaatcccttagaatcactttgaatggccaatacttggtaagcttttaggattctatggatgcttattgctagatccatggatgtccattagttatcaagtacgagccactggaaagtggttcaaggtgagggtctttactgtttgaagccattaatgggaaacaactaccatttttcaagaaccctttggatcaaaacttatttgctaaataaaaatccagttcgggagataaccatcctttatgttattgtccccaatgcgaggagaagatccgaaatttcccactttgcaacaagatcatgatcctagtaacttatagctctaagagactttctctttatagtaatttcagttgtttatgtttgcttgacttaaaatcaaccattccaatcaatcttattttcattaaaaattaactttcgaaaaaggaaatcaccatttctcatttcattaatgtcatgtgtacaaagaaaacccatccctgtggacgatcctagagccactatactatagtagctttgtctttgctgccctagtataaggtgttgtaggttttataaatggtttgataaacacccgactgggcatgaatcagctacatatcttggcctcttagcaaaatcttagccttcaaagtctagttgtccgaagaggaataggaagccgagttaggggatacttaggaattttgtctggaattgtcaacctagctaaacactcacagggtccttttgtgaaaaagaaaagaaaagtaat

SEQ ID NO: 12645 - DNA, 5842 bp, Vitis vinifera
  Intron number 1 from transcript GSVIVT01020801001 (locus G SVIVG01020801001) derived from phytozome v7.0 (chr-ID chr1 2; pos 1816230 to 1822071 reverse strand)
ctcccgaacactgtcaggtgatttccctttttttttttttttggaatttcgccttttttttttttttttttttttttctgggttttgtttattttcactgggtttcaattatgtgttctgtttggttactgagaaaatgcgagaaagtaaaaaaaaaaaatccttgaatcatccttccttttgtttttttttcctctctttttttgtggtttacgtgaaacgaagaactgacttcaggaaaccaaatggttttgttagcttcagtggtatggaggttgatttttggttctctgaaaagtatgaaatggatagaatttcagcttaccatgtcattttcctacatttttgttagctaccatatggtaggtaattttgttcggattgattccacttaattttttcttggggtcttgtgtgtattcatttaagttggtgtcctgatcttgtgttttaattcattgtgatctgtttggttggtgataaaaacgagggaaaaatcaagggaaatggatctttggatctccattttttagggacgtgtttacttttggtttccagagaaaaaaacaatatgatgaactaatcaacctcaaggaagccaactggttttattagcttcagttgagagaggaggttttttggttttctctcgaagttctaaaataagtcaatttccaattatcagttttcgactttcctacatttccttgaccaccaggccaagcattaattttgttcagtgttgatctgatactggaaacttatgttaaatatttttcactgttttgatgggggtgaaacatgcctagagggtgttgatctgctgaatgggactgggtctggtttgatgatgatggtggtgtatagcttaaaaaaattggaaattgtaagttgacccaaaggctgtactcagaaatcttgactaagtggtaactggtgagtgaaaaaaagtagatgaatgtcagttgtaaattataaaaactggacactagtttttggaaattgtccaactatcattgaatgaccaaattattttagataaaacatttagttgaataatgtcttgtttccttatttcttgttcttaaatgctaatcttgacgttggcttgaagaaaataaaaataatctcagatattttactaaacttagctcaaaaaagtatcaatgccaactaactgggttgcctaaatttataaattttacaatgaaattagttcaaggaatcatttttatcagataaaagcaacatatcctgcatacaacaaccaaaatttatcccataaatttgtagtaatttatttgataaaaatccactaaacaattttatggtcgtgctttttttaatcataacataccattaatctaaaaaatgaagtgacttatttccctcctatttacaattgggtcatctaatttatataagaaacaaattcttactaatataaaaccctcaaaattagttaaatcgtcataagtgcatgtacattattaataaatttccaccatatagaagcaagcaaattttgccatctatagcattgtataataactatcaaatcttgccttttccacttacttgggtcttcctttgggtacccctattaaattagttgcagcttgggatcgggtggaagagcagttctataaaagactggtgatgtggaaaaggtaatatatctccaaaggggagaggctcattctaatgcgaaacactttatccaacttacctatctattttatgttttattttgcatcctaaggatagtcaaattaaggttgaagtagattcaaagcgatttcctttggggaggcaggtctctagatagaaccacatttagtaaagtgggtgattgcctatttagataagaggaaaggaagcttggttgttaagtgtctctcttcccttaacaaggtccttctatgcaagtggagttggtgatatgcctttgggaggctttcttgtaagtaccttacagggtggaaaatacaggaaagaaaaagggaggtgacgttctcatgaagtgagagatgggtatgaagttgggttatgcaaagctatcaagaaggattgagatctttctaacagtagagtctcttctttgatgggcaatgagaggagggtaaaattttggaaggataaatgagatggagattagtcattgtgtgtatcttttccttctttatattccatagttgcatctgaataggcatgggtgaaaaatttatgggatcgatcacattaaaggggttactggaatccttgcatctatagacatttgagcgattgtgaggtggaatatgtggaacaattcttttcaagattgtgagggaagacaaggaataaggaagaagaagatagggtaatttggatggagttgaagagtggaacctttgtcgtgaaaacactttacactatcctagagccagggagggtagttcctttctcaatgggtgttattttgaatcttcggtttcatccaaaatgagtttttttgcttgggaagtgacattgggaaaggtattgactttggatcaacttcagaggggagggtggtcatcgacaaatagatgttttctttgtcaaaacgaggaagattgatcacatcctccttcattgtatcacaataagggttttatggtagttgttattttctctatttggagtgtcttagggtgtgatatcctccatggttaaagagagactcttaggatgacatgacttcgttgtggggaataaacaattgaaaaggcgtggagagcacctcctttgtgaattttttggacaatttggaaagaaaggaataaaagatcatttgaaaatgaggcaaagttgtatatagatgaagtttcattttctttaataactttgttgaggctacatcctatccaacccttagatcttttggttgttgttgaactttgaaactccatgcacttcaaccatcaattcagtcatgaacattaagttttgtacttcagtgagctgactttgaactctctcaaagcatgcatctttgacctatttgaatgccttcaaggggcattatcttcctcccaaagaccaccaacacaagaattgattcattgttggagtgtgatggatttggggtttttggttttcaaaatatgagaatgcaagtttcatgcttgttttgaaaccaatgcacaaaagaaataagaaacttagtgaacatgctatcaaatgtttgtatctctcaagagttaatcttaaagaatttatagcagttaactttgaagaaccacataaaataggaaaagtacttttctaaaatatgggctcaattgatgattgatagcccctcagtcgagcaactctaaagctattttattttttcaaaaaacaattgcttcgactcccaaccatcacggttcaattgatcaagccagttttcttccataatgaacttgattttttaatgaaaacgttgctccactttagtgcatataaaatcactgtctcaacgccctaaaaatatgcaacaagctcaacataaatgcatataaaatccccagtaacatctcaatcacactcctttttgttgaagaccatcattgattgaacttgtagttgtacttgtagcttcagtctttatagcaatagggtctctaattggatatgtagaaatgatggattcttgcaatcttggactgtaattgccaaaaaatgcaaaacttccataatctgttgaggcatcaaggcatcccctagtgaatacatagtggagcctaggataacaacattatgaatgttttagattatggaagaacagtaaaactgagaaggcagatatatgttttgtctattgatccaaaaatgcaataacttaagatttaggctccttggtgtagcataaattctggtaaaaatgcttcttctgtaaaagcttcttgactgcagctttgttgagaaaagcttctaagtctctaaatttcttctgtctcaaagtactctggtttgtgtaaccaaatacattccaaagcactttgatggccaagaagtgctttataattgtcgaaaaactatgcttggttttactgtagcatagattatgtatgcttatctgacacagaatcccaactttagtatctttgcaaatcttattgttatttgttgataggtcaaatttattgttatttttaatattggatttgcaagtgatttcctactcaactgaagtggccaccttggtgagactagaaattatttagaagaaagattacgtacaaaattctctgaaattctgtttagtgcttgctgatttgagaggttattaaatgaaaaatgccttgaccaaggcctcttttaattttcttggtgacttgtaataattttgtgttgttccaagggtacttttgactttctttgaggaggtacaaaactggctggtatatgatttctagaaaatggtgccttcttttttgttatttataaaagtttatttgaaagaaaaataaataatatctaaatgtggtaactgtttgtgtgcatgtaccaaggctagtggttactgtcatgtgctttgaggtgcatttccttttgtgcaaccatccaataaaatgttaatataatgttttctgtttttgtccattgccaattttgagtacacaaaccatgaccaacatataatatttagaattgaagcatgaagatgaaatagatgggtgcttttttaaatgctttcaggtttctcgacccctatagatgtcaactcagctgaacctaactcaacaaagccttaatcccaaccaaatgggcttagctgtatgaatgtctttttaccatctagttccatttaaagccatatcctcagtcatatccttagaagaaatgtcattttctctgcattttgccatgcctttctttagtatctcttgtcctttgggcgctttcaacttgaataaaatcattcatcagtactggtccattcataagtctgtatgttacacacagctaaaccatcttaagtgactccctcaatcttgtccttgtttgttgccacatctaccttctcacacatgaacttggttcttattccatcttttcttgtggctatactcatttcttgaacatgttttttgactattgcgtggctgtaaaactagtggaagaaatttgcaaagacaactaaaagggcagcttttgtggtatataattttggacaatcaagagtcattattttccaacagtgattgtagttgactatacaaatgtttcgatggatctgtggctatttaagaaaagaaagaatggatttatgacaaggtagaggtagcaccaattgagaacaagataaagaaagttgtttaagatggcttggccatttgcaataaagatttcagctttacttgtgcaatatgatgaaaggagaaggagctactaagacaagaggaaggccgaaaaggaagtgagtcaaggaagtgagaaaagatatgatggcttatgattttaactgaaaggccttatacataagctagatggctaaataagactcatgtagcctgcctgagtagttggaatgtaagcacctgtttttgttacttgttatttctcttgattattcatatatgcattcaattactaataattaattttaatcataaagttttcaatattattcatctctgagtgtaggatcatatcaaacatacatttccctgcaacttggattttctatctttctctgttcatgcacttattgtctggaaaattttggaattggataaccttttggtcttattctaggagttttatatgactgaagtgattttttgatgattttttaggaaagcaatcaaaaggaaaaaggagaaggaacctc

SEQ ID NO: 12646 - DNA, 9700 bp, Vitis vinifera
  Intron number 2 from transcript GSVIVT01000517001 (locus G SVIVG01000517001) derived from phytozome v7.0 (chr-ID chr5 ; pos 13561938 to 13571637 reverse strand)
ggaactttccctgtcaaggtatgttgcatttttatctattctagttttctctctatgattatttttgtgtaactttaagtgtgctaaatgtctttaccttctattggttgtttgacttatgttgtttcaacttacctattgccttttttacacaaaatgtccttttatctttctttctagtgctgctatgttgtcttcctgcttttatatggttgtgagacattctctttggggcagagggctgcaggttttaaacatgctggtatcttgagtgtgtgtgaattagatcatgcgagggaaatttgaatttctaggaaccatgttgtgatgtatatactttcagctcatggacagagtcagttggataggacggagccaaaaaggcttcttaagaaaatgagcatttgggatgcagtttttggaggatatgagtttctcccagctcagaatttggtctcccatatatttttgtgaagggtcatggttggtacccgtttattcaattaactgatcctctgttagtagagtttggtacggttcaagtcttgcaatggatatatggtttggtggtctaggtccattgaaaattaatgcaagtattggacccaattatgatctgtacttttggaccagctataaatacaatattagattttaatatgagtgtgggaactaattgtgttattcgtttaagttcccttttattgcccatcttattcctttacatgtttcttacattactagtcctttgacccagcaatatcttcttctcttaaacaaaatgtgtgccttacaggagacttaaaatttgggtacccaaaatgctcatataagtttgaactagagccacctatcaaaaaaaaaaaaaaaaggttagaacaggactaaactgaattgttgagggtttgtgtcctcattgttgccctgagtatgaccagttgagtcatatttactggagcatatgccataattagaatggtttaggcatctttataatttctttcttggtctgtcctaggcgaactgtttaatgacagacaagaataatgattatgttgtcaatatctttcttcttgcttttgtacttgagccttttccatctaagcattgtgataatggtctagttagtgattttgcttttgaaaatatgatttcaagcttaggtacggatcataaattgtagggtaagaatatgagatgattagggttgtcctatgaattgagccacttgtaagcaactggaggttagcttgtttatgaaattgcatgcgggttccaaatcctgattgctaagtgggttgagcttgaagacggttgggttatgtttaggattctgagtttaggtgtatggaagggaacaaatgtgtatgggcatcactcctctctgctttctgcttctccagtttggttttttactttccaggactctaggtttagatgaaataccttctttgctgcaaataaactccaccctattgctttgaatttgatactacgcaacgttgatcagttcttttcttttctactttccatggttttcaagtaattgctgggtcttcttctgttcttttttggatggaactttttttttcttatttttgcccctattgggactcaaacctagaacctcctcctacatcttatcaattcctctaggtttagatgaaataccttctttgctgcaaataaactccaccctattgctttgaatttgatactacgcagtgttaatcagttcttttcttttctactttccatggttttcgggtaattgttgggtcttcttctgttctttttttggatggaacattttttttttctttttttttttgtccctattgggacttgaacctagaacctcctcctacatcttatcaattcctctaggtttagatgaaataccttctttgctgcaaataaactccaccctattgctttgaatttgatactacgcagtgttaatcagttcttttcttttctactttccatggttttcaggtaattgttgggtcttcttctgttcttttttggatggaacatttttttttcttttttttttgtccctattgggactcgaacctagaacctcctcctacatcttatcaattcctctaggtttagatgaaataccttccttgctgcaaataaactccaccctattgctttgaatttgatactacgcagtgttaatcagttcttttcttttctactttccatggttttcgggtaattgttgggtcttcttctgttctttttttggatggaacatttttttttctttttttttgtccctatttggactcgaacctagaacctcctcctacatcttatcaattcctctaggtttagatgaaataccttctttgctgcaaataaactccaccctattgctttgaatttgatactacgcagtgttaatcagttcttttcttttctactttccgtggttttcaggtaattgttgggtcttcttctgttctttttttggatggaacatttttttttctttttttttgtccctattgggactcgaacctagaacctcctcctacatcttatcaattcctttaccgtagttaggtctcaagggcaattttggactattttatctttgcttctaaggcatcatatttgcttttgatttagagcaagtcctttgtgttttttttttttttggaacacttatttcttttcatattttgttcatctctagctctaggtgttttaatccttctacagtgaggattttttgttttgaaattagcgggaatcatcttacatgcattacctttgtggtttttttctcctttagttaagtccaatcatgctgacagggttgcttgtcactgaggggctgtttacttcattccataggaatcgaaggaaaggagtcattccctttcctttgtttacttgcattttggcatttagggaatgaaatgtagtaggccccaccaatacttgagaaacccattcctccaattggaggaacgggattctccttcaaaagcaaagaaacgtattccaaaagatggagaatcaaaatttctccatctgaaattacctaaatgcccctccctctaattctaaatattttaaaataaagatttaaatgtttaaaaatttaaaataaatatcaaatatttaaaaccattaaaataagaatttattacattttacccccccaacctataccatgttttgcacattgccccctcaagttcaaaatcgagcaatgtaccttctatgctttataattgcatgcaatgtgtattttttgagtcacaatgttacatttttggacggaatgacatgtgctctcagcgtgatcgagggcaaaatgaccattttttttcttaatctacaaccctcctctcccccgtcccccaagctgaagccctcctcccttgttcttccttcccttcgaagccttaaaatccaaattccacaaagctgttgccaaaaaccccacataatttctccttgtccatagggtggaaatttgaaaattccccaaaataatttctcaatctcaagaatcctcaaatttcccccacttttctgaaacatcaaatgaaaccctaaccctcaatttgactgagttttattttcccaaaatttccctaaaatttctttaaattatttgaaagatcaaaacaaaaccctaacccccgttctcgacatgcttctacccattaaataattgaaagtaaaaaaattaccgtaactccatatcttctctttgatgtgagcccttcattagcttctttgggggaggagggctttgtcttggggcttcatctgcaacaacagggtaagaaacaatcgacggggagaggagggttacaaattaaggttaaaaatggaatgacccttttgccctcacttattaaaaaatgaccattgtgccctcgatcacgtggagagcacatgccattccatccaaacatgtaatgtcgtgactcagaaaatgcacattgggtgcaattataaaacatgaagggtatattactagattttgaactcgatgggacaatgtgcaaatcatggtataggttaaaggggtaaagtgtaataaacccttaaaataaatatttgcctagtggagcatatttttaaaagaagtagggaaaaaaatcatagatgcttcaaaaccataattataacaatttttttttttttaattttaaaagataatttcataatttaagttaatgaaaatccttttttaaaaatgaaaatattaaaaaaataatttttattcattttaaattccattaaaatagaattttttaaaaatctctatttaaaatagtatttgttgttaaatctctaatgataatagggaaaattatgtgcataagggcaaaagtacacatttcattatgtttggtccacaattagcaaatactacaaaggcaaacaacttcattctgattctgtttcctgctttgtaagtaaactctttggtggaattgctgattctgattcccttccattcattccttttctttcccttatctgattcccttccattcattccttttctttctcttatctgattcccttttttatgatcccctttgctttgaagtttagtaaacgtgccataaatgtcctgctaaatgtttctcgtctcatgattcatcaaaatggtttcacttcttggtttcttcatccttcgagcctttttaccaatagatacctggatatataatttaaattttgaggttggcttaatttatccatatgaatgatgcctactgaagctcatgaatgggcaaaaactagtgaaccaaactgaactaattttaagcttagcttcagctagtatgaacccagatctccaaattgtttactcccttgaggacaaagttttcttactaggtactctgatagctttgtttttctacaacaaagaatacctagcaggaaatgcttaaaagttataggtacataaatagacttcagtatttgggagcatgggaatgggattaagaaacaagagcgtccctttgaattggatagaattatggtgctcactgagagctttaatgcttgatttgtattagagattcagacatggttatataatcgtagatttctgctagcttggaatacctgaaggatgcataaaggtccctttcataacctagaatatctttacaatgttttctgtttactacttgtccattcttctcagaatttacttcattgtacccatagattctgtgatttgatttatttgataacaagtttgtggtttaatatcctctgcttaaagcttgaactttaaaggcagtcaccatcacctatgctttgttttgattgcatgcagtagcaatagccccaaaattgagtattaattttagtgttttggtaggctgcttttgtcttatgtttatttggcctaaaattgaaaaacaaaaagaatgatttgtgagtctttggaagtgcactggtcaattcctgagtccactggtcccagtagaagtcaaatgggaccaggtagtttcatattgaagttggaccaaaatgatgttatggatagggaaccatagttggattgatactttaaagaatagatcatctatctgatggagtaccaacctgatttcctttttaaaccaatttttgacttgcatccaactgtgacagattggaattacttggactaataggtcatgttatagtttagtagttgattgtctaccagctgataatgcaactggatcattgtatagttctttcttctcaacaaccaatttaaaaattgtgtactattgagtattcctagagataacacattcagcacagatctgttatacaaaataccatctcatatgcttgaaattttcagtcttgactgcatcattcctaatcataactatgccatgaccttatgcatcaaccattgccatactaatctcttcaaggactagaattgtagttgtaagtctcatttcattcctacccatttgtggatgccaacttgctgaattttaaccaaactaaattgttttaaaatctaccccctgtagtctgtagttaacttgtgaattttaatataaacatattgattaaatcatagtgaagaaaggtgtgttaataccaagttggtgaagagggagaacatgttttcagtgatctcctaccaaccagacaagtattcaaatacttgacagttttactaggaagtaatttagcatttagaccttgtgaccctgatgcctattagcgactttccactaagtaattctgttgaaacatgttctctctttttggcaactaccatgaattaagatttaggaaggagaattagaacaaaaacatggaaatgctgagggcatatctctgtgatgaggaacaaaggtagctaactacaaaatgggatctgaaatacaaatgcattttcctttttggattccagcatgatctgatgaccaggccttcaggctctcatctagagtttggaaatgtttactgggaatagacttagtgggcatgtgcataatggcttgactgttgcttgataattatggttcagagtaaaccagtgttgttcttggttttgtatcaatatttctccattgacatcagaaatacaaaatttcggttgaatgacaatgatacacaaccaataagaaaaatccaaatagtatatgtctatatatattgggaagcaacattcccctgtaaaatgccctttaggctggctcaagtggcaataggttgggttggcaatgtgggaggttttaggttcaattcccaactggggaaaagagttacttatcagaacaaaaaaagggaaaagaaaaaaaacattcctactggaaggagttaaacaagtaaccctggattacataatgtagcccaagcatgataacaagttttatgctagggtaccaatgcaaaattagagataaataatatccattggatattagataggcactacagcaattccatatcctatttgctacacatgctaatttcaaaatataccttttagtttgttttattattttaaaggataaatgttattattattatgcctatatatataaatccactcacttattggtattttcttttacaaaaaaaataaaaaataaaaaaataaaaaaataaaaaaatcaagacttcgaattcctttttttttcattccaactcttttgtcattctaaagtgttgaaatgtaaaaaaaggaatcctaagtcttgatttttttttttaataagagaaaagtagtacttccagtgagttttgtgattgaccaggattgaaactatattctcttggcaatgcaacctgggagtgctgataaagatcagctggtaaaaatcatatgcatcggtttttgatgaatgtgtattagtttcagagatgatttggaggcttcaaggatcttcttaattgcaagtgctttaagatcattgccttcagagactaatatgtattgaatttgttggaatttggtgataatacattattacattataaagatggtggcttaatatgcaatagggatggaaaaaaagaggagaatgagtgagtaccacttgatgctgtggagagaagcaagataaatgatctgaaaatgtaacattatgagaaagagtttctgatgcagtgagttgtgagaaaaatatccatgttggaatctgataaaaaccatatggatgggagagatgtatccttgagcatgaggttcaaattatcttctttagtgccaaatcattgtccgagagagtgtcaaccaaattttgtacgggagtatgggatgaagaaagatatgcagaaatgacataaagaaggtagattaatcattaagaaattccgaactcctatccagcaaacctttgaaatctgactacacgggtttgactaaacagctatcaacaactttcaaggccatatcctccgcctaattataggttgtcatgtctttttcaaccctcaatccacttttgtgtcttttttctagtttttctggaatctacaatttgaataaaatcagaccttagtagtgtaattaatagccttttttactcaggcgatagtttcttaatttgaggatatagccttaatttgaactcctatccagcaaacctttgaaatctgactacacaggtttgactaaacagctgtcaacaactttcaaggccatatcctctgcctaattataggttgtcatgtctttttgaaccctcaatccactttcgtgtcttttttctagtttttctggaatctacaatttgaataaaatcagaccttagtagtgtaattaatagccttctttactcctttactcaggcaatagtttcttaatttgaagtagaagaccacatgcttcttcaaatagtgacaaaattttccctcataagtttcatttgcagtcttgggtcaatagtaggagagtttagtgttatccatgctctagataacactttcatggaggtctgtatgttcctttggtttatcatgtgaaacagtaccatgtcatccttgaatgatggagcttgtagatggttttatgttatagatgatttctttcttgctcttgtttagccttgcctttgcctggtgcattgacaacattttggattttttgttttgttttgtttttaatacgaattttttgtttttttttttatttatttttttggtttatagatcttttttttttttaagatgataagaaaattaagttacctaagaaaatttatagcttcaattcacacttcaaaatcaaatctgaaatctcacccagattggcatccagattattttaagtctctgagagggccacaaatcaacatgacagggcctgatggatatgatgaggcactgctgagtggtaagatgataggttttggtacaaagttgaaagtgctaaataggagaggaaaaatctgaagagtgcctcaaataaattctttttaatttttatgcttcagaacaaataattattatacaaattgctgtataggattgggttttctaaccctaatgaactgtgcaagattttcctgagtgattcttgaattgttgactgctctttaagagttaatttggaatgctaaatttttaagataattccaatcaagcatgatagagttcaagaagtgtacgcctgtatggtgctgtgactagaaaagatatttcacaaagaagaaggttcatttagttttaatttttagttttcatccattgaccggtcattgtaatcacgattgttaattgttaatgagattgaaaagttttgaagtcccatgccagtttctgtcttgaatggatcaatgcaagttggtcaggcatctgtgttgattgttgaaatccaaatctgattatacagtgttactatgttccctttttccccttggagattggacatcctcatcctagttgtcaaatagagccattgcatgtatgcttcaatttcttttgttctatatgacagaattacctgatagcggtttttccagcatggtgttgtaggaaggagcattgaaccctgttttgctaccaaaatttgtatacagcgtcttgttattttttaatttttacctgtgattattatttcttccaagcagcttcttgggttggctgttgtatttctgtatttgtctatttgctaagaagtcctctatagttatatccaggttgcaattcctgtggttcctaccatcagagtgtt

SEQ ID NO: 12647 - DNA, 2361 bp, Vitis vinifera
  Intron number 2 from transcript GSVIVT01015074001 (locus G SVIVG01015074001) derived from phytozome v7.0 (chr-ID chr1 1; pos 857867 to 860227)
gagcctagactccaaaaccatctttactagtcgtgccttagacctatgtttttgaagatgatcggaaaagtgtccttctagctcgattgcatgggctggtttttatataacagggttgcctggccatgtggtaggctggtcagtcattttcctgccttttacaagaatacaaaaatgccttttgactaataggcaaaggcagtcagctttccatcaagcgtttggtgtgttattagttcacctcgtcaggtattcttcttggagggtagcacgttggggatgtactgctttttggcacctccagttttattaatattattcagttgtgtgtaatggttttgatccgttaattgtatttcttctgttctctatccatgaatgcattagtggcttgcttaattaataacaaacctttgaaaaatgaggttactgatgttgtcaaaggatacacataattgtatttagacacatggcagagtgatccctgtataagaaacaaaataaggaatatgggagtttatagagatacgacacctcgtacactactacatctcatcttcatcaaccctagacctttatcaccttttaacatgtcggcatgctgcatgccacttctaattttgttggtgaataaagcgtatgtgattctattggatgattagcttcttattgtcaaaaaggcgcaaaaaatatcttacagtaagcaaaaaagattatcgacaggctgccatgcatatcatatgcttaaaacattcttgtccttattcaaattcagtcactttccttaatctttcatcaatctaatttcttccttaagtgctattccaacaaccctatcttatcttaaatttagagacatttatataatttgaaattttaaaaaggcttttttttaaaaataaatatttatataattttaaaattttgtgagaaaacaaatgagatattttcattattttggtctttgcaatcacccactatctttatttatttcccatattataaaaaattgaaaagataaaataaagaaaataaatacagaaagtcttcaaagaacagattactttgttgtaccatttaaaagtaagagtctaaccttgatccatctttatatatgtaaattaaaattctaaatataatttaggtggtgataaattttatttcaaatttaaaaacttaggagtatttacaaatgttcatcataaaataaaagaaaaataaaaggaaagtaaagaggcaagatggagatggggaaaaaaattagggaaaataataataataataataataataataataataataataataataattaaatagacataggaaaataatttttagagttttagtttaaataaataattgaaaaaaatggattataaatataattgataataagagttttatataaattggcaatttcctatagatgaaaataatattacttatatagaaaattaggaattagagtattaataattacatcaaagagaataatattaatgcaaatggtatcaagaacgtcaaatactaatttttaatttttgataaatagccgattgaaataattattctttgaactatgttatgttatgtgtggattaagttctttatgatcaagtaatgtttttatgaaatgtattatgattttaaattgggaatttcgatcatatgatttattgatcattgtgtaagtggattttagtttataatttattataatgactttgaaattttgattattagtggtcttgctcaatagagtataaattattaaccttcgttacccttgatagggggtagtgatgctatgcaatcctaaccaataagatgctattaacctttggtatgctattgattgaatgttgatgggggaacaaaatgaagctacccatctagtgcaaattccattatttggttatagtgttattatcagcgaaatagagtaaaatatttatttataaaatcattttgaacatgaacttctactattaagtgtattatattgttttatactttttgaagtgtcaattttttttcaaaaaaaaaatgtaaacttaattattaaattaaatgagtagatttttcttattgacttattttttcttatcgtgttaaatatcgaattcactctttttttataattccacttttcaattacaagtgatgccaatgaagagagattgtaatataattaagagtgtttttattataaacagttttgaaatagatattgtttatgattattaacttaagactaattgtagttgtaacttctaaaaattaaattttatagaatcattgaagtcatcgttgagatattttaattatttttggttttgctagtcaacttaattt

SEQ ID NO: 12648 - DNA, 6874 bp, Vitis vinifera
  Intron number 1 from transcript GSVIVT01023653001 (locus G SVIVG01023653001) derived from phytozome v7.0 (chr-ID chr1 1; pos 8559401 to 8566274)
tttaggagagacctcagagcaagtcctcttagcaggtaaaggggcaactagaagtgactcaaagaggcatttacgctacctctccttgaaaccaacccttaggttaggtgtcatttattcttcttcttcttctttttctggctcaaggatgatgcaaggcgccattggctcaagctcctgattcggattggcccctatgaagggtgagccggttaagccctaatcggtgtctgcatcagaagaaagcaaatgagaaaaagcaaatggagataggtccaacgccttctcgatagggcgaaagacagcttcctcttagtaggggatgagtagtagaactggtggtcggacgacttatgcccggagcttgtcttagagtcctcttctgacactttttctctctctaatcaagcctgtcttgtcaaacctcctcatagaaaggaagatatttcaatacgtgatgtttgtcgggcaccaaaactttaggcacaagacgaggaaagatgggaaggacgtaaggttgcgactcccaggccactgctagcaagttccgatcaatcagcagagtatgatgatgccgctaattagtagaaatcacaaataacttgttgagccggtcgaaattagctttctccacccactctaccggtcgacatttcttcttctttcttatagcacacaaagtaataaacatcagcaccgagccgactattaataaagttgtaaggataaaacaagagggaactatggtttattctacccagaattgccaacgaacgatgtagttcgaactctcaacccgggtgctcgagtgaaccagcctagggccccgaaacaacgacataccccttagtcgcacccttagtagaatccgaaagccccgtcaccaactgaagagaagggatatgagcggacaagctgaatatccttttcccactcatcttcatagtgtaaataaaaaagatctctaacaaagaaagatccaagtggaataacatatccaaaatggtgcaccccatcagtactctgaccgcattcggatgaagaaatgatggggaaatcttcgtgaagtgaagaaactgcctaaaaagtgaaggaagagggaagtggagcccagtattaaattgctcttttctgaagacggtagcattgaagggttctttttcggtagacacagggccaccatccatcaagtgagtagcaaggctattcagaatgcggaagcgctccctaaactttcactcagaaaggagttcgataagcttttccgaatgggtgcaaccgacactttctcttggtcggtcacctttcttgcccttaccaaccgcactagtagaagcaacaccccctattgttgacatgttgaagtagtgggttgagtaagacctacatgacacaacgaccgattattagaaagtagtcacccggcccttttatcgatatgtagtacctcagaagtgcaacgatcagccaacacaagcctaagacccacatttggatggagcgcttgacccagcctatagggcaagccctaaccaaggttccccctaaccataccctacagaagccttaaaccaaaaagcctaacaacagccctaaaaaaccaatcgaaaggcaaaaaaaaccctagttctagcaaacgtcgtcaattgaaccaccgacggtgactcctcttcccaaaaaaacaccaaaaccctacatcctacactcagcgacgtccatattgaacctagaaaagccacaaataatcccaatagcaattaagtgcaccgttgaaaataaaaaaaagtcaatacgagggattaacgacttacctaaaaccaggagaagcaccgttgacagaaacgaagttcaccctaaagcagaactggtacagatggtgggaccaccaggaaaatgaacggtaaaccgaaatcactgtagcatagaatgcaaaagcagtcagagaagatgaatgaaaaaacaacgaggaaagcgacaattggagttgcagtgggcataatgcagatgaaatgaaggcaagatgaagagttgcaagagcaagaaatgtccaaaaagggtgttcctaaaggcctggaatctctaatttataggggaccaaaaccctagggatcccaaaaaacaggccacctaggaatgcgtcccaaagcgacacgtcgcctaacaaatgcctcagtggaagtgaccttcacttaatgaccgacacatgtctcgctgacactaggggatcccaatggccatttttagccagtccacttctacccgaacacggatgcacgtgctaaagggggcattgtgggggcccttccccacacatctgtccacatatgcctccatgtatctggacatgtggcaacacctctcctggaccacgtgtcactccctccattattgttcggacaaccaccgaggcatacaagaacattttatccgaaccatataggcccattgagagtaacacaccttattgacaaccccaaatcctctctaatatgtgaaacgatggcattctaacactggagtggctgatgggacctttcccctccatacgtcaacatcgatgggcaatcctacccatcacccataccttcaacaggctaaaatgacgacaagttgcgtcatgacgcgtcgtctgacacagccactaatcgcctgacaactgcaataattgtcatgtcacttactacacaatcattattgcagcattaggtcaaggcgccagctaagtactactatgctttccccctttgagcactataaaaaccccactgaaacaggactcaggtacgcaacaccaaggactctctcatcaactctctctcaaagggtttctacccatttcaatatctgacttaggctttggagagtatgtctggacaacctattcgggcatcctttgagtagggaagaagaaagctcagtctctagcagctaggtagaagcttttgctgccacaaccaagggaagaatccatccttagttgacctagtatcaacaccacccaacaccctctccaccctccgtctctttctagtttccagcgtgcggctatcaccctccctctcttcccagttctaggatgcgcttctctcacacttcttctattcccagtcccaatgtgcacctctccgtggcgccagccaacacaccaccccccttccccttctttcttctactactgcccatattctcctttcttttttagttgaactctctttcttcttcccacctctatcatgaacacctcccatttcatttcctggtttttttattatatattttttatattttcatttaccttttccatccatagccattcttttatatatatatatatttgtttttttaaaactttatgatttttaaaacttgtgattttaatttaaattaatgaaaacatcataattttaaataaatttctaattttaaaataagtttttgatttaaaaataaattttaaaattttaaattttaaattaaattttttatcttaatttaaatttctactttgaaactaattttatgattttcaaataattttatgattttcaaataatttttaatttttaaataatatataagttaataattttaattttaataatatataaattatatatttatattgtcaccgattcgactgtagttcgatcgctagtccaactagtgaatcgtgaaccaacaacttttccgattcaataatcggtctgattttgaaaacattgattttaactaattaattctaaaagttaatataattttacatttctaaaatggaaaatttgaagtgtatgtaaattgacacttatttgtttatttataaattttatttatttttatatacttaaaaaaatttaaataaaacaaatggctacctcactccatttggaattaagaataagaatgaaaatatacttaaatagtaattaagacgagggtgggaaaggtgagccacctatacccgaggctttacatccctagatataaagctttactaggtcatgttggcatatttttcttaataacagattattaagagacactctatttgattggtgaattgagtatgggaaattttaggatgtcaagttcatatttattgaatttacaatctcaatcatgaatatgtatagtgaaatctaaaccgttgaatgttgatataaataaataagatcattgtacaaataaatgatatcaaaatataaatgaatgaaattaaagtacaaagtaatgaaaattagatacaaaatattaggaatagattaaatatatgacaagttggaattagatccatattttggtaggtaataatgattcaatatcggtacggatactcatgatttataaggagtgagtagtagatggcaagaccaattttgttttgaaaagggaagtaaatgggaaggcacatttaccagacttgacattaaataattttataagaatttattttgattttgaacatattttatatttgtctaattgtttttatatagtatttttaataataatttaaaatacgaagaacactctaaaattttttatattatatataaatttataatatttttacgaagaaacaagctcaaaaaattcttataaagaaatccattttttagaattattatcaaaattaagctgtttttagataactatttttaaaacataaataaataatagtggtcgacagtttacattagcgagaagggcgattattatgtagggatagttggtcctttccatttctgaagtcggactgtatgaggtataatttattttgcctacttctatcccccctgggctgaaaattagaagacggcagagctcggccccataccttgtcctgactcctatgtgctttaaaatcacattatgcacatgcatcgaactcagcctttgaagctcttccatcactgcattcagatgacctagccaaatccagtggagctagacacttgaagatgtcacaactggttttccttgaaaaggaagcccagatttcttttaagtacttggacattgtcacatctaccaaaggcttgaaaacgttggtttgtcatgattttttccacttcttaagggtgggttggtttgtttgtttgtttttttaagtataaatctttatatttctccattgttacattgttacatctacgtatcaagctttggaagtggcatgcctaagtattcttccatgggaaagcttttggagcaaataattaagcaggagattttattttttaacctattaaacaggtgtttagcaaatcaacttaataacttaaaagtgacttaataacttaattttaagtaattaaataaattaaatatatttgataaaataacttaatgatataatttaaaagtaaaaaacaactttaagtaataaataaaaataattaacttatttttaagttcatatttttatcttcatttatcataattattttcatgatatcctttattatttcatgacatttattattactcgacatcatttatcctcgttataatttataagaataaatatattaatttgatgttttaaaataaattgtaaattaattttattaaataatattaatacttaaaataagaattaaataataagttttaagttaacaagtataatttaagttaaaaaatcaagttaagtgattaagccccaaaatcaagtatattgtaagcaaatgttctaaatttttttgtaccatatctagtttactttttaaaatatttaggcatagtttactttgcccactctcctgtccttcattggctgaaaattagaacacgtcaagtccccataccttatccctggtggcttttaatgcacaatgcatctcacccttggatgctcctatcactgcattcaaccaaatccagtggggacaaacttggtgatgatttgtgcaactgttattccttgaaagtgaagcccacaatctttttattttttttatttttttatttttcaggttaatgaatggctactaatggattttcaacaaccagtcacacgttaaatagataagtatgtatgactgagatgaatgagaagtggattatgtatattacaaaggaaattaattgtaaaagaattttaaatcaagaatttaaaaaaaataataaaatcaagaattttaaataataaaattaatttgaaaaagaattttaaattgagaatataaaaaagaacaatcttttcaaaaaaaaacttaagaaatttggaaaggaattaaatcaagaatttaaaaaaaaaaaattctaaatattttttaacttcaaaaagaaaaaaaaaaaaaagcatttccaaatctttctaagatttttaaacttgttaaattattttttttcttttgtacaatatgattttaaaaagtccacaagattttctctaatttattcttattggggagagttctttccaaaattcatgtgtttaaactttaaatcattattcttcataattaaccctaaactcttagattgcttttttattttttatttttattattttttttaatttttgaatttgtatattctcaaagtgttgaagagtccacgaaagaatatagtagcgctacattgcaagcatgagattaggtataaattttaaaatatagagagtagaaaccatcatgtaaattaaaaaattaaaatctgaactaaaaaggaattaatagataaccgcccttatatatatattactcccagataagaaactacaagaatttaaatatataaaaaagaaaattatattttattttttctttaatggaaaaccgctttcatttataggtaggattattcgtggattgaacagtagttatataaatgtatattgccattagaataggattgaaagttaggttgc

SEQ ID NO: 12649 - DNA, 2369 bp, Vitis vinifera
  Intron number 1 from transcript GSVIVT01011718001 (locus G SVIVG01011718001) derived from phytozome v7.0 (chr-ID chr1 ; pos 4810796 to 4813164)
tgtcggctctgtcatcgagtggagctacgttattggtaagccaactctcactccacaccacctctatccactcaacattatgtatatttttgcaaaaatgctttacatcatgagataatctgctctttttataatatgtttttatttggacaagtgattcataaacgcatattcacagcatataatccgtatttttgtagcacagattccacatcctactttcatatatcctgtaaaatgataacaacagtaaaatggtctcgtttaataatgattttaggaaatggtaataactttttaatatttaaaaattttcattacttaagtacttaaaattttataaatattttttaaaattattatcaaacgcactctaattcttttaactatatatcttataactactaagaaaatcaataacatgacaaaatagaaataataaaaaagattaatattgattactcttaatttataaaaatattaattaaaatggatttttattattgaattttatgcatttcatttattatacctattccatgtcttaatattcatatttggtcatttcatattctatcatctttcctttttgtagataccactttcatgatacaataatttaagttagaatataacatatttctttttgtattttactatatactcatttaatattaaaaataaataaatcataacttttttttttttttaatttcttgttgcatgattaaagctaaaataaatttgatttatattattagcctttacctatttggctaaattaattgatagtttagcatgaattaaagatttacttaagaagtatcatacatatgattatatatatataggttgtagattgccaaatttttttcaccatttttgaacataattgaagaatcattcaaaaaattattttttgaagaataatttcatcattaccttaatatttttgcacacttaaaaggataaaagaaaggtcttttttttttaacatttaattgccgtcggagatgattgcttccactctaacacataatctcttaaattatgagcataaatgaaaataatttatatatattattttttaaactaaaagtaatagatagggtttgtttggtgatttttttaaaaaaagttttgaaaaaacagttttttttttttaaaaactattatatgatgttttgtaaaacaaaaatatatttgaaaacttaaaatatttttaaatatgttttaaaatagtttttatctctagtgttttattttgtaattattctatatatttgtataattattttttaaaataattcttagaaaacaaataaaaataataaaaaaacaactcaatgatattttcataatacaaaaagcagtattttattatcaaatgtgttttcctccttttttttttttttttttgaagaacaaataaattattcttcaaaacaattaccaaataaaaacctaattttttttttaaattctcaaatagtcattttaaaaatatatataaaaagaagaatgaagatccaatttgaattattaaaaatagtaatgaaaatttggattgttagatgatgatataaataaataaaacatatgaataaacttaaaatataaaaatgggttcaactataaactaatgagattaaatacaaaacatgaattctaaagtttaaatgtaatcattattttcactaaaatgtttcttgatagatgtcatttgtttttagctttttactttttgataactcgcaatttagaattgaagactcaatttggcaacgggcctcaatcttaattggactacacctataaaccaaaacaaaaatctctactggcattattagacttggatttggcaagattttcctcaagatttgtccattaaaatttttgtcctttttcaattatgacatgtgacataagtcatttccaactattcattcaggtggtctcttaatttgaatttcatgagtattaatgtaaaggtttttcagacaaatgtcgtattctttttttttactttcatgtgtatttttaccagagaagtcaatatgatatttaaaaaatagttagcagtacaaccacatgggcttgacatgtgtgcacccgtacaccatgggtcaatattcttcattttcaattgtccttaatcaaaaaataattttgcccacaatcataaagtattcatgaataggttttaatcattaaatttggttgtttgggggtggcagtaatataatcaccattgaattttacaatttgatagtatgtttaaaaattgaccgactagcacttttcctaaacacactaatttcaattgagtacaattcttctaattatattatttttgtttgaaaccaaag

SEQ ID NO: 12650 - DNA, 5203 bp, Vitis vinifera
  Intron number 1 from transcript GSVIVT01023343001 (locus G SVIVG01023343001) derived from phytozome v7.0 (chr-ID chr1 2; pos 19528551 to 19533753 reverse strand)
tctcgccggcctctgcctccgactacgatcacaaggtcaacctctccccctctcattcccattttctcgtgttctatgccgggtcgtgactccggggttttaactagtagatcttgttgatttcttggatttggttcagatctggaggttaattgctgtttcttgatcattttggttttgtttggtgtttttagcctgtgatcagatggctgggttttgtgggcatagtgtgtttttcttgttgaaaattcagcagctcattgtggttcttttttattaatttctgaattttttatttttaaaaatctttttaaggcgtgtgatgttgtggtttgatgcgtagggcttagatctcaagtaggttttctggttctcgttgtcttggatctttcctgtgctgatgaaatttataatttttaccttttttttttgttatttctttacggtatttatgtgttatgtttataaatgacgtgatggagatagagtgaaggaggtgattctggcaatgggtgtggcagcaacttgtataacggaattttttttagccctttaggtcagttataaagcaaatgagttaactttggttgcatttttttttgtttctgtgcacagatttgaagattctgaggttcaagtgtgttagaaaccctaaaaactagttcaatgaggctataaatgcaatgttaatctaaaaaaatgttggataacttaaattttaagttgaaggaggcagcccttttggtgtagtgtaaagattgaaataaaaaactcagcggtgaataataaaaaatggagatgaagtgaattacatgccataactgttttgaatagtagttttgtgattgccttttttgggtggaaggcatgagcttttaggagcttaaccccaagatctactgtaaagtgtaagtctcaaaagatgtttaaactacaagacggtggtgagtttaggtaactatttgattatattatactatgaggaaaggtgtgtgcgtattttgggggggggggggggggggttattgatttcaattgttctgaatttggtaaaaaccgagaaatttataaaaagtgtaaaaaaaatcttggaaggaaaattgaaaaaggaattgaattgcgagttcaaaactgaaggatgggatagagcgcaagggaataggttccatctaaattccttgtatgtgatgaaccctgtctttgaaagtaaaactggcttcttttttgccatatggttataaaacacttatacctccatcccacagaaagaaatacaatcttgtaataaaatggatgatcctcttttttttaattgacaaagatcatatatatttacaatgcctaacaaaagggtgcacaaaagcacacatggtgaatacaaaggtgccaaaaggtcaacaaaagcataggaatacactaaaaataattcccttggcttacttagagcttaactgagataaaaccagtcagaaggaaaagacaatctcctatgtacactctagcccactacaaaaattatacgtaaagattgtttaattgtttgatcccccttttcagtggttatcaaatgctaactaaacctctccttacaaaaagtttgaaataagcatagaggagcagtttttcaagatttcttcctcttctcttggacaaaagatccttgttagctcaaaagggcagctctcactgtagagtgtgtcacccactctatcctagataatggctaagttcgttaccatagcatgaccccctttgagtggtgtgggagggtgtgatcaattgttttttcttcttttttgtgcaaattgcatccatttagaattctccaacgcttcctttgagttgatccaaatttaatattcttccacatatagcttcccaaacaaaaaacctagctttcattgggccaaggattacaaactgtatgtgtggggaacaactccatcctatcattaagggaggaggaatagaaatatttaactaagaattttgccacatttcaagtttagttaaatcatcttatcctctacatcactacacatcgttttcactcctagttatgaagccgtcttgtgaacttggttccaacgaccctccttcccttcctgttctcatgccttgactatctgtgcatctttggctgtggctattgagaatgtgggaaaagccttccctaggggttcatcacaacaccatccatctgtccaaaacttcaacctcagcccattttccaccctgaaacttgttatacttttaaggtcctccgaccccattttgatagccttccacacacccatcctatgcagtaataatcgaaaaatctctctcaacctttaatctcttaaatacattttactcataagagagcaggggaatcccttgatagcattaccaaatccaaccagcctaattaagctgtcaacgatcatacccccatgtgttcatgcacacaacatagcctttaataaccttgggatgtggttgattgtaagatgtggtttttatcagaaacttttctgattaggagactttctttcagaagccatactcatatagcctaagtagaggggtggaagatagaatggtgattgcaaggtgatgttactttcagttttcttttcaagttgttgacaagtgtttgtgagtaaaacttccccgaaaggaaaaaaatgttgtccttcaccttctacagttataaaggtggctttctcaggtggaaactggtgttgaacgaatgttttgatattgaaaatcttgattgtgagaaattgagatatccaagaaggtttggtatgtgtaattggtgatgaaatcaatgggttgcctcctttttatttcaagtggtgttgaatttgtgcaatgaagttgttactgtccatggtgttttttggtgaaagacctcatgcgttggagtcgaaagttgaatcctatacatccaaacataaaatgaaaagcttacacaaataatttgtctcttccaaggtcaatgatgccatgaaaaaaaatttagtaaagctcctgccaatgctgcttttattattctgtacattcgaagagtgaaaaacctccttaacataagtccagggattcaaagccccagaaaattctgtctcattgactgtatatgtaccatactgcacataattggctgtcctcataaatcaattgagaagttgcctcaatccatcagaatgcaaataatcctcttgattaagtcactccttggattaatcaatgactgtttctcttctctcattgacttgattcttgaagaggtaagcttgaatgaaaacattgatgtctaggtcatttatcatccctattatgtgctagatgatgggttttcacaattgcagctattaatgcttgaactactgccacatcaagttcttgataagttttggatgcttagaatgcattcacatgttcatattaaactcaatttgggacacaattgcctatatacaaattttgaggacacaaaatcctaatattctatataaattttgttaatctgaagttatattatatgcttgcgtatatcaattttatttatcttagtttagttatcttagggttttgaacctaagtcacttccatcatttgttaacttgaatttcatactctgtggaaaaaggtttcttcacctcgcatcttttcttatgctgatttaattttttatttattatttggccttctatccaccatgtttggcttccatttttatgttgtcatgctacatcagatggcaccaattttttcccatcagctatcaccttccccatgtgtagtgtctgatagtggacttacttgctttctgtttataattctgatcaatctccatgcttcacttatatatatatatatatttttttttatcagaaacgaagaaaattatattaataaaagaacaaatacaggagagaaaaaatagacaatagaaagagaaaaaaaccaagggaaggatgagaggtccttcctacacaaaaccaaggaaaaacacccaacaatagaattctaaaaacaaaagaaaccccatcaatcttcaaactcttgaaacgcaaaccccaatccaattgagttgtagaatgcttagaggatctcctctaaaagcttcagtacaagaagcccatagagaagaataaaaccggatcaaatcccaaaccatctcttccgttctccctttatcctcaaagatcctattgtttctttcttgccacaccatccaaatcaaagtaaggcaagcaatttgccaaagtgtcttgcctcttaatgagttccccaagcctttaaaagaaataaccaacatgtcctcaaggctccttggagggacccaaatcaaacctactagattgaacaatccgtgccaaagtccaatggtaacgagacaatgaagaaaaaggtggtcaatcgactctccatttcctttgcaaagaatgcaccattgaggacaaagagctttgtagggtcttctcaattgcaacttgtcattagtgtttaccttcccatgtgctactaaccaagcgagggccttaacctttgaagggacttttaagctccataaaaacttggccggaaggaacattaaaggatttgaaacttttgacaaggcacagaaaaaagatttcattgaaaacgagcctgacgaagacaaagaccacgctcttgagtctgatgaagaaggggaaaaaagcacagaattaagggaggacattaatatctgaaggagatcaatttctgaattcgttagattgcggcgaaagttaaaattccaagacaatggtaaggaattgccaaggacatttgagatagtgaggtttttcacagaaataactctgtaaagatcagcaaattgagaacacaaagtttgcttcacttatatttcaggataggaatttcttagaattaggcatcttagtgataaggtggtgcaagttgagttgaattgaaacttctacttgtatttttcattactttagttactgtaattgtcccatttctaaatgattcaatcctattatgaatgtcccaatccccccccccccttttgtcaatctgcatcacaaactatattgttgaacaatatgtattttatgctacttctgtacttactttctgtaagtagctcaaattacagctcttgcttttgttccagatgcactttgttaacagttttttaattttgtcttgcagtatcagcaga

SEQ ID NO: 12651 - DNA, 4295 bp, Vitis vinifera
  Intron number 1 from transcript GSVIVT01014167001 (locus G SVIVG01014167001) derived from phytozome v7.0 (chr-ID chr1 9; pos 1020290 to 1024584)
accttccgacgaggtacgtacgatcttcatctcaggtctacctgaggacgtgaaggaaagggagctccagaatctgctaaggtggctttcgggatacgaggctttgtaggtgaatttcaagggggagcatcccatgggtttcgcgtttctctccactcctcaactcgcggtgacaattcttatgcaacgagaaggaggttgcaacttgcctccattttctagctaaagatagctcccaatgcctgcaagccataaccttcagaaaaatcaattatgaggttgctacactaggctactcaacaaatcttcaacctgcaaatactcaagtatatgatttggagacgccattgaaattgatggagaaggaaaggaatgtactgaagctaattgatattctttgaatttgatgaccataatgaagctactacaggacccacttgaaagagaccaccaaattctccacccctggttgtatttggccacatgcataaagagctagcacatggaaatggtcatataaaaatgattgttgttgggaaagacaacaccacatacctttggtgggcaagcacatgcccttatatttttattattattattattattctttatcatcacgtgtcaaagttttatttttgcaaattctcttttaaatgattttcaaaattccagtttttcaaataatcttattttcattccaatttgtaaattttattattattttttttaaaaaaaatcaattcccaaataattttttaaaattccaatttttaaatttaattttaaaaactccaattattaaatcatttttaaaactccaattttcaaaactccaatttttaaataatttttagaaactccaatttttaaatttaattttcgaaaaaactctaatttccaagtaattttcaaaactctgattttcaaaactccaatttttaaatttaattttcaaataattttcaatacttcaattcttacatttgatcttcaaaacttcggattttcaaataattttaattccactccttttttttaaagtaattttaagtcctcgattttcattcttcattagggttttaggtcaccaaaaatcctaattttaataagcttgttgtcaatctcattttggcatgcactttcacaaattttctttgattttaaaataattttccatttttctcgatttttataagcatgaatgcattttttttcttcataattccaaaataatggaatttatgagactaattcatgtaagataaattgggctttggtggaggcccaacattcataatattttctttgaaaataattcaagtgaagtgcatgattgatattgtttgatcttgatcagttttgtgtgagatattttacatttattactatgagctaaccttatttccatgatagcacgttcttatttgctgctaaggtatgctcccactcctacttcatttatttattcgttctcatgctcgatttgttttattatttgatcattttatttatatctattgattttcttatcaattgtcacacttgtttcaccttatttagtagataccttattatagggcttaaagacgtgttacgactcaccatcgtactttcccaataggtaacctgaccctggacccgactttgatttttcacaaacttgtttttccttcaagagtcacacttagggttttttttttcttattttgtttttctctttaaaaataaaacaaaaataagtgacgaaactcttaattctttttcaaaaaatcaaaattttcacaaataataaaaaaaaaaagttacgtcatcgagtgggaatacatcatgcaaaatgcggggtccataataaccttaaaaaaaattattgaatgatatacttaaactttttctactttttttttttgaaggaaaaatggaaagaaaataattttctttgattttatttatcttactccttgtattatatacatatataactttttcttccttaaactttttgcacaagcaaccacattatttatttattttttccttaaaacttttcggaaaagcaaacatatcattcaatcctttgtaagaaaccaagatttgagccacgtgatacatctaatggatttctccacatggaaaggcaatcattattaaaaaacaatgacaccatttgttgtcgattcatcaatagagtatttatttctatttaataattaagaaaatatagggggaaaagattttggaatcttgtttaattccttggttaagatcgattttggttaagatcgattttggacacaattctaagcagttaaattttatttatttatttatttcttgtttatatatatatatataattattttataacttataaaatgagtttcatagatttttgatagaaaataattttttgagaatttattttgaacttgtatatttttttgtttttgttttttaagaataagttcggtgcctttttggattttttttttcatagtattttttagcaacaattaaaatataaaaaaaaatttaaaacttttgttttaaatatattactttttagaacaaaattaagatatttttatatttttttaaagagtattttgagcaacaaatgaacatataaaaaatactttaaaaaaaaaattacattgcatgtaagtaagtaacaacttcatggtgaataaatgaagaaattttttaaaaaataattgagaattagattcgaatatgttttaaacgtttatatgaaaaaaaaccttttaatctaacaaacaaactttaacaattaaatgaaatcctcgaaagtttcatattttttgttaccttttttcatagactactgtataaaagtatatcatttttatgtcgatcaagactgtattgtcaattaaatggtttcgtgaacatatttttaaatctcatatccaaatcttatttatttgtatttttatactttcatcctattcatttgtacctcatttgatatcccgaatctcaccacacatatttaatggtctaaatcttttgttttataaatatagcattttccttgtccctggttttctttcatctaacaaaagcctaaaaaagtagtccaaaagcaacaaaaatttcccttttctcctgatatctctctatcaaggtgacatatatagccaataattcaattcccatttggcaaaaagccaaactccactaagtaggagataacacagagaaaatgacttctgtgcccatgaattaaattacaaccagacaagagaaagaagatgaaagagagaaagacaagggcaaaaagatgcggccacgtattctaaatcaatggaccattgctgggtcaccatagcccccacatgtgataatgccttttaaaacaacaaaataatattatttaaaaatatctattgtaccatccgtatcttcatttttttttaaataattatgtaaatatttaaagtaataaatgatatttatatttaaaatgattatttttcaaataaaaatataaaaagagttagggcttatttagtgataattttacgaaacttttttaatatttttaatacttgaaattttttatcatttaatagttaaaaatgataaaaacgtttcctaaaatcactgtcaaacatatttttataatgggtttgaaagtaattttaaaaagcatttacaatatttttatcaattaaataataaaaaattttaaatattaaaaatattaaaaacgctttttaaaatcactatccaacgggttcttagtgattcaaaactcttttaaaaaattgtcatcatgacacatcttatacaaaaagcaacatgtaaccatattcaaccaaagatttctagcttgagttataaaccaaatttgggtaacatattagttcattttcctcatcatcttctttgatattctatactttttatatactttatcttatcacatgtgatatatattttaggtctcggttggatggacgtctcattttttgctttaaagagaagttaaagtctttatttttaaattacaatattagtagattgaaagttttatttcttaaaacaaatgttttaaaaattgttttatgaaatttattttcaaaaattgttttttaattaaaaaataaaaaatgatttttaaaaagtggaactttgcgcacccctaaattatccaaaaagtggattgagatttaagtaattaaatttggaagaaagttataaatttcttttaaaatgtaataataatttcgaatgaagattgagtgtgaagactgagtggaccccacaaatag

SEQ ID NO: 12652 - DNA, 9843 bp, Vitis vinifera
  Intron number 5 from transcript GSVIVT01018849001 (locus G SVIVG01018849001) derived from phytozome v7.0 (chr-ID chr4 ; pos 19280958 to 19290800)
ctcttcaaagaagtcgaacacaacaattggacaatgtaattaccatgagtttcttttgtcatttactgttccttgtttgatgacaatcattttggataattatacttgcttctacatttctattcaaattgtggttttcatgctcattccgttgatgaactacatctagtaaataagcaatttgcacatttattgcttcagtttttattttcctctttggccaaatgcagaacccttgtgcttctaaggataaggtcaacctcctttccaccctttttctaggcatacaagtaagtcttcattaacatgtctaaaatttactacttaggggtacacgtaaattgtgatcaatcaaagaccaagactttgtaccttaataagaattagattatctcaataatatcccccctaaaaagagtggcctagatagctcaaggtctataaaaatgaataaatgtttggaatatttgagagtgtaaaaagaaaccagattcttgatgtggctattccatcagtctgggtcaattgtttgctaaaaattactacatttttctccttccaggtggactataaagaagtaagctgggaaacctttcttagaaaatgacatctggcatttgacatttagacatccaaccatatttagccttttccggatctatatcatgtgcctctttactattattcttatttgcttatcaggaaaaggaaaaagttctcacagatccattcaatgcctgggcatttcaagatcaacatttttttctccttggtgatagaggagaagatgcaacagtgaataagatcaccaaggtttccactattattattgtatccaacatcattgtttatataagcaatgccattcataaggaaatggggaattttccaatcaatctgtgtacatgttcatctctgctataaaacaactgaattggagacaagcctgaattttcaaacattgattccctcctagttttccagaataagtatcataaagcagttacaggctttgcagcaatgcaacattgctattctctaatgttgaaagtgtgtatagaaagaaggaaatggaaacagtaaaacctcaactgtacgtccaagatgatagttgctttgatcatccttttcctagttgaatgagcaaagcgttttagtcaggttggaagattttttttttttttttcctttttaataagtgaagagaatgtatttataaactaaaactatacaccaaggtacacaagtcatatacaaaggatatcaaaaggtgttgcttgaaggagggaaaatacaaaaagcttttcccttcatcatctagatcccacccaatctacaaaatcaattaaagacaccttaacctatgttgccaagctcctaataaatgagcttttcaacaattgaaccaattgctccacatattcaaaggctcttccgattccttccctttcacaatgtctaaaaaaaaacaatggggtggttctccaaaccttcttgcatttttttccacaaaggaaccatgctaacttaggagagttagggttccctaactcaagaaggaaagactcgaattactttgaacaaagagaacgacaactaccgtaacaacctggttatggtacaatggaggagggcatgattaatagatcccactttgcttttataaaggtaacatttgtttgccaatggccatcttctcctctgaaggggatcaaaggtcaatacctttccccaactaacattccaatgaaaaaaccttgctttaggtgagacccaaaattccaaataatgccttataagaaagagattgagcacctcaccctgactccagaatagaatatggagatttgattgagaagacaccattccttgagtccatccacatcaccctattcttttcttcactcttcacaaatttcctttgcaaccttgaggaaaaagtttgtacattgtctagctcctaattgttcaagtgtttggcaaaacaaggattctagtgtccttcccttcgttcttctcatacatcctcctccctacaccatctatctttctaaatgttcactctcctcccatcacccacctcaaaggacactctactatttgaaaggtctcacccctttcttttagctttccataacttgatcccagacccacctttcaccatacatgatctctaacccccttcttcctcaccctactttatgtgaataacatgtttccaaaaatattatcttttctatgttgatagctttcaaagaaacctcttctccgccttatcccacactattttggccctaaatgaaggcctaataaggtgattgaaggtctcccagcctacatcccaactctaaagccaaatcctccacattggcaatcccaccaatagggattaatttgcttttctcaagattaattctcaaacttgagatggtttcgaaccacatgaacaatcaacttaaatggaccatttaagcttgtgaagcctcacaaaagacaagtattgttagaaaaaaaatagatggaatacttccacaagaaacaataggtggggtacttccaccacttcaccctcccttccctttgctttgaaatcccctcaaaaaaacacccttcttacctctctccaaaagacaactaagtgccttcatctccaatacaaataaataatgagagaggatcctcttgccttagccctcttgaactttggaaaaattctgaggttgtatcatttactagcacaaaaaacctcattatagatgtacacattttgatctatctaatccattgttggccaagacacatcttatcaagcagagctagcaggaagccttgattagtataatcataagccttcttaatatcgagttttgcaaattactcccttggaattgttagtctccttagctagaatatctagttaaggatctacctactctctacaaaggcattctagaacttggaaactaccattcccatcacctttttcaacctattagtcaaaacctgaattagaaggttatatagcttacctctaagcttattggtttaaaatctttcaattccttggcacctactttctttagaattaacactaaaaaagtgacattatgactttttacaaacctctcttggtcataaaacttcctaaaaaagttgaatactttatctttttcaaaatcccaacaaaactaaactgtcaaaaggctatttagaaatcatcaaggccaagagctttatctccattcaaatctaacaatacactgaacatctccttctcaatgaaaggcaactctaaatctttagcccccagactatctaaggctttgaacaacatctcaaagatgctaggtctctaatcccctagatcaaacaacaaattgtggaaggtgaagaatttctgaactcctttattgattatattcggtacacaccatacacatatatatacacaaatgactgaataagaaaaaatcaatctagcttaattctctcctaaaattaggaaactgaatcataaggaaatatcctaaatgatctctccttttttattcctaaaatactttccaaaattaaaatcctaactttggcattatttcaacactccccctcaagctggagaatatatatcatataatcccagcttgcaagttaagtcttcgaagttaggcctaggtaaagctttggtgaggatgtctgcggtttggtgcttggtaggaacatagttcaatttaaccgtctcactagtcaccttctctgtgatgaagtgtctgtcaatctcaacatgcttggtcctgtcatgatgcacggggttctttgctatgcttatagctgcctgattatcacacatcatcagaattggagatgaactcgtttgttccagttcactaagaaccctttttatccaaatcccttcacagattccctgtgcaagagctctgtactcagcttctgcactacttctgactacaactgattgctttttactcctccaggtaacaagatttccccagacaaaagaacaatatccagaagtggaccgcctgtcaatgatgtttcctgcccaatccgcatctgaatatacttcagtgtcacggttctctttctgaagaatagacctttccctggtgtcatttttaaatatctaagaatcctgtagactgcttccatgtgttcctcagtggggctgtgcatgaattgacttacagcactcactgcaaagccaatatctggccgagtatgtgagagataaatcaagcgcccgacaagccgctgatatctcctcctgtctaccggtgtactttctttctcgataccaagtttcttctgactatccataggagtatcaattggtttgcatccaagcataccggtctccttaagaagatcgagtatgtattttctttgagagactacaattcccttccttgatctagccacttccataccaaggaaatatttcaaatttccaaggtctttaacttcaaactcttctgacgaatacttcttcaaattctgtaattcctccatatcattcccagatagaataatatcatcgacatagactatcaatatggtcattttcccggcatgagacttcttgacaaatagagtatgatcagcctgaccttgtttgtagcccagcttcaggactgcttttgtgaatctatcaaaccaggctcagggagattgtttaaggccgtacaagaatttttggagtttgcaaacctgattctttgccatactttcttcgaaaccaggtggtatttccatgtagacttcctcttctaggtcaccatttagaaacgcatattttatgtccagttgttgcaaacaccaatcttgattgacagccaatgagagaagaatcctgatagtgttcagttttgcaacaggagcaaaagtctcctgatagtctatcccataggattgtgtaaaccctctagctaccaaacgagccttgaatctctcgactgatccatctgctttgtattttatggtgaaaatccacttgcaccccacaggcctcttcccaaccggcaaatctgtgatagttcacgtcccattcttctcaagtgcatcaatctcatcttgtactgccttcttccattctgaaatttttaatgcctcttgtattgtgttgggaacctgagtatcatcaagagaagtagcaaatgctctgtaagatggtgatagcccttcatacgtaacataattcccaattggatgatctgtacatctcctaacacccttcctcaatgcaatcggcagagtagaatcatcaatgctgggaattaacacctctccagccctatcctcacctatgttctcttcaagaagacttgaattggagtcaatgtattgaccacatgttgactgtgatccgtgctctaattcctgtcttttcctcctcctgatgtaaacttgtaagttctcattagcaagttgtggggctataggttgaataggcatgggagactggatggtcacgggagaaggaacatttgtgtgctgggctggctgtactgatgacggcatgggtgtggacaactcagtgggcgcgaattgggaaggatttggtgactctgagtgaaaagaaggtacaccctcaagacgagactcccaaacttgatgttcattcatgctctccccctgaacatgaaatttgggatagaagaagacatgttcaaagaaagagacgtccatggtggtgtaaaatcttttgttggttggagaatagcatttgtaccctttttgggttggagaataccctaggaaaatgcacttatttgctcgaggagcaaatttgctacgattttgaggatacacatgaacgaatgccgtgcaaccaaatactttgagtggtaaatcagaagaggcggcacgggtgtgaggaaattgttttaagaaaagttgacgtggggattgaaaggtaagcactctggatggcatacggttaatcaaataggtagctgtgagaatagcttccccccagaaatagtttggaacattagaggaaaacataaggcaccgggcaacctccaagagatgtctattcttgcgttcagccaccccattttgttgtggggtgtcaacgcaagaacttatgtggataatgccgtgattttgaagataagtactgagactactagtaaagtattcctttgcattatctgacttgaggacttgaattttggaattgaattggttttgaaccataagattgaaggtttgaaaaatgtgcccgacctctgacttttctttcataaggaaaacccatgttacccgagtatgatcatcaacaaatgtcacaaaccatcgagtgccagaaatattttttatccgggagggaccccacacatcactatgaactagagagaaaacagtcgaaggtttgtatgggatttgaggatatactgttcgagtatgctttgcaaactgacaaatttcacagtgataagatgctggatttttattgataaataatttgggaaacaattttgcaaggtaaacaaagctaggatgaccaaggcgatagtgtaacattataatctcactatctttattgaccttagaatttgacacagaattgaaagactctaacatactctgagactgtacgcaacttgcttgagagacttggtttgagaattggccacatgagaggaggtagagcccggaacacagttcagcactgccaatcatcttccccgatttcaagtcctgaaaaacacacgagtttggatagaatttagtaacacattggagatcacgagtcaatttgctaatagacaaaagattacaatccaagtttagaacatggaggacagagtcaagatataagtctttagtaagttttatagaacctgtcccggcaatttttgactttgaaccatcagcaatatggacggatgaatgaccagtacttggcttgtaattttgaagaatggcagcatctcctatcatgtgatcagaagcacctgtgtccactatccacggcttcattcctcctcgactagcagtgagggctatcccggtagtactgccactgccaacttggcttaatagtttctgtagcatctccatctgctctttgttgaatggactcggctcgggaacagatgtgctctcagagttggcagccacgtgtgctctgccatctctgtcagaccgtggctttggtttccaatcagccggtttgccatgaagcttccagcaagcctccttataatggcctggtttcttacaataatcacaccaaggcctatctcgtttctgacgatttccaccactactattaaatgaccgagcagcaagggcagagccatccaatgttggggcaggttgctctttggatcccatcatcactttctttctactttcttcacgcctaacctctgaaaaagcctccctgagacttggaaggggtttaatgcccatgattcggcctctaacatcatccaattccctgtttagtcctaggaagaacttgaacagtctcttttgttccacaatttgcctgtatgttgctgcatcatccgaacatttccatgagtgagtctcgaataagtcaagttgctgccaataccttgtgagtgtgttataatactgagtaactgactgctctccttggcggaagtcatgtagggctgattcaacctgaaaaagttctgaaatattttcagaacttgagtaagtttctttggctgcatcccatatgtcttttgcagtcccaaacagcaagaaattttctcctatgtcattgttcatggaattgataagccatgacatgatcatgctgttttcaatcttccacttcctgaaacccggttctgtagtttctggcatggctgcttctccagtgaggtactcatcctttcctttaccgcaaatgaacagcaacacagattgtgaccactgtaaatagttatggccatttaatttgtgtcctgtgatgagaataggagaggaatcattgccaccaagatttggaatttcagatctgccccctgattctggtgacgtgacgctggatacttgtgatgatgccattccgtattttgtcatggaccggaaaggtagaagaacacttcccaaggcacgtgcagggattggagttgagaaaaaatagccggaggacgccggaaaaactgatcgaaaggcccccggaagcaaaagaaccccaaaagaggcacgtgcagggctcggatggcaaaaataggtaagaagggtggctggtcggcgtcaggcgagcttggaggaggaagcgcgtcgccggaaaaacgcgcgtggacggcgcgtggatgggtttctggttccggtgctttgggacaaattggagatctcctccaggcgctccttgcggtgtagaaaaaaaccgtcgccggaaaagttgccggcggtgaatgttttctgacgacaattcaaccgactggaaagcgttttctcccttgagaatagggactgatgaccggaatgagagatggccagagagagagatggtcggattgagagatggccagagagatttggccggaatgaatgatggcctgaataagaggtggccagaagggattagggtttcagaaaactggctttgataccatgaagaatttgtgaactcctttattgattatattcggtacacaccatacacatatatatacacaaatgactgaataagaaaaaatcaatctagcttaattctctcctaaaattaggaaactgaatcataaggaaatatcctaaatgatctctccttttttattcctaaaatactttcctaaattaaaatcctaactttggcattatttcaacagaaggcttggactaccctttccttaatgtcattctcctttttgaatcacgccccattaactttgatcttgctaaaaaagtttcttcttctaggtgcattcgccattttgtgaaaaaatttagttctttttcctctctctccttcaactaaatctctatagatttttgtctccgagaaacttcttctatgcacaattacccatgtattctttctagttgcaattttgtatggatagagaacattcaatgaagagaaatatcatcacatcaatgacatcacgcgttatcttcatctcttattgaattccaataccttgcacaagtcttgaaccttcctaaaagatgattctatgtttgaaaatcaacctgcagagatcacaccagtaaggaactcaaacctgcctttgaaatgggcctctaaagaactcacctctgagaagcttacacttccaaggggtagtgaccaatagtagtgactccatatttatcttcaatgcccttctcaagagttgatttgaatccacattcttaattgtgcgttcatgattaatatgggttgaaattcctagtcactttgctccttttgttcacaacctttctccattacatctaatcatattgaagctatctcccttttcctgcacaaaaaatattgtatcgagttttttccatccttgaagcaactgaaggagccaaaaatgaaaaggaagtaatttggcaagcatcagtgaacaaaaaaataagggttagtctcctcttttggataagtacatgatttctgcattctgagttttgttttaaccagtcctgatatatatttaagtgacaatcagtccatactaacccttagtacaatcattttcagctgcaaaacataaataactcaatgtgctgagaatccatatttttgaaaatttttatgtagtctccttgaaaaattttgatatttattaaatttccttgatttctactcctggagctttgaatatctgtgctgttcttgattccaaagggtgtgtatatttccag

SEQ ID NO: 12653 - DNA, 6022 bp, Vitis vinifera
  Intron number 2 from transcript GSVIVT01022155001 (locus G SVIVG01022155001) derived from phytozome v7.0 (chr-ID chr7 ; pos 17047052 to 17053073)
ccaggtcacagccctggtgttggccattcgcttcagaaaaaaaatgcagaaccaaatgcctagacgtgtatatacatgcataattagtacataagtcgattgtgtcagtagtttcaattcctgagtttcacagtatccttaactgtccctgcaggtgaaactcttacatatgttgctgttctcctgtgcagtggttgccaggttaataagctgattgctctttattttatgttcgagaaatgatatgtagtgctacctttatcattttcataccagctattgcaagtgcatgcatgaaaatcatatttactgatgaagaattctaccaagctgaaccttgaatccagaactcgtcacatctcacatgtatgcatgtatgggcatgaataaaccacaacctttaaatttaaagcagaaaaatttactgcttttcttattacaaccttggaaagtattaatatctccgcgttcttaagccccattcatgcatgcatcagattgggccaagccatgaacttccagcctggctagctactcctgatatttcgttgtccgtgtgtgtatgcgcgtgttttctctttagattttatgccagcttgtaaaactatcaatcgacttaaaactcataggcttttttggattggcatgtggattcaataaattggacaagaataaacatgtgctatcctgccaaacaagagtctaatatcatgcacgttaaattacaaattatcctaaaaatttaaaccaatcagatagtgaactgataatgtatattaaactaatttagactaggcatggatcatttctatgtttctatgtatgttcactcttggtataaaactagggttccactactgtatcaaatgagtaactatcgaaaaatgaaccaattacaatatgtcatgtgtataaaatggatttgtacctttcttgcatctaattatctatacattggtttcattacttgtactaactgtactaaatcgtatttgtttataccttatcatggcatatatttgtttcctcatctattattaacctagatccatcatatactttcaacaatatagattacaaattcggtacctaattagtatcttatcatttccttaaaaatatgaaaataaaaaagagagttacactaaggtgcagtgtcccactgtgccaaattaatctttattttttatgcattttcaaaattggtactccttcagcctaaaagtgcagagcatacccttacggccactgcctggccatggggcatgtacaaagttacaactccatctctacctaatgttatactttggaaaattgcaattaaagttaaagtcaatttccattttcgaaaggaagggtgtgataatttcaaacaatatttttcaactacttcatcatataggtctctaattgtcatttttaaaataatgagccgcaaatttgaaaagggtgtgcggtggatccttcacccctggaacctccaaaatagccttctaagctagattcaagaagactatgatagagaaggtattattttatcgcctttaaaattttgttccaacttccctttaaccccctcccagttacaaggtttaaatccaatccatgtgcagcccttgtcacagttttttttttgtttttttttggagatcccatatggtgaaggttccattatagtacttcgagtgcaaaaagaatcataggttgctagctgccatagtgtatagttgtgactatattaagacctccagttaatatatagttttatatctaagcctacttgcaatccttccccacaccttcttgggtcatgtgtgaatggcgcagcatcttggtctttctttttataaagattttcttcttcaaaaagatatgtttctgtacgtgattgtcgagggtatcaatgcggcccttgaacttattgaaactgctgtatctttccattgtaaattttagttcaaatttgaagatatatcttcctagtaacctcatttgcaacaatagaaatgtttgatcacaacttcacttgaaagatgatttgaacattaaattttatttaataaacatagtattctaattaacatgtagatcattctcatacaacagcatcaaaaggattttcatttttcaatgtgacaacctctcttctatatgcctaaattaatgtctaggttttaccttccttaggatttggacttactgcggctgccctcttttcccatgtgatgcagttaactggatggaatcttggttggtgcttgattcgcacatgcaacatctttgtaagtcctaaaaaactaaataaacattcacactttcagcggctgaaactgtgcctttctaacactcaaaagactgcgaaaaatacaaaacaaaaattgggtttctgactgaaagctaatcgtgtctgactgaaaacacaaagtttaatgtgaaagtggtcacaggaaaaaaaaaaaaaaaaagaactaaaaccagaacaatgttatcataataacctgaatggtggtggccggagtcccttttctttgaaattaatatagggtcccggacagcacacacatgcaccaccatgctccaactttgaataaacaatctgaaaatttgctattacatgggatatgcagttgttgacagattaaccctacctgccaccttaagctagctctgcactgcgtacactatttgagagagcgttaaaaaaaaatctatgttcctgacctagtgaacttttctgtttaattttatcttagagaatctcccactgcctggcacttacggcccactcctatatagctctagctctagctgtaaggacctcggtatcttgcttgctaaagtttttattcttctatctttcctcttcttttagtcttctctatggccaatcttaagttcatatttgcttgtttgttccttgtgctgattttctctcagaatggttctgataccataaagaggtaaatgaatgaatggccaaaagtattactgttggatacattacaacctttaaatatatacggctttccaaattaaagattcatgaattatataaggtatatgtatattactcctaaacttaagaattgaccattgagtgctcttgatttgtggttgagatcggctctctcctaatagctaggcaagtggtaattagttttcaaattgggccctgcatgctttcaagtgttactgtccttggtgtagactaagtcactcttgcagtacaaacaattggagaacaatataaaatcttggaccgttgggatacgaaaggcatgcggaagatcctctgtgcttctattaaagtcgctttcgtgcactacagcctagcacaacagagaatcaaatcctctttcttctcaaaaaatgtttgttttatgtttaaagttcagtgggaggaggctggtgagggcttcctcagatggaggagccaaccatgcaggtgtactttttcaagaatctttgtctttaactgcattgtaagtgggaagaggaggggattgaggcgcagcactagtttcatttaacttcttttgaatcaaaatgacaaagaggagtgactgggaccctccatggggtcagtggctttagtgcatttgactccaccttttagttggtagaccatgaaattttaatgaaaaaaataatgacaaatggtatgagatacatggaaagtggaaagctaatttattgttttggactaattaattactttgctttggaggttatgacttattgaattatactactgtttatttccctccattgagcccatacacaagcctaagaaagattattctttggcatattactgaatagtttaagctttgggctgaatcattttaaaaataataaaaatactaattatatgtccaataaattaatcaaatgatccttaacctaatggggtattgcaatgacacattgtaaagaaactgctttgagtgacaaacttttaagaagcctcagtctaaaaatgtacccatgctctgatcatgcttgggatcttattgaatcatacatatatgtaacttcaaattttctactacttttacaaattgttaaagatgaatttcatgataatcattcttattgtgatatgctatgacttgataaaagaacttcatcaaataataagattacagggattaaaatgttgcttatataaacatgaaaaaggaacaattctaatctctactcattactgaaattcagtcaaacatcagttgttcatgtaaaccatccattgctaattaattaatcaaacttcctttttcatcagtggtagttgatctggtgattaaaaaccatttttctcttaagtgcaaaatctccctgggtccataatgctttgaatatgtaatagaatactgttgccatgacaacaccgagtttggaatctatattaacaaagcacaacagaaaaataggggaatggagagaacatcactcgtccccatgccccaaaaaaaaaaaaaaaaaaaaaaaaaaccagaagaaggcaaaaaaaaaaaaaactgaaattgaataccaaaattaataggagccaattaattgcctttgatattgacagctttcttgagtgtaatgatgaaatgcttcttataagcaaagtattctcagaatttcaaagacaaaaaatgaaattctaacaattctttcactatcatgatgatccaacgactctaaaaccacctattggaccgaatcttacaaagcatattctcacttgaaaactagtttgtatccagtgaaagataaaaaatctttttataacattcaacatcacaatcatcccaaaagcattcaatattacaccaatcccccaagtcattccacagtactacacccatcctccatccttgagcctaattttggagcggtcatctaaacagaggcgcattataattaaggtgttatactttatatatacaaaactatcaaatctgagtcaatatttaaatgtagggagcaactgatattgctatcaaagaaagattttgtttattgctataattgggaagaatcttacctcccagccgcttagtaatcatcaacttgttcagaaaaccataaagaaaaagaaaaatggaagtacgggagaaaggacgtttcacttgaatttatcgagaaaaagagtcaacttgcacacgagccatcacaaaaaataatatatatctgtaagtggcaagtacacgagcacccccaactttctggtgcacttccatggtgggaagaccaaataatgagctcatttgtgttattctgaacaaacacttgggtcctaacaaatcattccattcaatttttcaggaaaaaaaaatcgattaaatagatcaacattcaaacccaagcaacgtttcattacacggaaaggtcatatagacaaatatgacgaggacgtttttaagctttgatgtgaatgtgttctacaaatatatttttatgtcggtacaatagttactctattttacattatcgaaggaacaaaagcaaaagacataaaagaaagaaatcaaaagagaaatgaaagaaggttaagagcaggcatgccttatgcatactgttcttaagcacacacaaccatccaaattggcccctataaaataattagcggtttaggatcctcataaaccatgctccccaagattataagtaccctgaaaatgcaatgctgtgaccatcacattcgcttctctccctccttaaagcctgaggctttcttgggccttcctactcaattcaaagaaagaaaccatcctgctgatcactttccttctctcttcatggcaaaaatccaagttatccatgcctgttcccttgttcttgcagtaatcacctatcatgatattctctataccgagggaaggccgataaaatcactggacaaacatgagtttagttcaatagattctgaaccaggaacagaaacaggcagccaaggaattgagcacaaagatgatcattgggccgcacctccccaggagcccaatcccggtgttaaaaattcagttgcagg

SEQ ID NO: 12654 - DNA, 9591 bp, Vitis vinifera
  Intron number 2 from transcript GSVIVT01027507001 (locus G SVIVG01027507001) derived from phytozome v7.0 (chr-ID chr1 5; pos 16142397 to 16151987)
ggtggggagagggagagagagagagagagaggttggtagctgaaaaagccaatggcggcattgaattttgtgatagaagttaggaggtgagaagcctccggtgcaatcaatgtgtaggaccattgagattagggtggaaatgaaagggaatagctagattttctccttcgcatgaatgtgaacatggtacaaaagaaaaaggagtatctccccctttgaagtgtccacttttctctcactttctttcccaacaaatacttcaaaccaccccatgaccaattaaatcccatggaaatatgaagttatgatttgacggcacttttgagagattccccggaatcttttgggttcaatatttggtttttaggtggttttttgttactaatatttattctaaaaattaaagacattaggataatttgttatttcctaattcaataaaaagttaaagttgaaatcaaaattaaaataaaacttttataaaaaatattgttttcttaagtttggtattaatctatttttaagttataagttcttttaataaaatttatcaacttctcaaaaattaacccgaccaagttaaaatctattagacaagcccatgtttttagataagacaacttaagtagttgagtgttattcaatatataaagttattaataaatgaatttcaacaaagtctatcctcaagggcatggtggagtttgttagataccttggcccggatgaaatttggtcccaccacattctaagaaaggtttaacaagactttttggatatgatgagtagaaaaaacccaatgcacatcacaagactcccccttccccccgataaattttctcgtccatgccatcttgttgtgtggagaaaggtgtgaactcttcactcattttctcattcattaatacgatataaagagttattcaaatcacatgcacatatacatacatatatacatatatggtactaaaaaggttggagtcaatcaaatatggatggtttgaaaagttttacacaatttatacaagaaagagaataaatatgttgacaaaagaccattccaagtagaggattttttctttttctgacttgggaacatctcaagaatacaaatgaattggtaggtttaatgagaatagacattttgaatgtgactattcttttcaagagaaaatacccattaagttcattttcaagacatgaaggtgggaacggagggaaaaataaatactttcaatcacaaaaataaaagaggccattgattgtagtacaaaacaaaaggacaataatggagttttggatgcattaacatttgactccaatatggtactccattcgaaacaaattgttattattaatgacaagtttttcctttttgttttttttttttatgtggaaaaaataatattttaattccaattattggggtggtggctttggacatttagatgaaatgatctcatttataatgcactattattcatgaccaaaatttaggtcatgaccttgagaagatgatgaagccatttttttaatgagtccatttatattatgatagtgataaaagtcgaacatactcgtttttttcaaacttgcaaggactcgtgtttgtagaaatttgatttttcacatttttttcatggtatttgtaaatatacgttgtctagagagtcaagtcttatcaataaagtgagaaccgaaaatgaaagacaagaaaaatagtggttcaaccaagaaaatacaatctagttgaaaatctagaatcattttaagaataataaggaaaataaaatataaaaaaaaaacttatatatacgaataattagcataaaattacttttagacgttttacaaactagtcaaaatgttttgtttttatttgttttatcttttgttatggctagatttggtgtggagatgggcctactccaatttgggagaacatgggcccaaccgtgggcttggatgccttcacctgagcttaatttatgcatgttaatgcatttctccattgggctgggcccttcaccagacctcgggagcggataagcccattgaatcaagctccggactagtcccactaaaatatatctagcttgtttaattaatttgaattaaaatattcttgtcccatcttgaaagcccgtttcgaaatttcctatcgggttgaataaattaggaaaataaacatattcgataagctctccacctataacctaaaaatagtgcaagcttatttaaaaacgcttttgaaaattaatttttcaaaaaacaatttattttcgatttaaaaccaattctcaactaaggattcgaacatgaaaataatttttatgtatgatacaaaatttttcaaagtattttttataatatttataacattttacaaaaaaatcaaataaaaatattaaaaattgttttcaaaataaaatataaaaaaaaacctatcattttgtcaaaaaaatattttcaagaataattctatagaatcatcaaattattacatcgaaatagactaataatgtatcatcaaatcaattgtacgaatttactattcaatcttaacctaacttgtctgaattattgccaccattttggaccatgcagagttttcagcccttaaatatttggtcccactttgtcggttttcattggagcttacaaagcaagagaaaatttaagacaagaatttgaatattccaatttccaaggcaagaaaatttgaagcacttgttgataataaaaaataaaataattttctattttcaaaaataaaaggcatcaaaatttttagttttggaaataaaaacaattttaagaaagaaatcactgtgcctttttattcccaataaaacctaaaaatctttgaaacttggggaagaagaagaacagaagaaaccattgttatatgaggaaaatggcagagcttgatgggcttcgacttttctaacacattgatttcatgtgtgccaaaaacactacagtttaatccttcaattctactgtttttcacgtgcctgttgttgtcaatgtatcgggtttggaaataagtcccgttacgataccgacatatagcgaaaaaatatcattaatcaagtagcgtcatatatacaatttggatctctagctttgaaaaataagtgcctttgcaataccgatatatatataaaaaaatattattaattaagtcatcatatatataatttaggttttactgtggtgtactcttatcggttttaaaaaagtcttgttacaatgccgacatttactgtagagacatcatcaatcaaataatgttatatatatatatatataatttagatcttattatgttatatttttatcggctttagaaataagtcgtataccgatattcatggaagaaacattattaattaaatagtatcatatatatataatttgggtcttattgttttaacatcttggaatttttcttaatacactgtaaattagaaaaaacaaaaaaaaacttgtttgataatggtttttcaaaacaaatataaaaaattatttttaaaaattatttttttatatttttatagattaaatgtcgtgttacaatagtttcccatgcttttaaaaataatttttacatataataatttattttttataattatataattattttttaaaagaactctcaaaaataataattaaaaaacattatctaaaaacaattttttttatcaaacatattttcgttttttattttataaaaaaaaatttcgaaaatagtacttggtgaatatatggcataaataaaaatggatctcaattattggagcttacagctgttttggggcatgcaatggatgaggggcccaccaatgttgagctatgccctcagcctgcctagggtttggggtttgtcattattcatttcaccctgtggatataaatgagttgtaaataagacaaatagggaagctcaggtttcattgactgggaattggggaattggaatgaccactcctcaatctgaaactttgatcactcactactcacccagtacaccccaaaattcacctgatagcctttttttttttttttttttcaaattaatgaataaatatttatatatcccataaattataaattcaaatttttcatttttttattaaaaaattaaaattatagttaaaaaataaaaaagaattaaattatatttttttattataaatttaaaatttcactcaccttatatgatatttcgattaaatacatcttattctcctaatcttaaaattttatcaaataccgttctcattattttcattttttatttttactcacctcttatttcactcgaaataaaggaggtacatgatgaaattggatacttagaggggctaaatatattttgtcaaaacctcgaaaaaggtaaatgaaattaaccctattaacaaaaaatgatttgtgaataatgctaaatttgagaaaattctcatagttttaaaatttcatcaaataccgttcttatcatttccattttttatttttactcacctcctatttcactcgaaataaaggaagtacatgatgaaattgcatacttataggggctaaatatatttagccaaaaccttggaaaaggtgaatgagattaaccctattaacaaataataatttgtgaataatactaaatttgagaaagatttctcaccttttttttaataacacgtattttgagagaatatacgttttattttaaataaatatcaaatattgaattaagaatattatatccggatatgcatgtctaatccacgtcgtatcttatcttatcatatcaaccaaatgtaactaaaaaaatttgaaaaattttatttttatttgttcatatgattttataaaaaatgtttgttaaaaaacaataaaataatgtttcatctagattcattttgacttatataaaagcttatttaaattcaatgttgtcttattttaactttttattatcatcatgagcaaaatacaatgaaatttgggttcattttttttatttttatacaaaatataagaaattttattaaaaaaaaaatccttttttaaaaataattttaaaattttaaagaagtaaaaaccttaatttttcaaatttgggctgggaacagcccggtgacatacccagttttgcatgggccaattagtgtgagcttgtgtgctacaaaatccttccccactctgctaagcccaatgggccaagagttgatcgaattgggctgatcctccatgtttggaggctgagaaagtgttgcattcaccttaatgatagcctggatgggtataaattataaaatatgagcctggcattaaataataataagccattattaggtttctattctatggtctttgactatattttattattaataattttttaatatgttattttcagagtatttaattattttattttaatattaataaacttatgattgttggaatacgtgtgcggctctcgaaagagataggtggtcggcacaccatgagaaatgaaaaataggataaatgatcggaaaaaataattatattatgacagatagaacctgggagaaattttttaaatttttttcttatttttaaaattattattattggtggactagaggttggacgcatccatcgacttgccttacatttgaatgacgtgggtgttttagtaaatacattataagattagggcatatgcttttattgacagtttttagaagagttgatactggttgaaaagggatgtcgttggtaaagagtttattgatcgatttaaggttgactgcattcatcaactcgccttatgttcaaatgtgatagatacttcctcaccataattgtttttggaagaggtgatagcacataagatcattcaattattattattattattattattattattatatataagtgataaataaaatgagagacaaagctttcaacaaaatagtggtttaaataattactaaatgtattttaattttttgttaataaaataaaaaattaaaatcaaaactgtcaaatatccttaaaaaaataaaagacataaattcaaatatttatattttgtgttttttaaaatattaaaattaaattatattcaaataaacacctaaataaaaaataaaaaagtattgaatggttagacttttttttttataagtgtttttaaaattaattatgaaagtagttttttaaaatagatttataatattttgtaaaataatagtatgttttggaacttgaaatatttttaaatatgttttaaaattattttttatagataatgctttatcttttaccattctccatatttatatgataatttaaaaaaataatcttcaaaaagtaaataaataaattaaaagatattttatattaaaaaatatatattttttaaaatataaaattatggcttgtttgacaactattttttagaactatttttttttctacaaaaaaaaattattttatgttttttgttattaagaataaaaaacaagacattttctgttattttctaatagcgattttaaaaaataattatacaaacatataaaatgattaaaaataaaacattagatatataaattatttttaaaataaaattaaaaatatgaaaaataagttaaaacaatttacattttcaaacaaacttttgttttataaaaattagaaaatagtttttcaaaaactattttttactattattttcaggaagagttacctgtcttttatggtaatcaaacatgttttcttactcttttttttttaattaattttttaagaaaataaagaactattttttcaaaagcaatggccaaataaacttttggttcaattctaaaaaaaaaattattttaagacttaattattttaaaaatgacattctattccataaatcaaatatgcagggtagttccttttcgtttattttttatgaagatattatatgatacaaaggtttcggaacatcttatatattttttaactatttaatataaatactttaaaaaaaaatccatgaaaacattccggatatattttaaaagttaggttttcaaaataaattgtcaaaaaaatacttttagtacaaaaattagtcgtgtttttaaaattaaaaaccttatttatagaaataattgattagtatggatgagataaatctcgtatatgtaaatctaacctctacaattgtttgccttaaaaggtaacctatctttgatataaatgtcccttgatatattgattatttatatatgtgttttaaaataaaatattgtcttttaagaaaaaacctatgacatttatgtccaatttttaaaaattgaagggttaggatgtgttcgacaactgttctcgataacagttttttatactataaaatgattaaaaatgaaacacaagatataaaaattattttaaaaatataaaaaacaagataaaaatattttaggtttcctaacagaattttgttttacaaaatatcagctaataaatttaaaaaaccgctttttgaaaatagttaccaagtaaacctttagatttacaaaacgaggataattatgtccctttcaatcaaataaccctattttatattccaaaaaataaaaattattaaaaaaaaacccccttaatttaactacctctttgaggcattcaaattccaccatgagaagggagaaagtcacaattaggagacatctttttttgtttttttttaatgtatagaaacttacattagacggttcccacctcacactcacacaaaaattcattactataatttaacattaaatcttgttatggtttgaatacaaaactaaatgatgaaagaaaccagctcctattttggaaagcttcctccactctattgcttttctctttacgcaatgctacaaacatgcatggcataattataaaatggcatgtgacaaaaaagccacctatttatttatttattttatttatttatttattattattaaattgttcacaactttgattcctctctctctctctctctctctctctctctatatatatattttttatttgtaaataattagacatgtctgtagtaatgagtgggttgaaatggagtaaagtttgtgctttttcttttaccctgttcttaatgatggggaaaacaaagaattaattgagaaatattctaatagtaagcaatccctgatttgaaggagcactgtggaatcaagctttgacaaattgtttattagtcatcaccaactcttatatggtttatattcattaattattgaatccaaaattgtggtcaaactctaccaaacaaaattttagctactttgtattttttccttttaaaaaaaaaaagttaatttattataagagtaaatatattttgctattggaattttatccatggttcggtgactgttttataaaatagttttgaaaataattatttcatattttatacaaacgcaaagtatttttaatttatttttattatttttaaatatattttaaaaataattatatatgtatattttattttttattgttttgtatgtttatataattatttttaaaacagttatagaaaaaataagtaaaaaccaaaaatgttatttgaaattatattaggtttgctcataactgtttttaaaaaccaaaaacacaaaaagcattgtttgataattaatttttatttttattaagaatataaaatatagtatttttagacaatatttttgaattattttatatcgttttcacttattttttaaaaataaatcattagatataaatttttttaaaacatatttaaaaatattaaaaataagttaaaaatattttatatttctaaataaactttacaaatatgatagaataactttcaaaaactgttttcaaaaaatattttttcaattttttttaaaaacaaaaaatataaaatattttttatattattgaaattttaatatgaaaaaaaagtgaaaagtaaagagtataaattatagtttattttgtttaatcatatagaagaaaattgatttttatattttaaataatataaaacaaaatagtgtagcacatgggagaaaattattattttaattttttaaataatggaaaatattataaaaataagatatttattttcaaatgtgaaaatattttagtataagtatatgaatggcatttatttttaaataaacaattccaagaggaaattgaaaaaaaaaaatcagaatattcgtttatactctcaattggcgtgcatatgtgaccagagggaggggtattatcgtaatagcagataaaaaatcttacctaaagtgccgatgaaggatgaacttgagctgtcgaattggaaatgatgaagaatcaacggcggagaatgggagtttgactgaagtacgaatggggttggaatgattggcttttatatagactttgaccgaaggagatttgaaacgagcacacaattatagcctttttctagagcgagaaaatagagagagaaagcgaaggaaaatagagagagagagagagacggggggtgagggaggttgtgttttt

SEQ ID NO: 12655 - DNA, 3608 bp, Vitis vinifera
  Intron number 5 from transcript GSVIVT01010792001 (locus G SVIVG01010792001) derived from phytozome v7.0 (chr-ID chr5 ; pos 22638427 to 22642034)
attcttgctggcttatcactgggtcttcgtggaaagtaagaactaatctaataggtttttatgtatctttacattttttttttcattcagggagtgctgggaaactaatgaaaatgaaagtatgccagctttagcatttgaatttagtttttcctttttcatttgctatttggttatgctctttgaatgtattttaagaagagacctagattttcctatccttttggcacaggttcattgcttttcccatgccttttactgcataagaaaagttaactgccatataaaattattaaaaggaggaaagagttaagtgccttacattgttgttgagctgattgtgccataatggataaaggtagaagtatgggtgttgtgattgtgcatcttgtgtagatggtaattatggtggtattagtggtaagaggcaaaggtagaagtattgatgttctcattggacttcagaactgatttattttggtacatcagagagacggatggaaaacttctggtggaggagttgggttttaggaactcttccctgggggagtataatgaattggcagagttagacaaaagtcttggtagcaaaagcaaggtttttgcagctcaaagaaaggaatagaaatcccaaatgctttcactgaatggtttggtgtttgataggagaattattttcactagtagggttgaaggatgaatgatgtatggctgtcccagggttcagaaattattgtatgggtatctaatttttccagcttttgcattttaaaacagggttcagcaatcataacattgagggtttttttttttttttcagagcaatcataacattgatgggtgggctttagattgatagatgggtttgacagagctggtttagaggtggtatttggagaggaggaggtgttagcagctttattcaaccttgggtttggggaaacagggctccaggtttggatcattttcccatggttttttagtagacattctgggctacagtatggggtatgaatatcctgattctcatgggtttggaaatggccccctagagaggaggggcagtgaacatggaggacttttatctattagttttattagggacctatacaagcttttacaaagattttagctaacaggtggagaaaagaaattgcaagatgttctttctcctggactcttatactgtaatattaggtaggggactagttagctaagcattgagccttgtagtcagagatctttgttagggattttatgtgttcttgctttgtatcttattctaaggtcttgtagggtcactggttgtggtctgtgtgagttttggcttaatgtaattcctttatttctctagtgtactccctctttctttttgtcctgaagaatagagcatccttcctgaaaccatatgttggaatttattggagggaaatcagtttcatcaaagggcatatgtttacttcattccagtggaatggattcagttggagtaattctgttttcagttattgaaggtgtttaatcaaaacaagctagtggctccctacgtttgggagaaactcaatcggaaatgactttacttatgacccccagagaatcccattccttttcctgcaactcatacattttggccaaaatgcccttacaactcatattttgacaaatttccccacaacctatatatttggcaaatatacctttactagaacaactaattaattttgacttgaaaaatattaatgtgatttaggggaaagaacatggaatttggtgctaacaacaaatttgtggttgaagcttgaaagtcttttgggaataatttatggaatagttttctactgtaacagaaaatattgaattagatcagtaagtttaattaagattctattagtcatttgacccaaatgtgagcgattggtattttttcttgagttaccattagtcatgtagcccaagtcactcttttcatgaaaccaaaaatcaaccatggaatgagcattatttacaaacaaaacattgtctgtttggatatacttcctattttttgtttttaaaatccgaaacttctatagaatagtagaacattttgtataaaaagtataaatttaccttatatctttaaaaatcactttcaaaatttttaaaatttgaggtagcaaagatgttttgatatctttccaatcaaaaaagatgttttgatatctcaatttttttgaacaggttctaaaaccattaccttttcaacataagactttacgaattcttgtatcttatatagaagttactactattttataattttaaaaacagagcataggaagtttatccaaacagacattaaaatatctccttttgtatccctttgtattaaaacattattgtaaatatatgcattttatgccaatttcttaacagttgataaacagcacaatagcataaaacctatctctttctgttctgatagttttgtaacacttcaatgagaattccttatgttgatctggttcattctgttcttcttacttcccattttgattccctttcactttctttccagtttagtgaatacacaatttatatagaatgataaaagtaaccaattgataattggaagaagaacaaatgttatttggaatatgatggctaggtattagaagagtagtagagcatgctctaggaggatctacagggaaattaccattatttagagaaacttggtggtggaattatgagttcaaaatactatacacagaaaatggtcatgctgcaaagttaaggagaaggaatagagatgagggaagtcttgaactggtgtatagaaaaagtcaataaagtggcaaatgaacctaaatttatgtactgagtatctttgctcttttcttgtccctctctttatgtatctctatatttctctcgtcttatctttgatgcaacccttttcatctcccatcttgtctcttttcttctcttccactttcgctctcccttctcttccctcattgactatccaaccgtgctgggtctgggtctagctttttcgattactcctgatccatgtaatggaatagagtaccatatcgttcccgggagcacatacacaaatagaattcgttttttgtacgatacaaaaacaaaatgaatttaacatagttaccctaatagaatacttttcaaattgaacctatctccttttctggctctgattttgtgtaacttcaattactaattttaatttgaaagaatcgatctccttcaaatttcatactgaccttttgatatatgagtctactaatccaaggaaagaggatattaaaaaaaaaaaaaaaagatcaaacaacgatcccaccactcttaccaaggtaatgaataatcttttttaggggtcccatcgaagaactaccttggtaaagttgtttgagctgtcaattaactaccttgtttctttataatttttttgatgacttgattttacatctcaaacttgtgtggtatattgctattgagctgaacctaaatcatttaattctcactctatggtgcacacgtattataacatctttcatttccttccaggtttactccagaagctctaaactggcttttcatca

SEQ ID NO: 12656 - DNA, 3868 bp, Vitis vinifera
  Intron number 1 from transcript GSVIVT01023848001 (locus G SVIVG01023848001) derived from phytozome v7.0 (chr-ID chr3 ; pos 3002711 to 3006578)
aacaccaaggaagcttaggccaaaatttgtctgaggtcagtcagttttctcttatggctgtttcaaattataaatttttcttgaactcactactcttctatttattttctggcaataataatcgatggcctttctactctccacttgatcattaaatacaattttctttttcaaaattttcaattgttttgtgttctgtgatctatgaattttattatgtttgagttttttctatcttctgccttactgttgcatgtctgcatatattatgtatctgaaaaaaataatataaaaaataattattaacaaaatgaagaaaatctatattccattataagtataccctctagcataatttatagtatgtctaagctcagaggggagttcactgagaaatgaaaatccatcacaggcattgccatatatatatatatatttaagatgagaaggcattgctgtacattttgagacaagtaataatctgtactttcactataaataaaaacaatagcatcctctaggaacaatcataaaatcatgaatgtaccatgaacaggtcctcagccaatgcataatcccatttaaacaatccatagaaacccgaacatataaactcaggtacacttgtcagggtgtaactttgcaggcgtatctcttgatgttggatttatctaattcttaggcagtaggattcattggcatgtatcagttttttaattttctattttgcttcaatccttttgctaaaatgaagtgtttgtgttggtattataagacatatcacatattttaacttggagccatcaaggattgattcatttatgcactcagcccaacttttgaactcattctattttgctcaaattcatacatggaagttttagttggtaacctctggactgttctggtgcaaggcactaattgaaattgggctcaagctctggcatgccttcaacttatattgaatgcagttgttcttgaggcccgacttaggtggcacactcagaggattttcaaagtgcattaagatttggtacatcaaaattacactaaagaaaagtcttagccaaatttttttttaagtgaactagtattttatggaaacctttgtattatttattaatcccatatagggtctctccatctcttgtgactgtttctaccttattaaattacttgtctacccaattttattgatatttttaaattgatgacaaagataaaacgataatttacttagtgggaccctccagaaataaatagaataaaattctaatttaaaccattatcaatgtgtttctatcatttgcttatccaaccatgggcaatgagatattattttattcaaccatcacataataatttttgagtttttatatttaatttttataattgtatttgcttatccaatcattgcaaaaactatcctatagactttgggatgctgttttggcatttcctttatatatatactctttgtcttacctatcaaaaaggaaaaaaaaaaaaaaaaatcattgcaaaaactaggcaagtgcttggaaaggaaaaaaaagatgagaaaatgaaaggtgggaatattaatattgcaggtcagttcttactaaagagatttgattttgaactgttatcaactgctacaattttatttatttatttatgttgtacttttggcattaatttttgtatgctatcaataattctttgatttttaattgttatcaactgctacaattttatttgtttgtttgttttttgtacttttgtcattaatttttgtatgctatcaataattcaggtttattgagttgtcaaatttttttagttatcatagggttgtgcaaggatggaaaagggacaccttttgaatatcaattcatccatgctggtctatttatttatctttttgataagtaaagaagagtatatatattacgaagaggcactaaaatagcggcccatgatatacaagaaagatacattcaccccccttacagctaaaacaaaaaactgtcccaaatgatgtacaaaaaacaacccctccctcaatgggagcccacccaattaatgccggtttatccctaattgtatagcattgatatgtgattctgatgtgtttcctatagttgatccttttttttttgggtaaaaagaagtaattcataaaagagaaacgttaaaaaaaaaaaaacgtcccaaaatacacagaaaatatagaaagaatgcctatatgtgccacaaaaaaagagagagggataacaaaaaacaacccccctcaattcgaacccgaccagtccataaagtctacagaggaaagaggactaggaactatatacaacttgcaccatgcccaaagattacaaatgaaagattcctataattgatcctaatcatgaggtgcggtaggtagatgtcattgtcatttatgatcagtgtgttttgcgacatcagaagattccccttgtctttttcgtatataatctatgcatgtaggctgtgcccgcttttgttaggtgctgtttattgcatctttgcttgcatatcaatgcatatatcattttttttcattcttgataagggaaaagattatttctagagttattttggatgcttccacggtctttcaggtggaaatatccagtcagttgctgggaatagttttagaaatctgattcaaaaaaattagttttggaaataagtaaatattattttgacaatgtcaccacctgaaataaaaattgtgttttcactttctgtaatagggatatatggcttgtatgaataatgaggacaaggttcctctttgcaccagaaaatttctatcagcaggattgatttccatgcaactattgactagttgggcctatatgggctttgtttcatggatgatcacatggattgctctctcatttgggctctgcactgagctgtttgattggctatcttggtcttctcaggtcactgaaatttgattgtttggctgattatagccatcttatttatggtttggttggccaccttaagccatatatgatataattgttctagtagatctttaagccctaacaatctctgtacaaatatacctgctaatttttgaaatttttttaattcatgtagctgtacttctgctggccacttttgaagcactgctgctaatgctaattatgctctgatttacgtttgaatatgtgacatccctgatttatactaatactcatttctgtattcttgtcgcttggccaacaatctgttggcatttctgccaccaaaatgcatggtgtttctcatgagcatgtcacagttgtttttgcatggttcaacgtagtggttgttcttgttcatactcgatggtataatttagttggattttgtctatttgggttgttttgaaccagttgggattcaaacttacagtttcagttgattgccatgggactccatcaaagatgggctttaggatttgattgatatgagttaacctcttgtttttgatagaacgacagcttgttcattgtgatgatgttggtgtacatcttgttgacataagccacacccttctgttgtctcttagtgcatttttcctttttggctatgaaaataaataaataaataaaatggcatcttgggaaaaaacagaattttcttttgttggtacatcagattttgctacaggtgtgattttatttatttggtttctgttggagtaggagtgctctaattcagtactccccatgatgaattgctgtttgcgaatgccattttaattgttcgtctggagatgtcctattgacaatgcatgccatatttttatgtccttgcttgattgtctatagtgactgactgattctgtggtctgcttggtagg

SEQ ID NO: 12657 - DNA, 7429 bp, Vitis vinifera
  Intron number 3 from transcript GSVIVT01001004001 (locus G SVIVG01001004001) derived from phytozome v7.0 (chr-ID chr1 3; pos 11317846 to 11325274)
aagagagagagagagagagagagagagagagagaggtcttgtagggtcccacaacaccgctaaatttagggctaattccgctaaaatcagggccctttatctttttgggattgggcgaccttctattttaatggggaattttgggcgcaccatattcttatatcctcttggggatgatttttgcagcgcaaaatttgaagggtttttttatgtccctattataataagttatgatgggtccaaagggattagactagttgttatgacttatgacttacaatattagtagatttggggttaactaaaaattgactttgagttgaccagggttgactaaagcctctgttgggatatggaaggcaacttcttacaattctcaacccttccttgtctttaattttggtcccagtgttaaaaagagttacttccctcaaatatcattttaatcccacatcgctttctagtcaaattctactttcaaaacatcattgtccctttttcctatcacatgttagacaagaagagtaaaagcccaactaataatgtacttttgttgctaagcaatgagatggtgtgaatcaaacgagttttcatgtgtagtattagaaatttcagaaatggcacatggatgtatacgtatgattatcaagagctcctatgaataatttctcaaaggaagttgtaaatggttaaatggctttgatcttccacaattttacatatatggcaatagctgacaaatcaatcatcaatcgaccctttttttttttgtgtcttattttatttggttggtttggctttacctttagcagtactatcaatacttgattgtcatagatccaaattgaagaattgttgtttccaaaatcaaaaatgcaaaaagaaacaaaccaatcatatggtataataatttggtgatctcacaaataccgtaaaatcggcacatttgttgaaagattaccgatttaaccaaaactaattatctcaacctaaattaaacaaaaggaatgatttttatgaactaaactagcatgaacataaatacgatgattgtaaaagtgaaatatatgataatgaattttacaaagtaaattgtactccggtgttcaaatctcaaagggaataggatctagttttcctaaaggttatgacgtactttcacattgctagcttggttattttagtccataactcattttgaggagtttgcatatcaataatcaaactctattatcaattaattgagtctaatggcaagtattctctatatgtaaaaatcattcattatttatgataattgacttgcaaagagtttattttcccattaacaagaagagatatatgaatcttggaataggggcctagtggattttatcacaagtaattgcattttgtgccattcgtatagtcaataactataggaaaaatatttcatagttttaagttatacacaaatttgtgcattttatcggagtaaaatatgtaaaaataattcatacctagaaattattgaaactgtcaattctcaatttttattatatgaatgttacctaatggttatgttttttttttaacatatttgtaataatattattgcaatagatatacccttctcatattcttcataccttccaaattatttatttatttatttaaatttttttcccacttcagatagcaatgatggtgtttttccataccaattacatttataattaatggaaatgataaacacttaaaaaattagagaagacacgaaaaatgtgagaaaaaatgtaaggatttctcacattcttcatatcctctaaattctatatttaaaaattttaagaattttgtcacttcaaatagcaatgatatttttttttcataccaattacacttaaaactaatgaaaatcatgaagaagaaaactttaaaaataacctcacattttttgtatcctccaaaattttcaaattttttaatttaattttttttcacttcaaatagtaataatattttgttcacaccaattaagaattaatggaaatgatgaacaaacaatttttttttttaaaaaaaaaacaattaaaaattgaagagggtacgaagaatgtgagaataattcgaagaatacattctttgtaccatctccaatttttattttttatttttgaaatttttttattcataatcttcatcaattgtaagtgtaattggtatgtaaaaacaacaatattgttatttgaagtgaaaaaaaagttcaaaattttggagggtactaaaaatgtggaaatgatacgaagaatgtgagaaagttacaaaaaatatgaagatttctcatattcttcataccctccaaattttctaatatttttccattttaagaatttttttcacccaataatgtagtttattcacattaattacacttagaaccgatgaaaatgatgaacaaaaaaaattaaaaaaatagaacaattaaaaataggagggggtaagaagaatatgaaaattcctcatatttttcgtaacattctcatattattcatgtcattctcaaattttcggtatcctctaaaatcttcgattttctttttattttaagatttttttttcacttcaaataacaataatgttgttttttcataccatttacacttacaattggtgaaaattatgaaaaaaattggtgggggtataaagaatttgaggatggtatattgtactcacattctttgcaattctcacattttttgtaccctacaaaattttcaacctttttaaaaaaaatttccacttcaaatgacaatcatattattttttataccaattacacttatgcttagaatttatggaaattataaataaaaatatttttaaaaattaaaaaaataaaatgctctgtacccttcatatttctctttttttttttttttttttcaagattttttttatttcaaataacaataaaatacctttattaagttacaattaatgaaatatttggaaaaaaaacatacaaatgttaataaaaaaaatttgaagacactcctcactttttgttcttatcgtctttacattattggcattatcctcgcatttccttaccctcaaaattttacatgtttgtcttattttaatttcttttaaaaaatactttcaatcttttatctaatcttctccataaaagaaaaaaattaaattataataaataaaaatttaataaatacaattttcaattaataattgattagatcatcattctaatttttaacaataaatacttattttaattcatttataaattattttttcacaactcttagatgttgtttatttttttgttgaataaaaaaaccaaaatatttgattttttctattaagctaaaagtaactcattgacatcaaccaacataattaaactaaacttattgataataagttcactttaattatgttagttaatattaacaaaatacttttagctaaatataaaaagttaaatattttgattttttttattcaaccaaaaaacaaacaccaccttattgttttaactttatatcataaaataagtgacaacatttctttcacaaaatttaaatattttacaacttttataaaatattttgttgaataatataattggttgtataaagataatttaaatgtgaggtgcatgagattgcacccttttaaaatacacggttatcttacttgtagcattggtttttttttttttttttaattcatgtaaactttacaagtgtcttattctcattggtcacaaaagtaggggtatctttttgaaaagtactttcggtaccatagaatgacatgagaaaatattgcattagtacttgaatcttcgttgactttgaccatacaagtgagattttgatgtgattatttattctatatgaattagactgttggtggtttaagcagcaatatgttccatgagtgatcctaaaatatttatgatcatctagagttaccgtggtaatttctttagtcaaatttgacatttatccttggtgaatgagagtatatcaattaatcatgatataggtaaatctaaactcaagaattagacggataatcttgtgaaggttgatagttaccactttgttggattatagacattaattcatgaaaaacttttatacaatcaatagtaagtcacgaacttaagcaattaattaattattaattattaattaataattaattttaaattttgatttaatttcatagaatattgcagtgtgtttgattcttagtagaatgaagagtcaaattttgaattatgattttaaaagaactagtattttcctatgagtccaataattcccgcttgatctaatattctcggtggagtgagaaaattatattttaattaaattaattatattatgtgtgttatggtacatgaagttgcacaaggttatattaaagcatataattaattgagtcttgagttttatttgggttatttaattaattgaagtccatcttttgagctaattcattaaatagacttaatctattggattaaatcaccataacacatatctcgagccttcgtcacttaaacccacctctaatctatattttagggtttagagttaaactaactcttactcttatacctttacgaaaaaaaccttagcttttgttttcctcataaaataagaacattcttctccaagtgccaagatccaagtaggagctatcaggtggatgacacacgatgtctttgagagtttcttttaaatccccagtgattgcttattcacttgaagtgaacaaaggttcgtttcatcctagagaaggaaacgaggaattacttaatcatgccacaccttaatgtaattagggcactaatgtatcttgcaaattgtaattgatcatacttggttttctatcattattaacaagatatgattttgccccaacttgaagacattgagttaggattaaacatatattgccatattttttgtggaacaagtgatatagatctaatttattcaaaagaatttgaatttgtagttgtttaggtatgtagatgtaagatatttcatatcatcataaagtttgatctcaaacaagatacatatttactcgtggaagtgttatgatatcatagagattaattaagcaaacaatgataatcacctcctcaagtcattaaaaaaaaatacttgagatttatgaagcaaatcgtaaatgtatgtggttattatgagccaacatattcaagagtcatgtgaattgtcctctatcgaagacaatccaataatattacatgaagacaatatcacatacatcacaccaaagatgaaaatatcgataatcacaaatatattagtacttgaattttacagatatatcagcggatattttgacacaaaatatcgataaataaaaaatttatcaaaacttatgaaaatgtaagaaaaaactcttaaaaatgaaattagaagtataatagacatttaaaagttgttttgttaaagaaattaatatatgtatgatatgatttgcgatattaaatttaattatatagtgtcgattaataagaaatgtgaattttgtaagtgtagactcattatgaagttaaattattacaaatatacgaattatatgatttgtattaagttaatttacttacctctattaaaaatatattaattaattgtaaaaatgtactaatttaaattcaacgttatattaatttaaaaatgtactaagttaatttattctcaatatactactattacacttgaatatcaaaataaaataaaataattaatttaaaactaaattattgcaaaattactaattatgttatttaaatatatttatgatttttattgtaaaatattggtacattttgatacaaaatatttttatttaaaaatattaataattttatttatgattttatgtttgttttatatttaattagtatacaaaataaattataagataattaaaattaattaattaataataatttaatttttttaccgatattttgcttgtattaccgacttattcgtgattaccaatatatcaccaatatttactgatatttagtgatatttccgatatattttacctatatatcgtatccactttcttcgatacacgatatatatctcgatattttcttccttgcatcacactaataagaggaggataaattaaaaatgattgaactaaatacattttatcaaagttcttctttacacataaacttcagaaaagtgataaaatcggtgtttaacaaataagatcaaatgataatctaaaaaacttattaataaaaaatcttcaaattggaatgcatcaactcaaagatctttaaattgagtcattataggtatacatcattatgagaggaagtattataaaaaaattgttatcatacttcactttttttcccctttgtttagattttgtctcagtgtacatataaacaagatatttgtcgaaaattctaacgattcatatttagctaacttgtcttttgtaggaacgatcacataattatccatgatgaattttatttttccttgtactttattgatgaaattttaattacataattttctcataattctgttttttttttcatttcttcttcacttttaataattatcttttttatttgtctttttaataaggcaatgttgtatcataagttttaaaatttagttaaaatgtcttaattgatttttggtacctttgagattttattttattttaaaaattattttcttaattactttttataaaataaaaaattattttcgtaattgattttagaaaagttgatattttattttttaagagaattcagtttccaactatagacttatatcatatctaaataaatttttaagaaaaattattttttaagtcaagatctcttattatttcctaatatctcatatatcaaatataccatttttagactgaaaaatcccagtattttgattagaggtattagatattttctatgtgtttgattgtttattgataattcctaatttcttttagaattttattgtgataaaaaaacttaattttcatttatagatttaatttgggttaagttttttaattcttatattataaaaagtcccattcgtattttcttttgagttttaaaaaagacaccctatttttaaaataaattccgcgagtaaaaaggatggaaattagacattgatgcgctcgcctaaagcgggtccaacacgtagacactagactactactataaaatgacattcccactcgtaagtcctaacaaacgcgaccaagaagctttaacaattctccatggccgcaactgtacacgccgtcctttcctctccctcctccatccttcgatttagggcttccgctttccacttcaacattcccccaatcc

SEQ ID NO: 12658 - DNA, 6424 bp, Vitis vinifera
  Intron number 2 from transcript GSVIVT01015790001 (locus G SVIVG01015790001) derived from phytozome v7.0 (chr-ID chr3 ; pos 17469147 to 17475570 reverse strand)
atctagaagggctgtggaagaagattatgttagattaatttttgtaattaatctataatttgggtcacacatgtaaataattaaaatgtgtgtgctatcatttaattaagcctaaatatagtgatctaattaataattgattaattggcttaagggtataattgtcatgagattattgtgtagataccattagacaattatcatttctatgaggggcagaaatataattgtgataaaattaaaactgccctagcggtttataaattgggttatggtccccattctacgactacgcattccaatttctgaaaatcctctcagagagaaattgacacagaatctagtggctagaattggaagaccatctcaaagggttttcttcctataaggtttcttcttcaatggattcaggtatgcttccgctattatttttctactcattgtttttaataaggagattccagcatatatgaaattaaggtattcaccttgttaaatattctagtatatatgaaattagggtatttaccttgttaactattccagtatatatgaaattagggtattcatcttggttgattttaacaagactattctaatatatatgaaattagggtattcatcttggttgaattttaactagacggaatttaacaagtggtatcagagcctactccttgattaattctttgagttattattttaatatatgtcaatggattaagatttatgaaatattgagttgataaaatttattattattattattattattattattattattattattattattatttaatagcattttatgatattaatatttaagttattgatctagcattttaaataggctaattaaagcggaaaatcaccaaagtgacatcttccgtgtagattagtctgttcgaggtgttagatatttgtgtgtatgtgattcatgcgggtattgactggcccaaaggaaagttaatatttggtcaaattgcatacatacttgtggtgataaatatgtgatgattataaaggtaacttaatgtgaataataaatcaatccaaagatagatttattatttgacataacttatcatcaatgtttgatcactacaacaagagtaccacttacagttaatattactgtccaaagacttgatattaatgttgtgctaggtatcttgaaatgtcataatttgcttttaaatttaaagattatgtgtttaattgcttattttatgtgagcatgatggtttatttgattcattttattttgttctggattcagcttttatatcaactacttctatatttgccaacatcaataatgtccctatgttaaatgggactaattttaaggactggaaagagaatatgatgattctcttaggctgcatggatataaacttggccttgagaatgcccaaacccgatgaactcaatgagcaaagtactcaagaggatgaggtttattggggtaagtgggaacgttcaaataggctaagtcttatgatcatgaagcgcggcattccagaagctttcaggggtgcggtaaccgatgaggttactaatgccagtgacttccttgcggaaattcagaaacgttttgccaaaaacgataagactgaaacgagtacgcttttagcaagcttgatttcaatgaagtataaaggcaagggtaatgttcgggagtacatcatggagatgtctcatcttgcttcaaaacttaaggctttgaaactcgagttatctgatgatttactcgtgcatttggttctcatctctcttcctgcacaatttaatcaattcaaggtcagttataactgtcaaaaggataaatggactcttaatgagctcatttcattctgtgtgcaagaggaagagagattgaagcaagacaagaccgaaagtgctcatttggctagcacttcgaaggataagggcaaacgaaagaataaggataataaggttgctgcttctaatggtccagaacaaaagaaacagaaagttgaggtaacatgtttcttctgtaataagcctggacatactaagaaggaatgtaccaagtatgctgcttggcgtgttaagaaaggtatgtttcttactttggtctgttctgaagttaatttagcttcagtatctagaaacacatggtggttagattctggtgctactactcacatttgtgtttctatgcagggttgcctgagttaccgaaaaccaagtgatgctgaaagatgcatctatgtcggagacggtcagtcggtagaagtagaggcaatagggcactttagattattattgaaatttggttattttttggatttaatagatacttttattgtaccgtctttcagacggaatttaatttcagtttctgttttggacaaatcaggttattgttgttcatttggaaacaataaatttacattatctattaattcaaatgctgtaggaaccggtttacttaatgtttatgataatctatatttgttggaaactgttccatcctataatgaaaccttgcatgtggaatcacgaggtacaaaacgtaaattgaataaagataattcggcctcattgtggcacaaacgcctaggtcatatctctaaatctagagttgagcgacttgtgtccgatgggattttggattcacttgacttttcagattttgatatttgtgttgagtgtattaaaggaaaacagaccaaaacaaagaaattaggtgccaatagagctacagacgtcttagaattaattcatacagatatctgtggaccataccctacggcatcttggaatggtcaacagtactttataacattcatagacgactactcaagatatggctacctatttcttatacatgagaaatcacaatcattggacgtgttcaaaacatttaaagcagaagttgagttacaactcaacaaaagaataaagagcgtcagatctgaccgtggtggtgaatactatggtagatatgacggatcaggtgaacaacatccaagaacatttgctaaatacctagaggaatgtgggatcgtccctcaatacaccatgccaggatcacctagcatgaatggtgtagcagaaagacgaaaccgaacccttaagaacatggtaaggagtatgattagtcattctactttacccgaaaaactctggggtgaagcactcaaaacggtagcttatatcctaaatcgggtgccaactaaagcggctgctaaaacgccttatgagctttggacaggtcgaaagcccagtttaaagcattttcatatttggggatgtctagctgaagtgagaccttataagccttatgaaaagaaattggactctaaaacagttagcagctactttattggctatgcagagcaatcaaggggttttaaattttatgatcctgctattaggtcaattttttagacgggaactgcaacatttttttaggatgttgagtttggggggagaaatcaggctaggaatattgtctttgaggaggaagagggatctactattgcttttgataatgtacaggtttcactacctatcattgatcaagaagtaaatttggatcctcaaccaacagacaatattgttcaacccttaattgcaaatgagggcattgctcctgaagaacaaactcaacaacctcaagaaaatatgccattaaggagatccactagagagaggagaaatgcaatttcggacgattatatcgtatatctccaggaacgtgaggtagaaagtggaatgatggaagatgatccaatcaacttccagcaagccatgaaaagttccaactctcagaaatggattgaagccatgaatgaagagtacaaatctatgcaagacaataaagtttgggaacttgtcccattaccagttggtacgaagcccattggttgtaaatggatatttaaaaccaagcgggattcaaatggtaatgtagaaagatataaagcacgtcttgtagctaaaggctttactcaaaaagaaggaattgacttcaaagagaccttctctccagtttctatgaaggactctttcaggataatcatggcactagttgcacattatgatcttgagttacatcaaatggatgttaaaacagtgtttctcaatggtgacattgatgaaacaatttatatggtacaaccagaaaattttgtgtccgaagactcaaagaatatggtttgtaaattaactaaatccatttatgggctcaagcaagcttctcgtcagtggtacttcaagtttcatcaaattattgtctcatatggttttgaggcaaatcttatggatgaatgtgtgtatcacaaattcagtgggagtaagtatattttcctggttttatatgtcgatgacatgttactagccacaaatgatattagcatattgcacgacaccaagagatttttatcaaaacattttgagatgaaagatcttggtgatgcctcctttgtcttaggaatccagatacaccgagatcgttctaggggtattttaggattgtcacaaaggacttatattgataaagtcctccaaaggtatggcatgcaaaatagcaaaccaggtgatacccctgtcgctaaaggagacaaattcagtcttaatcaatgccctaaaaatagtttagaaagtcaagaaatgcagaagattccttacgcttcggctgtggggagtctaatgtatgctcaggtatgtacacgtccggatattgcgtacattgttggcatgttaggcagatatctaagtaaccctggaatggatcattggagagcagccaagagggttatgagatatttacagagaacaaaagagtacatgcttacatataggagattggatcagttagagttgattgggtattccgactccgactttgctggatgccaagacagcaaaagatccacatcaggctatatttatctgttggctggtggagcaatttcatggaggtctgccaaacagacactcgtaacttcatccaccatggaagcagagtttgtagcatgttatgaggcatccaatcaaggaatatggctacgaaattttgtcactgggctgcatgttctggatagtattgaaagaccactgaagatattttgtgacaataaatcagcagttttatattctaataataacaggagttctacaaaatcaaaatacattgatatcaagttcctagttgtaaaagaaaaagtacagagtggacagatatccatagagcatattggaacaaactccatgatagcggatccgcttacaaagggattaccacccaaggtctttcatgagcacactgctcatataggtgttgtctcatttgaggatatccaaatttagtgggagtttgtattattcattgtatattgctctatgttatgtttagactttatctatacatttggattgtgttctgcagaaataaagtattcattttattgcactctgttaaattatgctaaagattttatctcaataaagttaagttggaccagttggaaataggcatgaatagatcacattgcatgtaatttccatgctatgcactcatgattgatctatgtcatttagctgtgcagatatatgtgaccattgattggtctagtaacgattgatgtaacaaaggccaccttgatcctatgtcagtataggtaatggacgagattgttcggatataccctaaggacatgatagcaaattttgagctcataaggttaagcacatttatttgattacatatgcatgtggcccagtgggagattgttagattaatttttgtaattaatctataatttgggtcacacatgtaaataattaaaatgtgtgtgctatcatttaattaagcctaaatatagtgatctaattaataattgattaattggcttaagggtataattgtcatgagattattgtgtagataccattagacaattatcatttctatgaggggcagaaatataattgtgataaaattaaaactgccctagcggtttataaattgggttatggtccccattctacgactacgcattccaatttctgaaaatcctctcagagagaaattgacacagaatctagtggctagaattggaagaccatctcaaagggttttcttcctataaggtttcttcttcaatggattcaggtatgcttccgctattatttttctactcattgtttttaatcaggagattccagcatatatgaaattaaggtattcaccttgttaaatattctagtatatatgaaattagggtatttaccttgttaactattccagtatatatgaaattagggtattcatcttggttgattttaacaagactattctagtatatatgaaattagggtattcatcttggttgaattttaactagacggaatttaacagattattgaattaggcaaaccaggg

SEQ ID NO: 12659 - DNA, 2197 bp, Vitis vinifera
  Intron number 16 from transcript GSVIVT01026824001 (locus GSVIVG01026824001) derived from phytozome v7.0 (chr-ID chr 15; pos 20167164 to 20169360 reverse strand)
ttgcaagcagctgctgagtatgagtgaaatagttactttcttccttgcacttaaacattatttgtatcccttagagaaaccaaaatttacaaaattgaagaatccttaggaaaaatagtttatttgacttttgtggccttcaactaattatggtaaaatttatagcgctgtcctgatctttgtacaaacaatgaaagaagtctgcccagactctcgttagagtccttgaaattgcaatatcagggttgggcttgtattcccatctcctgtaattctgtgcattccagaaaactttggtattataagtcactcttggcattaattatgatgcctgttggctttctataggggctatgaagttaaaaatagtgaatatacatttatttcaaaggagatgagagcgatggtaaggttccctatagagaaaatacatattggagaaaaagaatccacattatgatcttggttacaagaatccatatatagccctcgcttttcaagacatcttagtgactaggagatgggagaggtggataatttgtttcataaattacaatctttggttgttagaagggaagtggaggacattttgtgctggagagaaagcaataatagaagagctttcaatgatgtcgagcgatccgaccaagctattaaatctattttcatgtatacttttgtgaattggtgtagggtgtatatagaggatcacacattgtctttgatagattttgtaaagtggttgtttgttaggtatggagaaaggttttttttggtctccttgctttttttgggctttgtttgtatgcttcgtgtgtacttgtttcgctgtcttttaggtgcttctaatgcaagtcccttttttcggctaccaaaaaaaaaaaattatgatcttggttacagttgagcctgtattcctaagagtcatcaattggcctacagcattctttatttgttacaagcatacaatgttatcttatcagattgtttacctcgtctccacaagatgtggcagtgcctggaggcccagtgggattttctggcatttctctcatttgttactttcctcttgtcttcattgaggcttcatcagtcattctgtgcattctttaatctacactatctcagtcaagtcagttcatcgtggaacaggcccttaccgaattgctgacttttaaggttcaatgtgaatataagaactttatccacagaaaaagggatttctctgatgtcaaaatccatgtttgaaacatcaaattaagcttcaattttagtttacaaatagccggttgagactaaatttactaatagcctgtttgggagtgattctggttaaaccgtgtttactccataatactttcattggaaatgattttaaggagaatcagttggtgtttggatataaacaacaaaaattgctttgatattgaatcacttcaagtgattctccagattcccaaagtgattttcaaatatctaccaaacacctaatttttataaggaagcggttccaaacattagacaacatttctagccttctcaaaatcactcccaatgggctctaagttataaatgctaacagctctcgtatttctaagtttattggcagggatggacctggcatgtgtttaatacttgaagctctctttgttttcacatgtagacttagtcggtaatgtggatgctaagatcttaaccttaaatgagaagctatttcttctggttcttttttccgttgttttcacatgcttattatccaaaaatcttatctctgttgcaatggctatgtgactgttgaatgatcaagtccacaaagaatgaaataatcacataatctttctgcaggagttctaggaggccttttgtactaaatgtcagatttaacttttttctttctttaccaggtccatggtcaaaactaacatctggatacttttgtaaaattgtacaacgcaatcatacaaataacaaaaatgatgtatgtcttagtgtaatgaatgattatataggagaaatatgtggttggcatccatatggggaatgttatatgaacttcgcatttatgtattatgctagatatgttctaacccaaggttgatttatctgtgttctttttggatagtataacctggcatgaagcatttttttccatgctaagttgctaatatgatgatatcttcacagccttgcttcttat

SEQ ID NO: 12660 - DNA, 9464 bp, Vitis vinifera
  Intron number 3 from transcript GSVIVT01029981001 (locus G SVIVG01029981001) derived from phytozome v7.0 (chr-ID chr8 ; pos 2682542 to 2692005)
cgtttgccttaaatttgctgctgaaaaccttgtaggtatatttctttcaatgaacttttacctttttaggttttcgtttactcatcttttttgataagtaagcaatgcagtcatttaatgtggaaaatttggtcattcttctggctctgatctcctccaccgggtcaagccgttaggttgcctatatcagatctatcaaactttaaattgcagacttattttcctgtggtttcattttgtaagaaaaaccatcgctattagcattgttgctaaaataatgttaacaacatgaaatgagtttaatgtttttccctcactgattgactgtaacttaatttatgcttttggatgtggaacaaaaagatttggatttaagatatcagaagttagcttcaaataaatttgtttaaatagcccactgaatttttattttttttatcagagacagaaaatataatatatattgataataataaagttaatagaaggatgataggtccttccttcaatgtacaaaacctaatcaaagtaaaagtataccctccactgtacaaggagaaatacttatagaagcatgtacaaaaactctcaaaaatcaaaaccaaactctctcaaaagttatctaccccttacgaattacaaattgaacgccaactaggcagaataatattaaggggaattcctctaaaagcaacggtacaagaagcccaaaaagaggagtagaaataaataagatcccataacatcccttccattctatacttttcctccaaaaatcctagcatttctctcttgccacacaactcgcaatatagtgatacatgcaattcatcccaccgaataaatttgtttatgagtttaagacttcataacctttccctcattatttcacgatcttcatctcaacttatcctaaccatagttgttaaaaacttaccatacacaatatgatacatacaacacatcgtacaataaatgcaatttaatacattttttatgcaatacaatatgcaattggtaggtatctcattttcattgtcttaccataatgtacattcacaatataaatacatatgatgatactacaatcttgtatgggatacctttttgttatttgctttaactagaagatgaacttaaagccaaaatcataactttggagggacaatattgattttctaaaagtttcattaaacttgaaacaattatttgcatagaccaaaaaaggcttctatggaagtagcattttcctaattttcatattaagtttttatttttttatttctatttttaaagctaagaactctttttaataaaattatcaaaatagatatagaagcttgtattcagcttgaaaagggagcttttggtttctcaaaagctaatctaaaccaaacctacaagacaaacctttgactatttttattagcttttacgaaaatcaattttgaaaattttcatgaaatataatgttattataattgttaatgtataacataaggttacaaattgatgaaaaaaaaagaagaaatgaagagaggcttgtacgtaaattgtcaaatgctcgtaaggaagattgaagctaagtgtgattattgttgcaattaatatttgagatggtattgtataaataatttaaatacttaccttgaggatgaagatgaatgtaaacctttttttttctgttttgattaaagaaattgattcattgatatgaatttataataaggaagaatgtgaatccttataaaatttataatagatgattaaaatgaaaaagagaaatagtgtatatatatatgtgacttttcttcttcaaattattgtttctatcctttcttgtttgctttcttttccaaattcttcttttgcttctttttggtcagctcttgtttttttatgaatggttacttatccttctttgtattttcttgtaaaattcaatgaaataaatagtttgtttctaatttaaacgaaagtgtagtggcactcaacagcatgcttttaataaaggttgaatttaacaatcagctaacttcttaagaagtgccactactgagttccactatgttggctttgaaggacaagcctagaggcaaaccaaggcatcttggaacctaacctatacccctccacctaccctattgaaatcatataactcttctctaagttctttgtcaaactcgacacagattgaaagcacaatatgatgtatgaaaggtatttcaattgcctatgctttccctatagaagaaacaaaaatagcatatctgcctacatacattcccctttttgttggaaccactgaaaacctccaacatactccattttgctggttgaagagtaaccttctgaaagcctctattacaataatcaaaagtaaaggaggcatggatcatcctgccctaatcccttgagctgttaagaaccagccaaacaactacttgtaaaaaatgaagaattaaagggtgtttgatgaactgaaattttaacattgaaaattctgttgatgatttcaaagcattgattacttaaatgctaagtttggagaaataataaacccgttggtatcatttgaaattttaatgctaaattaattttgttgcaatgtaagaatttgaagtttgaagattgttttgtttatactttgcctttgggttttcatggtgacattcattcaatgatatttgtatgcaaatgtttaaaaaatacatagtttttgtagttagattatatataatgttttgttgcaaaataaacgtttggaaaaaagttcaatttggggaaaggaggaataggccaaatttggacaaggtaaacttttgggttaagatgattatggagattgagaaatcaacattttatttagattgaatattggattctgctgaggaaaacaaaaacaaattaagggtgtgttaaataaattattgttcccaaatcaaccttttttttttatcataaagctaattacaatcaaatctttatttatagtagttagaagttaaaacatatgagactaaggttagtgttaggaaataaaagaggaagaagaaaggagaacaagaaaggtttgaaaggtttaagtttgtctaacttcctataccttttcagttatttatattatcagctaagatttacaaaaaataccccgacaaccaatacctaaggacaagtgagttttagaacataacagaataaaataaattctaatgctcttcctctagctggagtataaagtttaaacttgtctagctttgaatgcaagttatgaaaggtattatgagtgaacaacttcataaggatgttgcccaaatggttatcagattggacataaggatcacaatttgcttttgcatcaagaaatctcacattaaatgacaattaacttctatatgcttgttattctcatgaatgacaagattatttgcaagaagatagcaaattgtttgttataatgtgtcaacatgggagtgtgaacataataacttgcaaataactcttaacatggcataacaaaataaaataaattctaccacttggcttcaagttggagaatagaggctaaacatgtctagattggaacacaatttatgaatggtgttacaagccaactgctttgtaagatgctgcccaaatggttattacgtcgaatataacgatttcatccaattatcgaaccttctagttatcctatctatcacaagatcccaaggataaggaggccctaatgagaagatgaagaacaactggagaagaatttgcttagtagagaggaagacttttgaagtaaggtttgtaggagagagtggagggccatggattacactcatcacagagaggagctactttccatgggcttcaagaaagaagggattgaatggcttttggaccatttgaaaaaggcttcaaagatggatggatgcttgggatttaatcacaaatataggaaaaatactagagtgaaccttttggagattaaaaggaaccccaatggcagatttctgcaaatcacagagttcatggcaagtgggaaaacaaccttcctggtgatcttaaaaggattaaaaagcaatggatgggaaacattgagccatagcatctattaatttttctccctctcaggcaatagttacaaaggaagcacaagtaatcagagatggcaagaagaaaatttatgttgacaccttgaaatgcagttacgctagcatggtggttgaggaagggccaagaggatgaggttacgaaccagtgggcaggtgtgcaaattctcagaagcaattgcgtgtaggacaacagtaggcagatctttagctagatatttggggaagaaagaggtggtttccatcaacacgtctttgtgtcacaagggttctttatgaattcgatagatgacgcaaaacatattcataagaagaggttcatctcggtgttcaaaaagataaacactcaagtgtatatatggtcattgagggtgaatgtagtgattttgggatcatttcaaaaggggtggattgaggtgcaaggagtgccttttcatttgtgggttgagaaacatctattgcaaatggttgatgggtgggggaaggttatcgagattgactaccacataataaaactggtcaacctttccaatattcaccagagaatggaggtgagggagaatgttgtgattccagcaaaagtcacacacggtgcttggattttcactgcaacagtagcattgtttggagaaggcaaaattctccaagaggaaaactcttggttgactcaaggaaagaacaagctcacctcattagggcgtggcagtcatcaagggtatgggaggtggagacttgcgaaggaggcttagtaggtggaggtacttggataagaagagtaggagaaggtagtaactattgctttcaacatgggtccatagacaaagcttgaccaggtgatgaaagtacggggattagaataagaaaatgtaaaatcaatactcacaaaatatcattgggacttagaattgtaacaatgtatgcttttttagtatgagtgtctccaagaaagatacacatagtaagcaagaggagagagtttgtcacaattagggtaaattgtgaacaaaggcaagacaaccagatgtatgaggagtgagttgaaaaggagcgagacctagatgtaaaagggaaaaaagaagtctgataattgataatagcaacagacatgcaatttatgagatgataggtggtgtgaagagcattggcttaaaaattatttggtacttgcatgtggaacagtaaagcatagtaaaaaatgaataagtggtgattcttcctcttagccacaccattctgttcagatgtgtgaatgaaagttgtttggtgaataataccacaattaacacaaaatgaactcatgatagcttgtcaatattacattgcattattagatcaaagaactttaatatgttttccaaaaggaaaaaagaacttcattttagaatttagaaacaattctctttttcataagaaatgactgtcacctgagaggaatcataaaaaataaaaaaaaaattacaaaataaagaaattcattcaaacttgtacgttagaatggatcctgaatgtttgtggtagacaatagcaaaggactcaaattgactactttgactatgactttgttgggaaatacaaatatgcttgcctaactaacaagcttcgcattaaaatctaaatgtagagcttaatatggtataactgaacacaacttttgccaaagattgatcccatcggtggaaatgcgattgaagaggcgagatagcaacacacaatactaatgaagaaggttaaccaagatctaaataatacaaccatctttctcatgccctaagctaatcatcttctttgttatgaggtcttgaaaaatgcatgaagtgggaggaaaagtagtggagcagtttaaggctttagcatgcttacttacagaagcaaattaaatggaaatttaggaatgtagagagtagacggtaacgataacaagtatcattaggacatattgtttgagaatagacttcgaagtgtcatcgactaaaacaatttgatgattaacatgtttagattacaggagagatgctttgccaaatatttggaagttaattctagagtcaactcagtcaaggactcaggatggaaagaattgggtctcacatgtactgttatttgacttggctaaagaagcaataaaagattatggaaaagtaactcaccatgttgggatgaactcactaagttgagggagaggtcaaatgttttagtagatggatggcgattatgcaggaaacctaaagaatgtcaatcaagaggcagagtgagatgaaatattatgtgggaaacctaaagaactgatgatgattatgcaagaaacctaaagaatgtcgatcaagagacacatagattatatatatatatatatatatatatatatatatatatattaaatataagaaggataaacatcttcaaagatgtacaaaatatggtagaaagtaacctagaactagaatcacgaaaagtagcccctcataaaaacctgcatatatacaatagaacaataattggacacacaagggggaaggaaatttccaacaaaggaggtcatatgctttgctccttatttggctaattgatttgcaacctggttagttgaacaagaaatccatgagaaagaacaatccaactcatttgcagtatttatgattttgtgcatccagttatcaaacttccttgaacccctttccctattattcactgacgatattacagttgcagaatctccctttacaattagattggatatatatgaagcttttgcctacatcaaactctccaataaagccaaaatctttgtcttaatggccaaccccattttagcatgcttagagaaagctctccataccataccagaatgatctttaatcacacctccaatacctatctatctcagattcaggcttaactattgaatatctgtcaaagttcaaatttactgaacctacttgggggggttaaccaatcaatcattgccttcttcaaattgattgagtagcaagcacccttccaatttagcattaaaagataaaatggaatatccacaaaaggcttggtgactgaggtttatagggaggagaaaaagaaaattgagtcccaaatgtcatccactaatctccatctatcctaaaaaatccttgcacttctctccaaccaaatgaaccaaatcaaagataaagcaaccacttgccaaagaatcttcccttttggaaggcttccaaaggccttaaaggaaattcctaacatccctgctatacctctaggaggaacccaatcaagattagcaatgttgagcaatatgtgccacggcaccaatgccatgggacagtgaagaaatagatgatcggttgattcactacacttcaagcacatcacacaatggtccagattaaaagctttgttagcctcctcaattgaagcaagtcatcggtgttgagagacaaagatcaaatattacgtgggaaacctaaggaatggattattatgcaggaaatgtaaataatgttgagagagaggtcaagtatttccatcaacccaatgatgattgtgcaagaaacctaaagaatgtcaattgtgatcgatcaattgagacctaaacaatgtcaatagaagtatgattgtgcagaaagcctaaagaatgctgatctcagtcaaagaatgtcagtggagtgatgcttgtataggaaacctaaagaatgtcgattgagaacgatgtattgatcacaacctaaaaaatgtcaagagagagagtataaccaaatcattgatgataattatgcattgggaggaagggatagatatataaccagatctttgatgataattatgtgatgggttactgcaagagcaaaccgaatttaggttgttatcaccaggaaggaggaggtgatagatggatagtcagatcattgatgataattatataatgagtcgctgccagctgaagcaaggttgtcagtgctggatgataagatcatactgttttcaattatgtagccattttaatgcaccttctttatggaatctctattttgcaacatcctaatggaacctggacaggggtaggactggagttggtatttggtatttggtattttcttcttcgtgattaaaagaaagtatatagaaacttactctagaaattcactattcaatttcagatagtgtctagttccgcataatgctatgtcatcatgccagaaaacattcatattattatgttaccttatcacaggctagttgaatgtcaaagatagaagagaaatgggaaagttatctgataagaggacttttcctttcacagtaaaaaaaattcctgtatcattcaaacctgaacgcttcctttcttctctccaatgaatctcctactgggagtgacctctccataccatctttgaaaaatctctgactgcagtgttgctgcttccaagaaacaagacattaaagatttcaagtgctcaatactgttgtttcttgtttcaaagtagataccacaagttatcaacataaataagttaagttattacagaatagactaacaaataagaaaacaaggagatgtcttggtagatatggtttggacagtgagtttgtgagccaggcagttgaccaagagagagaaagagatgaaacttcttgaattagataattcattaaacatatttttgcttgcaaaagatgatccagaaacctttcctttgactcatttatagctggaaatttgtatgcatatggaatatggggctctacattcgtcttttcatctggatgggtatggcatttggtcagtctgtccatgtatccgcatttcatgcttgatgaactttttaatgcttcacattaccagaaaggcttttcaaggaatttatctggtccaattatgaaaatctgacttaattaactttttcacctctgtaccttgcttttgatattagaatgtagagtaggcattgaactttgtttcgatgttgcatattggttattgtggctgtagcatctgtttctcttgtcatgggtacttacccctggcataaaccacttgagcttttctctctaaacctattgctcagtctactgtttattatttcctttgacttcaccagttatgggggattcaagtagcatgttcattggttttagttattcaaattggataaacttctaattttctaaagcttggtgtatgagtgaagttgatgttgtcatgattaaactgtttataaggttttttattcttcaggaggtccccaagttaatgaaaacccgggaatcgagaacggagcctaaggtttccattgtttctatgagctactcttttcttccatgttcttgttgtttctgcattccctgatggccgcttttgatgcagctgta

SEQ ID NO: 12661 - DNA, 2228 bp, Vitis vinifera
  Intron number 8 from transcript GSVIVT01008963001 (locus G SVIVG01008963001) derived from phytozome v7.0 (chr-ID chr1 8; pos 3893339 to 3895566 reverse strand)
agcttgctgcctcattggggtaaaatttctcactttatgttacatgggttttggtacaggtatctagtgtgggtatatatctaggtgtctaatccttcatatcttaaattttagatgaagggactagataaaaaaggatattgaatggtgcttggatttgatataatcaaagaaaattttaatcattttattctcaaatttattaaactgcatgataattttcttagttggtgttttttaatattaaatacaagagaatataagcttgtaaataaaattataaacatttttaaacaaaaaataataatacatatatcatcaatttttttttgtctttaaatatgttgaagtattgcatattattgtctcatatatatatatatatatattgttttatttaataaaacatcttcaatatgtatattatcacttgttttattaccttttggagttgtttccaacatttctatagttttgatcaattttgattctaccaataattttttttttctagatttctataaatccaatcattgatattttggcattgtctaatatttttatctttggatagaacaaaatggctaaacaaaagtttcataacctaccaaatgttcaaaagaggttttgtttatttgattttttttagtagagttcagaccatgatttcagtctaagaaaccttttgagttttgcgtttgtcaaactttggtatttatgctatcctggagttgatactattgagatactgaggtttggttaccaattttttttcaccctcgttctataaacaaatagatttattaaaagaaagtggtgtacaaagagaaggatgagaaatcctttatgccatgtttggttccaataaagcactaaggcaagaaaaaaatgttaaaagaatgatttttggtttcactatggaaaatatgaaataaaataaaatataaaaaataataagaaaagaagaaaaatgttaaaagaatgatttttggttacactatggaaaatataattaaaattagtcaaaaaattatgcaattttaaattatttaatctttatatagaagagttaaaataatgaaattagtttgaagtagtatataaaaataatttattgactttaaatctatttgttattttccttcacttcttctttccttatattttttctctttattttctttccctctcattttccttcaaatttcctgggaaccaaacatagccttaaagagagccttgggactagttatacaaagaggcaggtgaataaatatgccctagtatatttgcttgtattcttgaaactcttcccattttgataaatgagaatatttgtgggatcaaataatcataacagcttaaccgcatcaaatatatgaatacagtgtctatagtgaagaataatctaatcttttggtattgtcatacgcccatagttcaatggagctttttgtcattgtttttgattgacaatattttaattccttaatgttttcattgtatgattcttcggaacaaaacttatttaatatttcaaaaaatgttgtagttctcactgatctgatgttccccatgacaatattggaggctgggaaatcaggatatttatccttcattgccagtttaaaggttattgtattatatttctaaatgagcgtagaaatatgatcttagattgcttctctaggggtttcccagcattttcttttacatgaaaaatgaaataggaaggcatataagccatggattcttgatatccaacaagtcagcttccttgtttgtttatgagtttcatcccagattatgttaactttcacacaatttaatgatcttctggtcttttgaaatggtgtataaatcaattttaggatattttggtgggaaaatctgcattttttaaaatattgccattttttctcatacctgaacctgaattcaattggtaagaactcctatgtctaagattattctgaaatgcatttagcgcattttatgatcataattcttgatgtggcttttcagattgatctgaaatagttatgtgggagtgttttatattgtttttaaatatctttgtatatagtattacatggtccacaaatacagttttttggtttttttaataggtatgatccacaagtacagttctgggccatatttgaaaatttgtatgcttgcctttaattacactaattagtaatatgtaatggttggaaaacaggtac

SEQ ID NO: 12662 - DNA, 9402 bp, Vitis vinifera
  Intron number 1 from transcript GSVIVT01029226001 (locus G SVIVG01029226001) derived from phytozome v7.0 (chr-ID chr1 1; pos 18306165 to 18315566)
caggtcttgaagccaaaatataggtggaaatttcgaatcaaggaaatttcggcaaaaatagaggaatatcggctaccatccataaaatcattttccctttatttggctggtcaaatgcccctccctactccccttggtcaaaccttaaaaattggtttgcactttgagaagggggaatcaaaacccaagacaaaaagttcacattaattttggcaaccactgcatgcgccaaattcacacataataataagaatgtataaatgtatatatttaattccattataaaaataaagtattaaaataatattttaataaattaattaattttaattattttatttttaaattttatttaattgattaccaaaaatataaaagttagtgacaagttttttttttggtatatcatttatatgataattaaatataaaaatgtaaatattaaaaaacaaatatatatattataatttattttatatcattgaatacattaaatagatcatagttttaatactaaatatattttcaagttgtacatattattatcaaatgttataatattgttgttaaataatatttaatgtaacttaataaatgaatatacgcttacaaaattcatatttcttattgattcatatgatattattgttaaatatgattaattatatcatacatatatcaatttcttcaacaaaataatttcaaaatgtctattattacttcttttatcatttcttaaagtttttccctaacatttccatgagttttgatcaatttctgtctcatcgatttgttgttgatgaatctgtgtgatgaataatcaaaccgtagtcatcagaggtctcgtaaacccatgattttccatttgatgactttaccttggaatgatggaagctaaagctctctcctttctctctagatgatggaaaacagttgaaagtttgaaaaccttatctcctaagaggatatttttaaggttccccactaggcttaagtgacttaagcccattaagggtttaggtcacttaatccttaatgggcttaagttacttaatctaatccaaaaatggtctaattaattaattaaccaaacaatgttatctaattataattaattagtacaattcggagttgttgtcactaacccatgtgcaacatcatgaaattgtcaaaatgcccttatgacataagcaaaataagagctaatctaacactcctaaatcgtgtcatcaaagtatatgagctcaaatggagaccattggtacccataagatagtattgactccctcaaaatctaattctgaagttgattcaacatcccactatagagaaacaactacaccctactactctttataaataacaacaagacactaagtgtttggatctatgacctgctaatcattgcatacaatctccctatgaattggtatatgcagtctaacaagatgaaaactatcagtctctcaagattacctctattatccttgagttacaaatcttcatattgtctgatcaactaacatattttagctctctacgagcttatatcaaatttcacttaaggaactactatgatcatagtttatatgaatatacttctttaggatcacccaaagggacattctgtctcaatattatgagatatcatggtgcctttcgtaaagaatacctattgctattaacttccatcaatagtgactcagtttatagggaatatatagttattttcgaatcccactcataggtcaaagtcattgctaactttagtgtaagctcattattctctcaaggttgaaagataatacaacatagtaacttggtgaagtcatgaccacttgataaccttatatcatgactcactataagtcttgtccatatgcaaccatacacattagtgcacttatcataggaaactcatatcgatggtcaaaaccagccatccctccaattaggaggtagtgcactataatctcttgtgggttgcctaggtccatgaagaagttgtgaaaaagtcatccacttacaaggaacctgtgatttagatcttttgtataactcttaatacacccaagtcatgtacaatgcaaaaggtgtaagctaaaattcttacacaatataatatatggaatgaagatagataaaagtgaaacaagaattttattaataaataataaattaaatcaagtgatgtttttaaaggctctaccacaacaacaagaagttacaagaactcagcttcacgacctattatccactatatgcagactccctataaattggtatttataatataacaatgtgaatgttatgagtctctcgtgataacctctacaatcttgagcctcaaattttcctattatatgattcattgacatactttaattctccaagaacatatgtcaagtctaattaaggaattactacggtcattggtattttttatcacatgtcattcggatcacctaagggcgtggacatgttgtctcaaaccccattgtgtctatcttgagtatacctgttaccactagcctccatcaatagtaacctaatccatagggaatatttgatcaccttagggtctcatttataaatcaaagtcattgaaggctttaggacaaactcggtattctcttgaggttgagagcttatatagtatagtagttttgtgagatcatgacaacctgatagtcaatgtcatgacttgtcatagttcatgtctaatgtgtattcctacacagtagtgcactcactatgggaaactcatcctgatgaccaagacaaatcatctctctaattagaaggtagtataacctcaaatggattgtctaagtctataaaccaattatgaacaattcatctgtttgcaaggaacccatgacttgcatatttcatacaactcttaatgcattcaggtcatatacaatacaagagatgttgggtctaaatgctgagaaagtataatgcttaaaaaagattagataaaattaggaaattgaaattttattaatatataataaattcaattatttatatcatatcatgcttttaagggttctatcctaacaattctagcattaatgctaagtacaaatcccttgcatctacaatagttgagttaacatggattacatccttacatcatgacattggcatccacttaactcaccctcttcaactgcattgtgacaacatgaatgctctatatcttgcaaagaaccttgttttccactcttgcatagaacacattgaaatcgattactacatctaagaaaaagtagtagttggcttctttcaaatatggcatatggcatcttcctatcgagttacaaatgttcttactaaggcagtcatgctagttattcacaaattttcgttataagttcaaagttcataatatctcacttgccaacataagggggcatgctaagggaaataattcaaaaagtaaattaatagctagaaatttcttctctaacaaaattattgcaaatcaagggttgtcaacaattaaggaatgcgagaataatgcaaaagattacaccaatagttagcaacaaattcctctcaaacacctcgtcaactaatattatataatgccttgtcaactaatattatatattatatatcacacaaccatttatcatattacataaaagagttcttcattttttttaaagcttttagaatggtcaaacgcaaacatgacctattcattaaatagatagcaagggtgatacaaacataattatattgaaccaaacacactaaaacttgtgttgttttcgagtctgattgtcacgtcgtatatcatgtcaaaattgtcacccccaatattatgttaccaattcaacatataagtttaaaacattagacaatggatataatactgaatcaacctattaaagttaaaaacattcatataattcattaaaataccatatgtgcattttgcccatcatgtaacatgtgaaagaagttaagaagtagagctagcattatgtaatgagaaattgagcattagtgtaatacatggaagagggtttattatcccttttttataaatgaatacaaagagagcgaaccaaagcaaaaaagggccttcttcaatgttcttcagggactgaatagaataggaaaaagctgcatttcctctcactttcacgtacgcccatgtctacatatatactctctacaattaaacagttccattaaattatcccggccctgaaaagcataaacaaagttaaattcaaccaagttcaagtttgaagggtagtttacacaaggaaatcccggtagagtactgttggatatagttgagctaactaataataactgttgagaaaagcaagagaaatatagctaataaacttgtggaaatacaaatttgtagcatgaatgcaccatatgtcaatttgtaagaataagatgggtggaaggctgggagcaccttacttaccttactttcgatattgttttgactccaaggaaaaagagaaagttggttgactcgactcacgtggagatttcatttcatttttttgggaaaatcacgtgctctcttctcaagtgacctccggacttctcaaagatagttgtgggatgaacttgaaattaaaggtccttattgacatctcatgcatgttaatttcttttggggcttactttcctcatatatgataattaagtctcacttcatggtgtttccagccttgtaagttggttgcaaaaacttcgaattaattcaagagtcgggttgacagtcaatcgatccaagtccaatgcaatcaaatttgactcgatttccaactcggctcattgaatcaattcaacttgagattctataagatcaaattaaaattaagtgaggtttaaaatatcagtcaacatatagattagttggattagatgagtaaacaagtcatgatacaaggataggcatgctcggttgaactcaaaatgtgacaaaaatttaataaggtgcatctaatttgaactctttaatccttcatttaagttgacccttagagagggaaaaaagaaataaatgtcaacccacaataatcacatgcaattttgaaaaataaaaaataaaaagaaataaaggtagcgatatactgatgtgaaccatttttcaaggtctccccacaacttcctttgttttgagatagaaatggtaggtttcagattccatttccacactcccatctccaaccaactttctccatctctagaaacaccatgttgacagaaagttactttccacattcatcttacactgaacaacttcaaagtttgtatattctgctactacatcaagtcatagaggtaggcttaggtggtgtttatttttttacttaattctaaatagaaccttaatacttaatagtattaaatattaggttgtttgtttttgtagtattttatttctattaagtattaaaaagtaaaaaaaaccattgtgttattttttctatttagaaaaaaacacatattttagctttttctatttagtaaaaagtttataataagttatgaaaaagtaaaaaaacaaacaacctaaattctaaaactaaatgattttcagcaaaaagtaaaaaaaacaaacaccactttagtctttaatattcctttgattcaatttgtgaatctatatcatataaatagtgacatgtcttgaaagtttaaggcaaatttttggaattaaactaactgcttggtataagaatttagactaaaaaaattcctaaaaagtgtgaaaattattctttgtttattaaagtcatcattaagctaagtattcagaaaaatgagagtttaatatggagtatgcatccaaatggaagcatataatagaattattattttaaaatgtatgaaaaaaaacacagaaattaaactcgactatttgacaatgttttcaaaaccggtttttgagaataattcttaaaaatagagttttcaattgttttcaagaacaaaattctatttggaaattcaaatatgaaaaactgtttttttttttagcttaattctttatgaaggtactttacacgcttatatacaaagtaaaagtttgtaaagtatcaattgtttaaattgttgctcaacatgctctaataaaagaagtctaaaaacaacttgttttcgaaacaaattataaaaaagacaaacaaacaattttttttatatatatatttttatatatatttttatctatgtgatcatatttttaaatctcacactaataatttcataaataaaaaaaataaaaaataaaataaaaactaaaaggttgtgataatttatccttaatacttcacatttatactagtgataatttttttttatagcatttaataaaagtagataaatctaaatatgaaaccaaaaataaaccatgtttatagtaaatagaagtatgataaaaaatttaaattaaaaatgaactttttattataaaaaaaatattattatggtaattatcctcttatcactagtttttatgttgttttattgcataatttaacatatatctacatgcatttggacatagctgattgtagaggcacgcataaaaaccattcaaaacatcaagttttccaattaaaatctatttcattgttcaaggaataagcatgaacctcaaactagggaataaacatgcctcacacctctcaatattaacgtgcatcctacaatattagtcttaagacacacaccaccaactatgctaaaatctttagttctttaatgaaaaaacaaatctaaatagaaagtagcacggttgatggtagtagtgtccacaatccattcctccctggtcacctacatgcatatgcttatcaactaaaaagagagcctcgatatgtagcacttagatttttgttaccatccttatgtattaggatatacttagttggaattttttgtttaatcttaagggttggcttaattttgggtagatcgatgttggatatataattttattttgtaaactattgagatgtatatgccattttctttttctttttttccttttttttttttggttatggttcgatggtatgtacatgttgattttgaagtattgagttttggtttattatttgatcatgaatgtggtgactttggattgagttagatttgaatagattgcttatttgtattgaggttgatttgttatatatggtattgaggttgatttttatattaaggaaattagggtgaatgccatgatgtatggtagagatgcatggtccttcctacaactagttgaatatcttggattacccaatgttggttgtgggagatgcagtccaaataaattgataaaagttttgtgttatgctagggttaaacttgtgcctctaacaagatccgatacaatcttatggttaattagctagccaagattttaactttattttatccttcataacttttttattacatttcaaggttttcttcctctttttttttttttttttctttttttcggtttgatttatgtccaaagtcatataaacagaaactaataacctaatatcaagtaaaaacttcaccttcccaaaaggttacttagcttaataaagagaaatacatttttttccaaacttactttacctttttccaatgaaaataggattgaaaatgttctagtattttcccttgtatttttcttattactttttcttacacaatttttgttgacatctaaaccgaaaataattttccttaccttttttttttcttgatactttgcaaaaacctgacatcacctaaaaattaatactattttctatttaaaaaaatagaaagtgtataaaaaatacaccctatattttaaaattttttattcttggtataaaagagaaataaaatagaaacagtttagttgaagatttttattttgtcatttttctctttttttttttttttttttttttgtccaaagattcatgtgtggggggcttccctccacgtgtccttcccaaactcaagaccctttggctgaccagggcaaacatgtaacacatctgggatcactccgtctggaccaaaataagcttcatctggcatcagaagtgagaagctttccttcttccacaatgccaaacaaaatggacagactaagtcgactgacctttcaaacaagctcacaatgctagatagaatggacaaaccaagccggctggacctttcaaacgggcaaatcaattcagtcaagtccttaggatttctggcatgtgtagtcaaccacacctgacgtctgagtgccggcctagacacctgatgtctgagcatcgaactagacacctaatgtctgagcgacagcctagacacgtgatgtctaagcggcggactagacaccatttacacccaaaagtcaatgtcaaataattgttacacacaatctcagacattggaaaggtaaatggacaatcagatagacgatatgagattttgacacaacagtcagcaaatggcaccagtcagcagcccttgcttgatgtgattgcccaatccacgtaacaatgacaacattgacagtcctcacaatcatcattacaagaaaggttagaatgcataaccagcgctataatgacgatgtcatcagctctatataaacccctcaagaagtacaaacaaggtacacacactcattctctcccacaaaaatagttatagttatcctaatttgacttaagttttggaggggcgtgcttggaccacctgtccggacatccttctatgcggggaaaaagttcgtctgactccagtgaagctagaaggactcctcaagaagcacgaataagggaagaaatccgtctgactccaatgaagctgaacggacctgaatctagttggcttaacaccaacaccgtggttatttccaataaagcaaaaaagacagtgttagataaatttcttaagtgtaagtgaataaaaacaatttcatgtggaccatttgacaactacacattaattgcacccctcttgcatctgatgcatgtagggattgaatacgtacaatcccctcctagctaactaatctagtcaataatttgatatttctttatgattgattcaataatgtaaagaaatatttttagaatgtggggcttagctttgtgaaccttgtcgagctttatcataacaaacttggctttaccgccaaccacgaagaggataacgaaaactatgtttatggttaatataaaactatacatgcattctactacatagttgattgatattgatgtacataggacgtactttggctttggtctttagcttaccacaatggcaacaactgaaaatgatcacctatgttcttccataaatttgctttttttttttttcttcttcttttggttttgtcaccaagaactacca

SEQ ID NO: 12663 - DNA, 1157 bp, Vitis vinifera
  Intron number 21 from transcript GSVIVT01036703001 (locus GSVIVG01036703001) derived from phytozome v7.0 (chr-ID chr 19; pos 23610607 to 23611763)
tttctttgcaggcagatagaagagcagtaaatcaggtatatttaacgtatgaaccttttacatcttcatgccattattatttcagtgtcttaaattggatgctacaggctgtgatggactttggggaacttcctgccaccctgaacctcaaagcccttttgggccttggaagaaaaaggggggccttattgcttgtgtaatgcagatgtccctatcaatgggttaacctgcaaaagtcctatctaacaactttgttttttgtttttgttgtttgtttgattaaaaaaaaatcaaagtttagtataataatatgataaaatagtaaaatacgaaatcaaaattttgtcaatgtggtttgacaaaataaactattgctcttcaacttgaagatgtggtagttctcatcccttattccacttttgagttttatttatagaagacatctttcatgatttatgctgctctttgactaattttaccgcagaattttctaaaatttcttagtagttcttgaactgggtgctcttttggttttctaacatgatgttaaattttcttattaaaattttttgatgcaatgttttattcttttaattttaattgaccttttgcataaacaattattaaaactattgaaataatatttgatgaaatttttacctttttatctttttatctaaaaagaaaaaaaaaaaaaccttcctgaattattaaagttactaaaacttatgtttgtaacattttatttttgttatttttattggttaaaatggtgttacggaagctcttccttaccaaaatgtttttctgttgctttttaatttgtgtgttatcatgcatacagtaaacaatagccatcaatatttaagtttatatatttaaaagttataacgtaaatgagaaaaatattttatcataatatcataagaaattgcccgacctctcacaaacaattttctggctccgctactgttcatggcattataagaaccaatttgtaatttacagtgaactgttcaaatctgtgttgtggaagatcacatgcttttcaatttgtctcctttattttcactacatagcagctgacttctttgtttttactttttgtctccctaatgctagagaagaagggttcatttgactctagagcttccctg

SEQ ID NO: 12664 - DNA, 1693 bp, Vitis vinifera
  Intron number 5 from transcript GSVIVT01012193001 (locus G SVIVG01012193001) derived from phytozome v7.0 (chr-ID chr1 ; pos 660832 to 662524)
ctgtagccaaggtgaggtcaccccagggcatgctggttagcctaatttaaagatattttactggatttgatgtagcatttataatactttatgctgattttcttttccactgaatgatatttaatatactccgggttcccttctcatatctgtcatatttcttggttgctttttcttcctccgacactgcagagaaggtgaaaataggctttccttgtactgtggacccagaaattgatttgggtgtgcttggtcctttgattctcttaagttagatctcttcttttatctgtgagaggcacaatactgtagcttaaagctctccatttgagatgagctctctgacaaggtgagctaaacttctaaatctcccaaaattaactaatcaatgtgaacttaggacaaatggaatgaaattgtttcacagtgatataaaagtagtggcctgcacaaatatatgcatgtgtatgtgtctagatgaatgaatatatatgaatagacatatatatgataatttgtgccatttgaaaagacaaatttatagttctatgaaagaagaaaaggaagaaaaggaagaaggaaaaaaggacaacaagtgcttaatatctgctgttcaaaactaagaccagaatttgagttgtacaaagggtctaagattttcccttaggttgaattttaggaattctccaaatggatctaatccatggaactttatgaaagttcaaatccatactagtgtggataaatttgtggaattgatttctagaactttaggccttcattccatcattgcctttagatatgggcttcagatttaggtcacaattcattgatcaattcattggattccataattgggaaatggtgaggtagatgccttagctaaatggggagttctacttcaagttttggagattatatgcctcctttgtcatggctttgttcctcccttctaagaaatttgggcttctatttgtctgttccggactcttatgtttttctttctttcccttgtattcttcttttttaccttttctttgtatacatgaggttccatgcaggcaaaaggagaaaattacaatgttagggatttgaattctaggtaggatgattgatgcccaacaacttctaccatctccagcaacaatggttttctcctctagaaacatgatattaaagtttagaactttcttatccttgaagaagttcagaacttcatttgacctctcttcaatattaaattgggtggacacaagataaattcatctcttttcattgttcagattttgtaattctgtccatatccatagtagatcacccaccaaagttgaacaccctaacttcttttgcccatcttcatcacataatttgttattcttcttaacccttcatgtattttagattaagcatctatttatttacttgcatgtagccttatcatttgcttccagttccatttaatataggtcttagaaatatttcaaaagatatgctaatccaccccttttatctgagtgttgcaattagcatctgcttatgtccttgaaaaactctaacaatcaagagcacttaaattctcattctggttgaacacttgttgggaacttgttttgctattttttcctgacagaagttatacgtcctaactgttcatcttttgtttattgtactttccatcagccagattgcttgg

SEQ ID NO: 12665 - DNA, 2458 bp, Vitis vinifera
  Intron number 1 from transcript GSVIVT01035031001 (locus G SVIVG01035031001) derived from phytozome v7.0 (chr-ID chr5 ; pos 1039116 to 1041573)
ctctttctaagtattccatcggcgccggcagtacggtacttcggtttctcacatctttaacattttcattcttctgcttggtagatgagaaaatgaaagaaaagataagaaaatttgaaaatcttttgttggttgcagtcttgaaagcggcgtgtttttgtccctttcttaagtgaatctaacccttcctttttttctttccctctgaaaataggcggtgagtttaatttgattcgtttatttaattaccacgttaattaaatcttgtgctgattgaatataaatcaagttcgttggcatgaatttagtcttttttttattttttatttttggttgtagatctgattttttattctgttttttgaaatatagaagtaaaagtaatttttaatcacttgtgtagtattcgtcgaaaatcaacatgattgttgtggttttgaatcatttagtctcaggtgttatttattcaaaagttgtggaaagtcttaaaaaagtttattgatattttggttttgaattttcattattactttttccttttaagagttgtttattctagtttcagacaagaggttatgttatcatgctcaatatcattattcctactattgtggctctattttgggttagttgattaaaaaattcgaaatttgacctgggttagttgatgttgtctgctaggttttccttttagattgaaaaaccataaattgagtatgttggagtataaaaaagattaccgaatctcgtccaaatattggggttgagttgttcacactaacctacctaagttgtaaggttaggtgttgttgttgttgcttttttttttataattttttattaaaagtaatttggttttattgaactactaattttcctaaaaagctgaaggacttagatctaatatgcatattatactcgttaacaccttttctcgtgtgtgcagcccatacccacatgtggagaggcatagacagaaaaagggagagagaccaacaattgcaaataaccctttttgggttttcgaacatgtaaatggggaaacaaacatacaaattgtaaagagacaacttgaatgcatgacttctggcaaaatatcatgttgaacaattaatttttctaaaaggctaaaatactttgttttttttacttatttcttaaattttagatcgaatagaaaaaaccaaaatatttaattttctttttaatgcaaaaactaacctattagtttttctctacttgttaatacttaatagaaattaaatatcgaaaaaactaataacttaatatttaatactattaaacactattttatcttaagttcgatttagaattaaataagaaaacaagtaccaccttaatttaatccacttatcatacagttattctgaaatatttaatactttatctacttatttttattttttcaatggaaaaaccaataaaaatattaattataaatacacaaaataaataatacatatgtttattttttttaatgaaagggaaaactaataaattagtaaatccaaaagacggtgatggagataatatttatatatgaataataactgttttatacaaataatagttattaataagctttgtgttatggttataataattttgttattcttgacaaattatattacaaaaaaatagttataatcgtagtataatatattattttgttattcccattataagaagttggattattctttaataagtttttcctcaactatgaaaagattataatcatttttgctctctgcctgaaatttttttagtacttttactatttgcttattaaaatagctaaagggcaataagttgtcttcatctccctctatgtccaaattcactggcaatattattacaagtataagagcaggagtaatatggctgcattttagaaaaaaactgctgaagatttttacctggcttgtttggataatttagcggacaggtggttctgcttgtttccctcccaaataccatattcttttcggatttggcatcatttagggcttataatccagttcagtttcttgagttacttcctgaattagtttccttttgggaaattattctcattgcttggttgtctggactgcttgaaacttcttgttcacctgactcgtgaaatcaaagagtaatgcaattgcctttgtcattgtgtgtgtactttgattttgggattctcatccctgctcctttcatcgtattcatcattgtaaaaagcatggaattttctaacagtgttccactggacctcatgaggttttataatgatggccagaattatgaatcgttgatcattctggtttccttccatcctaactttgtatctgataaattgcctctatgttggattggagctagttggtggctgaatcttagtgttctgattatactgccaggtagcaataattgcaccaaacatccctgccaagta

SEQ ID NO: 12666 - DNA, 11407 bp, Vitis vinifera
  Intron number 4 from transcript GSVIVT01020406001 (locus G SVIVG01020406001) derived from phytozome v7.0 (chr-ID chr1 9; pos 19951146 to 19962552 reverse strand)
tcccaacagacactaagcagtggcagacgcctccagtaatatctcctatcaaatcaatgactactgaacctctttgtctgcagttatatttggaacatccaagttcatctgaacccaactcttgaaatggagatcctatgttttcttgatgtagaataaagttgtttacatacaaatagaaatttgaaaaatggcccctatgctaatttagtctccatgtccaaaattgaatctagaaatgcatgtggtgtgggctctcattcattggaacgggtactgaggaacaagaacccacaaaagccaatgttcaaagaacataatcctgaaatcaaagatcaaaataattgattacaaataccccagattgatttatgataagtaaacatgaagatgtttttgacttgttggttgagaagagcaaggaacaagaagaaaaaaaaaattgaaaaaaaagaaaaaaaaaaaagaaaaaaagggaagcccaaaacaaaacctctttgccttcttacaaatgaggttttgtcatttcaatattttttttttgacagatgggacatgatgagagggaaaatcagtgatgttttggatttttagattcattagtgtaatattttcaaatatagacaaggatgttttttttttattattaaattatacatttattagatgggtggggtttgagttaggtattgtaaaagactccacattgatgaatccatcccattgccgactctaagcttgctttctttattgggctctgttctaggctatctttttttagtggatagtttcatagaactaatcctcaatcacatcactatgttttcagttttcattgattctttaatcaaaagatttccgagtgcaacatgtatagtcttaccaaaaggggaaaaaaaaattcaaaatcaaaatgagtggttcttgaatggatttttttaaccaagagggtgtttgaaaaatggtcattctatctctgtggtgcaaaaaagtggtagtttttcggttggatatggaaaagtggtggtcaatcagattaaccattaccatatagtaaaaaataaaaatagtttcaattgtttgtatcttgattaggagcccgtttggcagtagtaattttaggaagcagttttaactttctaatatttaaatttttttattatttaagtattacaaagactaaaaatattttctaaaattaatgtcaaaagcactctaaaagtgcgtttggtagtgattctgaaaagtgtttctagtcttttataatacttgaaaatttttatttttcaagtattagaaagactagaaatacttctcataatactgtcaaacacactctaagtttcatttatttgaatataactcttgtttggttgcacttacatctcatttgtttgtattataatatcggtccaaagggtttaaactttgagtttcgtatctagaggatgtttggtaaatcaatttaatgaattaatataatttaatagtttaatttaagtcattaagtaaattaagcatacttaataaaataatttaatatcttaactttaaaataaaaaaataactttaagtattaagttaaaataattatcttatttttaatttaaaatcttttttaccttatttacttatgtttaatgagagtatattttacaactatgatattatgttcataaaaagtaaatattttttttagtcatcttatgtatctacaatactttaaatatgaatatttaataaataaatttgttgcttaagattaataaaaatataattactagtttaaattaataagggtggatatgtcaattgaatggttaagaataaatttttatttaactttaccaagcaactttaatacttaaaataaaaaataagtaataagttttaagtgaattaagggtgttcgataaaacttaataattattacttaatgactcaagttgattttaaattaaattatatttaagttgtggatttaaaacttattacttattttttactttaagtattaaggtttttttttataaaattaacttaaaacttattctaaatcattaaattcatatatttatcttcataaattataattaagcaaaagaggtcaagtaatagaggaggtcgtggagtaacaaagaaaattgtaaaggtaattagggtaagaaaatgaaaatatgaacttaagaataagttaattgtttttacttattatttaaagttgtttatttatttattttaagtcatattacttattatgtaaagttattttttattttaagtcatattattaagttattttaccaaacatacttaacttatttaatgaattaaattaagttattaaattattaagttagtttaacaaacacctacataataacaatacaacttaaaatcaacttctatcattaagtagaaaatattaaattttaccaaatcctcatttattccttctttttcttttttcttttaatctattttcctctctcatgattttcttcaaactttttaagattcaaaccgactatgagtgacaaagttttttagacatatcttaataaaagtataataaattttatttacttcaataaacaaattatcattttcacttaggaaaagacttaaacaccctcttctttgtctaccatcacaataattgcaattttgttttccttcatacacatttgatcatgtgttacatcacaatgcccataatgtatgcacccaaattaaataaatgtcacacctacttaataacttaaatcaatttattatatcgctttaagttattaagttagtttatcaaacacatacttaataacaatttaacttaaaatcaatttatgtcattaagtagaaaatattaagttttactaaaccctcatttaatttttatttttctgttatcttttaatctatttttctctcatgattttcatcaaactttttaagagtcaaaccgaccataagtgacataaagatttttagacgcatctaataaaagtataataaatttgattcgcttaaataaaaaaaaaaaaatcatttgtcacttatgaaaagacttgaacactctcttctttgtttaccatcacaataattacatttttttttttccttcatacacatttgatcatatgttacatcacaatgcccataatgtatgcatccaaattaaatgtcacacctacttaataacttaaattaatttattaagtcacttttaagttattaagttagtttaccaaacacatatttgataacaatttaacttaaaatcaacttatatcattaagcagaaaatattaagttttactaaaccctcatttattttttatttttctgttatcttttaatctattttttctctcatgattttcatcaaactttttaagagtcaaaccgaccatgagtgacataaagatttttagacgcatctaataaaaatataataaatttgattcgcttaaatgaataaaatatttatcatttgtcacttatgaaaagacttaaacactctcttctttgtttaccatcacaataattacatttttttttccttgatacacatttgatcatatgttacatcaaatgcccataatgtatgcacccaaattaaataaatgtcacacctaccaaattccacatgcattacgtgtcccattacctttagcatcttatctatgctcctactttggtttcaaatctcaaataagtcaaaattagactatgattcaataatttaataattcaataattgagagcccaagtcttctaattaattatcataaaactttcaaaatatccatcacattcttgatttgtagtattagattgaggggaggtggaggtcaaataaagctatgattatgttaataataagtaaatgaattgatttcatcctttttaggcttaaaggaaaaacattaaaaaaaaaatttaaatgaagaaaaaccgtcaagatggcaataatttggttgcccacttgaaaaacacatcaaacatgtgaaatacaagtggggttgtgtttggtttcacacattacatattgtgaaaatgacgttctccaaacttcataaacatgaattgtgttttctttccatgatttgtctttggcttaggtccaaatttgattgtctatcaatcatgtgggtgacatgagaatagggttgaaggctagccctctatggattaaatttatttaaatcaaaatcaggtgtgtttggaaagtagagatggaaatgaaaattagatggaaagttattcaaattactacatgtaataaatgaatcaaaatcttaaaaagagtaagggtttgtttggtaattgcttttaaaaatagttttttattttttatttttaaaaaaatacgtttgacaattagaaaacaattttttttttttaagaataaaaaatatggtgttttcagaaaacatttttttagttattttcatttgttctttaaatgctattttaaaaaataattatacaaatatagagaattattaaatatatatatataaattatttttaaaacatattttaaaatatagaaacttaaaaaaaatatatggttctcaaagacatttatttgatagataatcaaaaaataattttcaaaaattgttctaaaaaaccacttttaaaaacaattactaaacattgcataagttttgaattccacgggaatgaagtttcgattcatattcttgttatattaactaatctacatataataataaatgagaaataaaatgaacttactttttgcttatccaatttcaatactccaaacactcccttatataaattgtaagttgggaaaaagcaagaaataaaaaataaaaaatattttttatttgaaaaaagaggttatttttggaatctattatctaagaatattaattatatttcctttttaaggataaatgcaatgataatattaactaaaacattgagaagataaggttatctttatcatttgatatttgaaaaaggggaacaaaaaacaaatttgtatgaattgatagttttggcctttagctcactaaatataaattattatcaaatgaatttagattataaaaagtatcaagcccaataatataattatatcatatatttttaacatatagtcaattttcgatccttttatgaaaaagaaaaatatctctttttatttttcttaaaaaaaaatataaaataaatttatatttgaaattatttaaaaagttattcactttcaagccctagaaaattttcattaaccccaaacccatttttcatttcatattttcttgtccacattttttttaaaccatgaattagcttatatcatgaccaattgttttctatgccctaatatatgacaaagataaaagaaatctaagagtatatttgacagtaattttggaaagtgtttctaattttttaatacttgaaagataaaaaattttaagtattaaaaaaactagaaatacttcataaaatcattatcaaacgtactttaaatggacatagaaaaaaaatatgttttcatatattcatataaaaataattacaaaatatgaacattctaaaaataattcaagtttcatgtacacatagattaaaggtaatatttaagatgattaaaggtagtacctatatcatttaatgatagtacctgaatggttaaaggtagtacatttgataaaaaagtacatgaaatgttaattatttttagataattgtttaaaatttgtatttttataaacttaggttcttattttataattttttttatatgagtatataaaaaaacccctatcattcctatttgatttctttacactaagagcctgtttggtagtgattctagtggaagtgtttttatttgaagtgttttctactatagtgtttatgtgaaaaacacttttatgataatcagaaaaaatgattctaaagtgtttttgataatatattgtataaatataaaaacacttttaatattaataaattaccaaaaaggacatacaattttaattaaaaaaaatggtatgataaacaaaaaaactttttattaatgaaaaaacatctaaatcactaaaaaaataacattgaataaaagataattttaaaattaaaacaatatatacctattaatttctaaaaaaaaaaaaagacttttctaattaaaaataataatttttttatcactatactaaaattttaaaaaatatttacaaaaaacatctaaatcaataaaaaaaaaaacattgaataaaagataattttaaaagtaaaacaatatatgaccacctattaatttctaaaaaaaaaaagatttttctaattaaaaataataataaaggagagagatatgaacgaaagggaagaaagatattgggaatcactggggggcatttttggaatatttcaaaaaaattgaagtgttttttttaaaaaaacacctgtcaagtgattctctaaaaatcacttcaagtgtttttccagattttcaaaagtgttttttaaaatttaccaaacactttattttcatcccaaaaacacttaaaaatgtttttaagggtagaaacacttttaaaaatcactgccaaacgggctctaaatatatggtaaaaataaaataaatttaattggatattaagaaaaaattatataaatataggttgtttccttgtcactaaatttattaaaagagtattttgcattgcatatttaaggtatatcttgaccaagtagaaaggtaatcatttattaattagaagtaatttgttcacatttgagaaatgctttaatacccatttaaaaaggattagaagtgctaaccaatattgaaatatttttatttataaaaattatgtatttaataagattttaaaaatcatttcaaaaaactttaaaaatcatttaaagcggtagttgaatttgtattttataagttataaaagtattttttttagagcataatgacttattcttatccgtgtaaatattgtttattttaaacaaaaacttaatcgaatctaaaacatgactataactcaacttaataatttaaagtaacttaataacttaatttaagtcattaaatatgtttggtaaaataacttaatgatatgacttaaaattaaaaacaactttaaatgataagtaaaaacaattaatttattattaagtctacatcttcattttatctttttaccctcatttgccctatttacctccacgatattattgattattccataatctttattgttacttgacctcatttctcctgattataatttatgaggacaaatatattactttgatgatttaaaataagttttaagttaattttatcaaacatttataatacttaaaataagaattaaataataaattttaagtcagtaatttaagtaaaatttaacttaaattcaacttaagtcattaaataataaatattaatatcattactctatgtacatatattgtcaagaatttggtgtgggtactttggaatagcctttattatattagagagatggtttggtatagatattgaaacaattgttaccaaatccaattactaaaaaaaaggaaatactttgccttcacatatattagtaaaatacatttatccatacaaagatatgatatggtaaaggatggaaaagctaaaagatgaaggaagaatgtagaagacagagtgattggacctacacaccctgtcaatgtgattgctgtttgtgaacaaagtctcaacctaacagtcaaaatatgggcagagagagagacctacaaatcaaaagctgccctcccttataagtgtcctccctacaagtaaggtatgtttccaatacaagaaataatgatagtgaatgggacttccacattaactagtcacacccactttcaatatccccttcccaataatttgaaaaaaaagataaaaaaaggacacacagaagtacccaagtgttgtttgcttcattttggcttttgctgtagtgtggtgtggagaacctcattcattctctcaccatcactccccctttgggaatctcattcatcccccccacatttctataaacctactttttactatgcctacttcgctcttctttctcaaagattctttgttttttttttttcttctctattttcatttcttttattcgtttcaaatgtgatctagttacttcccaacatgattaaatcgctattaaatgataaatactgttaaatatactaaaaacccgagaaattacctctcgatataacatcgtttgtggtataaaaatgatcaaaaaataaaaattagagtaaaacctcattcattatctcaccatctctctcttgggaatctcatacttttgaacatgtcagactcatgcatctgactgatgaaagggggattctccgtttatgtaactacataaaaaaggggagattccccgtttctgtaagtggaggaaaaagagggcagaaatcaccttgtgtacattgaaaaatatgcaatcaactttaagttgaatgaaagggaaaagaggataaagaaaagcccccccacaagtcaaggtgccttcacttgctcataaaagaggggaagcacaaagacacatgatcctccccccatctccatccatccatctacctctttctttcttttcttttttcttttttcttttttttacccaatttaatactatttttatgctttttttattgactctaaccacggatttagtgccttttccacattaattaatccataatgttagatgggttgtgatccatttcctcctcttttttttgtgtgctttactttgtctgggatcttttgatttgggtggtgggtaaaccaaagtgtgtttgatgggagcaataatagagctatgaaaaaaaaataataataataataaagaaggaaagagatgaaagtgaaagatgatgagtagtgtgtgaatagagaatccatctccccacctttcacctaccctcccttttatcctcttcctcatcatgcttctctttctttctttctttctttacttcaatgaatttcttctaaaatttttatttactaaatataaaatactactaaatttatgaaaaaaaaacaattaaatttaaaattaatatttttccacatgttattttaatttatttaaaattttaaaataaatctctatggtaaattaaactagaattttggatttttaattttttttcttttttataatattttttagtaaattttaaagggtgttttttttttatcaatttattttcaaattttaagttgtttatttttttcactttttcatgatttattataaaaactaaaatatatgactttttctaaataaaaaaagtaacatgttagggtcgtttggtaactattttccaaaataattttatgctctccagaataaaaaaccaaaaaaacatatttggtaattaaaaactgtttatgttttatgatcttaagaataaaaaataaagtgtttttaaaaaatatcttttaattgttttatgttattttgacttatttttaaggattattttaaaaaataattattacatataaaaattatttttaaaaataggttaaaatattttaagttttcaaacatatttctattttataaaacatcataaaataattttttaaaattattctaaaaaactttttgaaaacagttttcaaacaaaccacttatgtttttttttacttttcaatacttaataaaaataagatattacaaaaataaacaaattaatgtttaacattattaaatactatttagttttaagttttatttaaaattaagtaaaaaaaaaaatacaaacactacttactttaatttgaataaagatgaattgaagtgaaatttcaccaaatttttttttaaaatgaaaaaaaaaaaaaaattcaacattgctttattgagagaatgtggaaatgaagtgtaagccagaggggcaaatgaacccatttgtctgcctgattcatgctccacaattatgctataaataaatactctcctttcccatgtgattccatcattttctgaattattattattattctaattaaaatgtctcctactctaaccaatataaccttctcattgattatgggcaggctcttaggcctcgcctcgtcatgccatccacccatttctctccttaaattaacataatttctctaagttttacgacaatcacataaatatacgctcaagatttatctatttattttcatctcaccatcgaatgaggaaacatctaataaatatgggcccacacctaatttattaaaacaacggtaaaataaatttcctataaattttctcgggaaaatgcttgaaaaattcatttgtacgtgtttgtcggggaagtggttttccatggacatcggtttacttggtctaagaaatctcctccaaaattttgaattttaaaacataatcaacaactttttggcttgattgaagcttagcagccaggctttaggattattttttaattaattttagtcataaacatgtgcaaatgagaaaattttttcttggcagaagggtcaaatgtggatccaaaaattcagcctcaatcgaggtgagattcaattagaagaaatttagtcaaaattaaacaaatttcaaacttcgttattatatggatcattgatttaaccgtcaaattggaaaaaatttagggtttgttcataaattattttttaaaataattttatgttatccaaaacaaaaaaaatatgaaaaacaagtatgataactaaaaattattttgtatttttcattttcaaaaacagaaatcaaggtgttttaaaatttttcttttagttattttcaattttttttacttattttttaaagaatttttttaagaaataattacaataaataagtaaaataattaaaaataaaatagtaaatataaaaattatttttaaaatatatttacaataaataaaaaatactttagatttccaaacatatttttattttacaaaaatcaaataaaaattttcaaaaataatttaaaaaaaaatattttttaaaattattttcgaaataagttatcaaatgacattaatttttatcttttatatatatatatatatatatatatattagtaaagcaaaacactaacaaagaaaaaaaaatccaaggaaaaaataatagaatgtaaaatattttagaagaaagtaatttttaaaattattttgtattttattgaggtaaaaaaagaaaattatctaacacacgagtcaacgtattgattttcctggaaacatgcctttaattacaaaaaaaaacatttaatttaatatccaaaaatgaatacgtaatcttacagtttcatcaatctcatttactacattaa

SEQ ID NO: 12667 - DNA, 7731 bp, Vitis vinifera
  Intron number 24 from transcript GSVIVT01016158001 (locus GSVIVG01016158001) derived from phytozome v7.0 (chr-ID chr 9; pos 20069507 to 20077237 reverse strand)
ctggtgttaaggtagttttatatcttctggataatagtatatcaactatatgacatgctatcctatgtgggtggtcattactgttcaatttactctctattcatcacaaaacagcatgatggtaaaagaggacaaatctgtttggatatagggtcaaccacatctaagagtatcctttaggtcttttagtttcttgcatctgttgtttgcatgctgagaaaccccttaaagttccaccttgtttcggaaccactttctgagtcgatgttctgactcagatgattgatgcaaaaagggttgtgttgtagaggatgtgaagaccaatgcatttaacttggagcaaattgtttggctaactggctcactaattcctgcttatccatctgaaggattaaagctatgttggagacccctctctctgtaaggcctttgctttcaaagggaccttttctgctgctagactaggcttgtttttaggtttgagctttgggccatagcaagaaaaagaagactgttatttttcccctcatgaaagttcaggggaaaattggtagtatttctatagatacctgtcaatacctttctattttctgcatctcaagctatgcaaagtaaaatgcttttttgcatggaaaagtttatataagttttcagtttctcacctgtttctctggtcccatctcaggaagatgccaatagctaggggattgaagcactaaatgcctatagattgggtaaactagagtaatagcaaaggaagagttgtgattcacatttaggttgcatttagtttcgcaaagttttctagtttttattttctattttcactttctgaaaataatttttatttcttattttttcttttcttgaaaatgcgattgattaagaaaaatgaagactcttttggaaaatgaaatttgaaaaatcttgtttggttttgagttttcactaatggaaaaagtggtgaaaagaaatataattagaattttatataatacacgtgtcatggtatgatatatgttattaaaaaggataacatatatatatatatatagtcttttatgcatgttttatgtgaccttatattatacttgttcactattttttatttgtttactatattttttattataaaatgatttagtaaaatattctaatatatttataattattcagataaattattctaatttaaaatataactaattacaataatacatagtctaataaatagacaaaaaatttatactgtatttttaggataatatttgatttcaaatatatatgagataatgttttatttatattaatatttttcatattcataaataccgatttgatgttcactttttctattttttgagcttagttttccagaaaatgaaaacggaaaaatactgtctaaacctgtttttggccttgatttctggattctttgaacatgaaaatagaaaacaatataaacaaacaaagccttatctttcaacatatagtggttgaacacgtgattaattcagtggtatggatgatgtaaaagcaacatgagaagattttgcctaatgtttagccattatagtttcaactgattccgctgcagtaccttgtagtcattcccttcatagagaatgttaatattaatctggtaccacattactccccatggtgcttgaggtaaagcaaaacacaattctacaagactaatgccccaaaggaggctgacaggcagtacaagcctgtcccttgaggattgccttgttttggaagatgcgccctaaactatgatcatgaatgttgttcatggctttctgtttttggatataaatccctagtttttaaaagtggattatgtagatttataaaaaacaatagttttcagaattcaaaagtttctgctgattccatggtccttccataaagctttgatgaaaacatctcccaactagttttgtcattgaatttaagttttattgatatgttttttcatccctacatcccctgcaaggtgagaatcaacttctatttgctttgtcctcccatgaaaccaggttgctggaagacagctctggttattgggaatacaatctcatgagagttaagataaaagaaccatttgaaaaaatatctcacccacaaaatccctcatgttgtatgagcaatagccttgtactcttgctctatgctagatcttgctacaacacttgctttcttattcttccagataaccagattatttcccatagagattcactgactaaaaatagatcttctatctagatcatggatttgatagaatcaaagtgcaaaatctgttctaaaagaaccatttgcatatctcaagatacatcgaaatgtcccctaatgaggttgttgaagaatctctcagaactgattagtgacacccttatcaggtcgaatcactctggtatatgtcgatttccataccagtcttgcatatcttccagggtttctcaaccgttcatcatcggctttgtcaaatttaacattaagatccttatgatgttgatttatcttctaatatccatatgcaatgtagatgagtcttcaatctctcaattgtcccaccaagatgatatctaatgacatacatatgatgagtcccaacaacttgtttcattctatgcattgtagccatttccttatccataatacttctccatttagtagaatacaggagcagctagaattggaatatgagaatggaccatatacctctttattttatttcatttcatttcatttgccctccctatgatgtcaatctctagtaagtgatcttgatgaaagaatgatccactttcaaagaaaaagacatactcgcaaggtagtgatgtgactgaggatccaaaagataaggagtttacccttctagggttgactagggcatgttatgtttgaaatttatctaaaaatgggagtttaggtttaaaatgtaccaaagatatattcttaattttaatgcttaaatgatgatttgattgctatttgatatgtttttgtataatacttgtctcatttagttcagtaggatgtttttttttctttttctgtgtgctattttgaaaagtctattgatatattataagttaaaaaacactggcgctttcttttatcattgattgtaatatttctgctctaatgtattattgtcttactatttggttctaccaaaaaatagttcatgagtaccatacactacggcagaatctagtattgctttacaaagtttaaaaatagttgtgtatagtttgttttgctttatatggatttaagtagaactataaactatcatgctcctccaaattaaggtaccatatagccttaactaccactttttcttttccactttctttttttcctccctaattttttcatgaggcttttattaatattgtttttacttgtaagtgtcgctcattacttgtatttttcattgatgcatatactcattatatctcatcatcaaacaaagtgtatttttcgtcataataatatttttcttaatctagttttccactgtacattcattgatattattatctcacttccatttacttggtccgcttctcaattttctgtcacttttgtttgtgtttgcttcttttctctctattctacacacatggactcacacatacatatttcacattttaactagtacatcttttagccaatgtgggactgcttcatatagctactttcctatgtgcttaaaacatggtcttgatgacatctaaaaggatggatagttgttgctgtcattttttttttttttttaagttgcgtattcttttgtgtctttcattttttcatcctttcttggctgctctgtgctttttattcaagaggcacaaatggtagcaatcttcggtcatatattaccgtccaaaaagattgaagttttttttcttcatcgaacttcacttctttgttgcctaaagttcacgacaaagtagtagtattttgaacacatattttcttaaaataaaatatataaattattaaaattaaaaattttcaaaatccagaaagttgcgactttttctatgattcttttcctgtatattttcttctcattgttaaaaattcaaactattattattttcatttatatacattttttactagtattcaactaataaaacttgtgaatttcatctttttgaaaataatatatttcttctcactccattgggaagttccagagtcaacaatcaatttcattctatagttttccttattaatgttttgctctctcttaaccatcaatttcatttctttgaaatactacaacatattttttcttatgcacttgggcagcaacaccaatgatggacctcatgactttctggataaatttacaattattcatgtgggtttacattattttttaggagtgcatgatatatattatggacccaaatcctacaaaattaagcttttaggataattggttgttcaatagtattcaataaatggcataagatttgctaacttgtgtcagtaactaaagacagggcagtttcgctccttttctctttttaattaattgcccatcagtttattttcttcattattcattgttattcaccaattagattattttattttatttctattgggtgatgttactttattaattgttaggattttacaccctttaaggaaggaaggagggagggagagaattaaagctagggctttggtatgggatcgtgtgccctctaggtgcttaagggagagaaagatccttagccctagggtgaggggtgtgtttatttcccagtcccataaaatgtagtgaaaacctagaagaagaaatgacccaaaagaaaaataagtgatgacacaggctatacttgacttttttctaaccattagcatgaaacttgcctgatgcctatcttacaagtgttctcaagattccctcttattaacgtaagtgttttaaggtagagaaagatccttagccctagtgtgaggggtttgtttttttccatgactccgatgagatttagtgcaacccacaaaaaggaggaaaaaaacccagaaagaaaaggcagatgatgccggaaaccatacttgacttggttataacactgtaaataggtaaggatagggtccttaccattctcatgactgcctggtgcttgtgttgcttgctttctcaagtttccatttcaatatcccaatgtaaacttgaatttagatagttaagtttgattcaatcagaacgcgttcgtctcgggtaggcagattttggatgcgtccctaatcgcaaatgaggtgattgactcgtggaaaaaagagggaaagaagggcctgatctgtaagctagacattgaaaaggcgtatgacagcgtcaattggcaatttttgatgagggtgatggagaaaatgggcattgggactaaatggagggagtggatatggagctgtatttcgactgccaagttctcagttttagtaaatggggagccagccgggtttttccctagctctaaggggcttcggcaaggcgaccctctatccccatatttgtttatcatgggaatggaggtgttgagtgcgcttcttcggagggctgtggaagggggctgcatcacgggatgtaggatgcagaggggtagggggcaggctgttagtatctctcatctcctttttgcggacgatgcaatagttttctgtgaagctaagaaagaagatatgacgtttttgagttggactttatgttggtttgaagccgcttctgggcttaggattaatttggctaagagcgaaattattccagtgggggaggtggatgagatccttgagatggctgtggagctgggctgcaaggtgggtcagctgccttcaacctacctggggctgcccctgggcgcgcctaacaaagcgggttatgtgtgggatggggtggaagaacggatgaggtggaaactagccctatggaagcggcaatacttgtctaagggtggtagaatcaccctcataaagagcacattggctagcatgcctttataccagctgtcccttttccgtatgcctaagggagtggcgagaagacttgaaaaactgcaaagagacttcttgtggggagggggaagcacggaaagaaaagcttacctagtcagttgggagaaggtgtgtgtgagcaaagagaagggggggcttgggttgaggaaaatagtccagttgaacaaagcccttcttggaaaatgggtctagagatttgctcgtgctaaggatgaaatgtggaaacgtgttcttgtagcaaaatacgggcaagaggattttgggtggagaactaaaaaagcaaatggggcatttggggtggggctttggaaggagattatgaaagaagcagattggtgttggaataatatgacttttaaggtgggaaaaggcaccaaaatcaggttttggaaggacacttggtgcggggatgtggagctggcccggagattccctcaactcttcaatgtggctgcccaaaaaagtgccactgtgggggacttatgggaccagaatgctggccaaggtgattggaacctaaggttttttagaagtttcaatgattgggagctggccttggtggacgaattgttgcaaatcctaaggaatcaaagaattaatttggaggaggatttggccgtgtggaaggggggaaaaaatgggaagtttggtgtcaaggatgcgtatggactgttgaccagccatagtacatctctgtttcccaaaaagggcatttgggtggagaatgtgccttccaagttagcgttttttgcatgggaagctacttgggggaggatccttactattgataggcttcaaaagagaggatggcaaatccctaaccggtgttacttatgtggtagtgatgaggaaaatgttagtcatcttcttatacattgtacagtggctagtgtgctgtgggggatggctcttagtatgtttggagcccagtgggtctttccagagactgtaaaggaggtaattatcagctggaagggtccgtttgtgggcaaaaagaggaagagaatctggagatccataccgttgtttattttttggacggtgtggaaggaaaggaatagattagcatttaggggggggggggggggagctagctatacagaaaattaagtattcttttgtctgtaatatgtgggggtgggcaaaattgtataatggtgcggagtcccggtcccttataggtttcctggagtggatagcctccagttgagggctggtgggtttttgttgtttttgttcctttgttgtttggcctttgtcgcctcgtatactccctgtatgctttgcggcgtttgcctttgctaatatattgatgtttacttatcgaaaaaaaaaagtttgattcaatcaaataatgccatttagaggccctatgcaattgtgtcctgggaatatgaattttagtatggctcattggatttatttatgaatgaaattaactacagctaagcataatctacatcctaaggaactcctaagatatatttccatgaatgatgtgaggaataaaattgctactagtaatcaatatgatgtctgtttttaacattttccattagtctaatgtgaagctagtgtggaagtgatggaaaacgtattcgaaatatgtaattccataatatagtaatttgtgattgaattgttgaaaatcatgtgtttgtgatcaaataggtacgc

SEQ ID NO: 12668 - DNA, 7245 bp, Vitis vinifera
  Intron number 5 from transcript GSVIVT01025172001 (locus G SVIVG01025172001) derived from phytozome v7.0 (chr-ID chr6 ; pos 3744212 to 3751456)
tgttcgattcaatatctgctctagaagccccacaggttcgttcttccttctactatttttttttttggcctgcaatatataaaagggaaattcagtgtgctaaccgataacctcttacatcctatttgtcttgttagtggaatataagtgccccgttactcttcattcaggttgtacttggtcatggtgcaaccatgtcttttttttttttcaataggcagaataaaagtaaatatataacaaagtgcctaatgaaaagggggcacaagccacacaacccatattcacatgtgtacagttcatacagagaaaaggctatgcaaaccaaactaagctagcactactcataccaactagacaacttccatattatttacaaagtctacaaaataaagttttacattgttcttgtaaccatctatggtcatgcaaaaggtttttgggaatagaacttttaaagccaaagttgattgttctatcccttccaatattctatttttgtgatcttctcatataggccaaaaaaaatacaaagggataaaccttcatatctttttagatcagctctaacaaaactgttatgcaaactgaataaaatgtctctaattgaataggaagaaattaggagacattgaacaaagttaaaactagagaacataaactcgaggtccacttgaaatgaaaagaattggattttaattcctttatcctgtttattatagaagggaattgaaatgaaaataattcttttctttgtttggtgttaaaaagagacagagaagatagacacccaggatgaggtaatatgaaatgaaaacataaattatgccaaaattcaaaacaaattaacagaaatcggaaaatacaccggatacttaataaaggaatttaaagaaaatgaacataaaactttatattacataacttaaaaaacatacatattaggagaaacaaggataacgaaatatcttacaatggtagggataggaaagctttgaagaaggctttgggcttgaaggcttacatgatgagagagaaagaagagagatggaagagcttaggatggaaagaagagtgaaaaattgaattgtgtttacaactgaggatcaagcctccttaaatagttgaaaaaggaatcataaatagtacaaagtggacgacaggttactgtgcaccatttgactccagctaaaaaaagtaaccattcgtgaatgaacagtgaatagtaaaattgacttttcactgtagcaatcttgacttggaagaaaggtaaccttgggactaattcaaggtttcaagatgaacaagaagtttgctgataccatcatcatcagcaaagctcctgaatggatcttagatggtagtcttctcccaacacagcattatatttctttctattaccaaaacaaaagaccaactctattatccaaccctcttgaacaatccgatatttgtgccgagccacttatcaaacaaatcaagcattggagagctaggattattagcacagattttgaagcttatccgaagaatatgagctatcttattgttgtagattcctctcatcagatcttctgcagtaagaggattgatcctctactaaccaaacctgctactgaagatatctagctgcttatggagcatcgaacagattatattctcccttgatgtctcattttgactttccacctacaaaaatattttccaccgacaagctttaagtagtcagcaccgaaagcaattttgtctaacaagcatgtgactctatagttcttaactagcctggtactccagctttcctccaccgaaagcaagattcgtctaccaacaagttaagattgttatagtgaaaagtcaattttactattcactattcattcatggatggttacttttttccaatgttttcagaaccgaaaaagttaccagttcacggttcactggtcggaccgacggtcgaaccgttatcgaaccggtgacgtcataaatatataatttatatattattaaaattaaaaataattataaaaattttaagatatatatgaataaattaaacatcaataatattattttatatctttgatattatcaaattaaatcatattaatattttaaattttattaaatgaaatatgtataatatttaaatgtgaatatataaaaaaaatgaaaatttaaactaatttcataatttttaaaaatattatattatttttatttaatattataaaaaaaaattaaaatctaatatatgttgttttgtttggcatattagataataaaatacatgtagccgagtggtgtcctaggtggactacagtacaggggtggtccaaggttcaaaccctcttgttggaattttgttatgttttttttcgttgatatttagcaatcccacatcggaaaatgagaggaacaaggagtcaaatgactcctataaaagccatcctcagcaaaggctttacatggtcttgtgggctcaaaactcagcccacagtaattggagtgggtatgtgggctgtgtcataagacaggcccaacatgtgctttagtaaaaatcatttaaattttatggaatccttccttccatgcttacaatgagagggtaatattttcattttataattttttttttaaaaaaattaaaatcatttgaacaggtcagttcccttggaaccgtccggttcgtccgattcaccggttgaaccgctggtttgagcggttcaaccccggtttgatctcaatccggtccaaatgaccggatcggaccggaacggtgactggttgacggttggaccggccggtccggtccggtttttaaaacattgcttttttcagttggagtcaaatggtgcacagtgacttgttgtccactttgtactatttatgattcttttttcagctatttaaggaggcctgatcctcagttgtaaacacaattcaatttttcactcttcttcccatcctaagctcttccatctctcttctttctctctcatcatgtaagttttcaagcccaaagtcttcttcaaagctttcctatccctaccattgtaagatatttcgttatccttgtttctcctaatatgtatgttttttaagttatgtaatataaagttttatgttcattttctttaaattcctttattaagtatccggtgtattttttgatttctcttaatttgttttgaattttggcataatttatgttttcattgcatattatatatattactattttaacctaattgtaaatataattgattcaaaattgtgaaagtaataagttaatttaagaaaaattagaagaaatataactcatatgaagttcttaatttactaaacaaggaaaaattactcatgttgtttaaaaaacttaaaggaaatatattaacatttgaaataaattctttgaaaaaattttaccattaaaaacttgtgaaagtaaaaaaaaataaaaaatgttggatggtgattgaaaaaataaatagaagaagagagacagaaaagaaacacacacatacaagttgtaggaatgaagataaaagataaatgcagcgttggaaaagagaaagttgtgacttgacatataatttaatgaaatccaaatcttatgaaattccaccccttttataaggaattgaaaattgaattttttttttgtctttttccctttatgaatctctcaattccaaacacttgatttgaagatttcaaatcaattcttttctttttccatcaaaatcccgtaattataaacacagtgtaaatgagtgaaaaaaaaaaaaagatttagacaaagaaaaaaaagttcttggctgctgggtgttaggtttttgcttttggagaagagctacctttgcttaaagcctaaacataccattagagttggtggataaagaagaagaatgggtggaaatagacattgatgaaggggatgataaaacaattatatatggtgatgattccttagatgatcccactagtgacagtgatggtgatactaaagagtgaaaactaatttgatggagccatgactcatgagagagtgggattttggaaaagaaaatgtagaaactattatgacaaacaatacatttttttttaaattataaattttatgattttcttattactctgtttttatgttattttattaatattttttctaatttttgagatttttttttttggacaagttgaggttcatgccttcctcatttgattgaaatgcctcaatttagcccttttaaaacattgttaccagcagaaaatctttttgtttttttttggagtaacaaaaatcctcaccaccctttctaagggcttttcaaacacttgtcccacaagcttctctactctctctagagcaccaacctacaatcatcttcccatactttccaacaattacttccctacaaaagctatcatgcccaattgcaaatccccaaagccacttacccatcaaagccttgttttagaggcacaaggatcctaatacctaaatcttcaaaaaccttttctgaacatacagaggaccacttaattagataaatcttactttctaaactgtcactttcctacacatcaaagcattgttaagaggaggcacaaggatcctaatgcctaaaccttcaaaaaccttttctgaacatacaggcaaccacttaattagatgaatcttactttctaaactgccaccttgctatagacagtctctctggatcttctctagatcacatctcaactttttaggaattgggaaaattgacatatgacaaattagtagattaggattacaaaaatttacatataatagattaacagacaaggaagaatgttcttagcaaagttaatcttccccctttagataaaaactatcttttctaacaagtcaacttgcttttgaatctctactcaatagagacccatattggggctgccttgaatgaagcacctaaaggtaatcccaaacacttaaaaggaagccttcctagattacaaatgattagtcaatctctctataccatccacccttccatcaaggatgggttcacttttctcctagttaatcttcaattcagatacttcctcaaaacaaaggagaatctacctatcatgtggtggcagctcattatttgcctcagaatattaaggtatcatctgtgaacaaaagatatctccaccctctcacctctgactcctatcttgaaacccaagttgaggccttcttcacctgactttgaataaagcaacttgacacctcccttacaagaatgaatggatggggaaaagtggatcctcttgcctcaaatctctagaactttgaaagaaacctgaaggaggttgttattacaggccataacttgttttcttctaatgtatggacaaaaaattattgaactaaaaccaggtggtgtttcctaaatgcatattttgtctttagtgctaatttctcttccagcttctctctcttatatttttttttcaaaacatgtaaaaagcctcaagagagctatatgaaggaacccaattgctgtttcatgcagaatggaaatgtctatgcaatacactatgtactatggaatgtggaagagtaatgtatgtttgtttggatgacacagttggaatttgatgatttagtttcaaatgtaagatttttacttatctgcctttttaatgaaaatttttgaggcacaaatgccctttgctaaaatccttaaagtacccttcaacataaaaatgtctggtcttctagtatcggtcatttatcctatatccaaagttctagagccggacatatactctatgtctagacatcgggaacctgacattgcaagagtgtccggtcttctaggatcggacatagttgcaatgttcgaccttctaggctcggacaccatgagttgcttttttttttttttgtgtgtttctccatttacacttcaccttttaacaatttttcacttttaaaccacttctaaattctttctaattacttttcaaccattttaacaagctttttgtcaaaaattatatatgaataagccctaaaagatatccttgttgtatgttatatggattcaaataaaaatgtataaaaaagttcaaattagctatgaatatacctacaatagtcttctaatatcaaatcagcttcaaacaagatgatttgtagctaggttttgtggttggaaagaataagttgagagaaaaaggaagaagaagaagaagaagaagaagaagacaagtttagggggagaataatgggaatggtgttttgggtatttttaaattgcagggtggatgtattaataagtttttaatgtttaggtggatgtgtaaatagggtggatgcaaatataatttccctttttacttagtcttttgtttttttcttctttccaatacctggaaaaggttgatgaaaatgttattgtgtatggtgagtttgagagtttgaaaatccttaagggtgtttaatgattttggtgcccaagcagcataaagaatagctgaggtttggggtttttccattgttgaaaatagaaagaaaagaaaagaaaagaactttccattaattgaaatatgagtttcctacaaggcaacagatgcttgacaggaagggaatggctgtgctggctccataagtttttattgaaatggataaaattcagaatctgatggaaaaagtagaacctgaggcactaaatgccttccccaattcaacctgttgagaatcaacgctccaacttggaatggtagcttccaatcctacaggaagaaggatttttcatgtggtctattttgcattttttatcataatcatgtagatcacctttcaggtttagtaatttgaaacccatcttagcattatgtcaaaaatttaaacaagtaggaaaaggcctgtttctgtcctaggatgtggttcccaacagtttgtcactctggatatattgaggctgttccgatcctggcttcagatgtactgggtgcagttgcctgttaccaaaatttgtagcgaaaatcaacttctaattcaatgagctttggtgaaaagccgctgaagtctctgtggcataaccaagtgcaaccatttggtttggaaataactagagcgcctcttagctaacataaaatagtagacaatatgcccctgaaaatgactgttgattccaaggatgtgacttaattctgacattatctttctattaatttctttctggtttgtgtttcaggaga

SEQ ID NO: 12669 - DNA, 3739 bp, Vitis vinifera
  Intron number 2 from transcript GSVIVT01029122001 (locus G SVIVG01029122001) derived from phytozome v7.0 (chr-ID chr1 1; pos 19368811 to 19372549 reverse strand)
ctatccgggaagcggtgaaggttgtgggtaagaaaaaccttttgagttttctgaattttttcttatgtcaaactacaaaattatcatcatccttgccttcccccgcttattttcaatgatcatcagtcatatcagtaatatggcctcttgcttttagtttctttaattagtaacttaatattggaggttggtatgctctttcttttagtctctttactaccttaatgttttagtttctttaattagtaacttaatattggaggttggcatgctagtggaaatgctatagcatatcttggggaagtaacagctaaggtggtgtttgtttttttggctttttgctgaaaaccatttagttttagaatttaggttgtttgtttttttattttttaatgacttattataaattttttagtaaatagaaaaaaccaaaatatgtgactttttctaaatagaaaaaataacacaatggttttttttactttttaatacttaatagaaataaaatactacaaaaacaaacaatctaatatttaatactattaagtattaagattctatttagaattaagtaaaaaaacaaacaccacctaagtttggaaattaatgtatcatttttctactttaagtaaaattaagtgtataaagggcatgcaggaagacaccccatcaagaacaattaaaattaacaataattgatactcacaataattgatttttctagatttatgaaaatattgatgggttgtcttcttaccctctatgtgcttgattttgtgtatcttcttaaatatttcctttaacttactcccttaagtaagagtaggaatgaatatggatacctaacttatcccagtaaatatatcatttgacaaagatttgctaaaaatttgaacatagttgggaatgtgtggaaatatagcaagtaaaaagactgcccataggtaccttctctaatataaaataataattaaactcaacatatttagaaagaacacaaaacataggattaacggacatgtaaaagcactaacattgtcacaaaataattgtagtaatttagagaaggacgcaccaatatctcataggagataagtaatccaagtcaactcaattgcatagaaggccgaagagcgatactctattttggtgctttggttgtttctttgaacatcaagagatataattggctccaataaagacacaataatatgtggtgtagtgggacaacctacccaatcaacatagctaaacctagaaagagatattggaccggtggaatgaccgaatactgagtccaagtttgtgtattgctaatggaagctgtaatttaagaaaaatatatgtagaaaaatatcctaaaattaagagaatcaaatattgtgagtcacaccttgaattttaggcaatccaaaatccgatctgtgaccctaggtcaaatgtttgaccttaatggttgctcttatcaaagttcacaatcaattttgataacatggtttttcttgaataaattgacatctaatcccaaaataaatttattaagttaaaatttactatattatattttttctttttcaaaccaaccatcacccactcacaagcataataaatctactaatcatcttaccacccaaagtgattatctaaatatccacaataatctctaagtcaaaaatattttcaaagacgttttaccaaataacaaaatataatttaagttacaaaagtcaatataacttaaattaatacatcctaagaaggtaatataaattaaaaacaatcattattattgttcctttactttttgggtatggttcctcataaactatatttgcttctaaaaactttagaaaataaagatgtgaacatttccatattggttagtagggtgtcttatattcatatgagttaaaagttttaagtcagtataacacaattacatgttaaaatataatattacatttacattatatacattaagtgacacctcaactatacaaaattaaacaaatcaaaattatcacttttcttattcattatatatataacatataaaatatttctacgtttacaaaataaataaatcattttagtctctaataataaattcaaacatacaattgatgtaattcaattaattaatataaatccttcttgtaaatgcaaacatgatgcaaatgtttacacgtaatcaaacaatgcattgttgttttcgagttttcaccaaaggatacgtgtctataaacaaatatactctccatttaaaatcttcttggggtaaacttttgtgtctttcacaccatgaatctcactcttttctcaattcatcctttttgatgccctttcatttctcatttttcttttcatttttgctctctttaggttcttgttattctcatttccagtttatataaccatttctttatttttccttatacataaccatggatgcaaatgaatgcaacaatgcaatatactaccattatccaattcccaactcaaataataatatttaataatataaaataaatattgtaaacatataacaacgtccaacattttttacaatttaaacacactatacatttaaaatctttacaatttaaattatcactatttcattttcccacaagtatttttcattgtttcaacattaatacatatataaataaccacctcaaattttcatttcattttccaaagacaattcaaataattccaatatttcacacaaatatccctctttaattcatataaattatgtcatcaaaaactaatttctaaattttactttaacattcttcccactaaaatcaatctaaatattcatatattcaccaacaaattaaaagaataaccatacatggaaaacctcaactaaacataatgtaagtagatctagtttttaacaacacccacacatttttctccaagaaaatattggatgaaaattttatgaacaaatcaccctaccaaaaaccaagaatccaactgttgaattcgaaatcggcttcgtagcgatgttcatcttgaggtataggataccctcctagatttgtatgtgaaatggtggcttgtcaaatagtttcacaaagacccacaacagcttcttttttgttttttgttttttttttttctttatgtttctttccctttcccttatatatatatatatatattctttttaccataagacaactttattttatattttatttttattttttgactttttatttagtcaccgaccatttctcattttacaaaattttcaaactattgacttttgacccatttttccaaaatttctccaaattaaatattaacacgtggatattcaccattctttcttactatttgattacaaattttatgaaaactttcttgatacttgaatttaacatgtcattaaaaacccaacattgatgggagtatattctttccctctatatgcttaattttgtatatctcctagaatatttccttaaacatactctaggattgccaaattatttttctcatgattagccttatatacgaaaccttttccaaattaaaatgaccattttcttggtgtgatttcaagttactacaaataccaagttattatttttctcatagaaagcttttttttttctttgtcattcatcttgatcagtgtttgtcaattaatattaacgaatgcagctttttgcctattatagggcgggtgcaagaccaaacccttgatttcattcca

SEQ ID NO: 12670 - DNA, 5169 bp, Vitis vinifera
  Intron number 11 from transcript GSVIVT01009548001 (locus GSVIVG01009548001) derived from phytozome v7.0 (chr-ID chr 18; pos 9276263 to 9281431 reverse strand)
attattctaaacttgctgccaagtaatacaacgtcgtttttagcgaaacaatagtacgtacctcccccaatattaaaaagggaacatttttatatgataatcattgtataattgagtgatagaaatgaataataaattagtaaaataacttgaagaggatatgtaaaccaaacttatttttaaaattaataattaaatatatggtaaaaagtctccttcaccgactttcctttcctttacgtgttgtaaggactcatgttcaactgtatagatgttgttcattttgagtttaaaggagccttcacggtttcataacatatctacaagctaaaaaggagaccatatttatgtagtattatgaactttctcccttattcaatgtaagatatcacaatcatcctcttatgcaaacacaacgtctttattatgtcttatgaaattatgggaccaaattgacagacactccttacagggccaaacaaacccccacattagggtcgacgattgattttaataccatttccaatgacccgcattccaccattgttgtgctagcaaaagttttaatgcaaacaatgttaatttaagaatacaaagataaaataatcaaaacaatggtacatgaggttttaacatggttcaactaatcatgtttatatccatgaataaaagaaaatttttcataggaaaaatttatagaggacataactagatgcaattattaggttcccgaaacatcccatgtttcccaatttcttatatcaacaccctgaaccacaagcccacgagcctctcgcttcattgaatgtctcttattcttcctcacatctttataaaccttgtataatctttaagagtccatctccatttcataacattttctcctcatgaatatttataaatatatttccaataagttttcttattttataagaaaaatattgcaatagtatatcaacttaagaaatattttatacaatattctttgtagaacaaaaatctttattaattaagaatttgagacactttctaatacatacatacatacatatatatatatatatatatattgtttgctctaagtctaatgaaacatttataactttaaaacacatttataagattaagaggaacttatacttatatagtgtcagaaaccttcatccccatccgaagtaatgtgagatatcacatatgcactattttctaatgcaatatatatggaataggagtgtagtactcactctttctagattgaaactttttcaagcatactctcctacttggtctaaatcacataaactagttaaatcattagtttaaagtgtaataaaaaaaaaaattgttgttgttcaaattcttgcaactataattgatcattgatcattgaaagtacattttgtgacgtagttcatcttgtttgatcatatgcatatatatcactaatatgcactattgttgttgggcaatattgttttttaatttacccaattttggaacattgcatatgaattgttgaggttatttcaccaaagtgatttaaccatcaaaatttgcaagtttatgagttcctattttgttgatggggaaaattttagattaatttgtacaatcgcctgcccaaagggggttattgtgcaaattaatttaacaacatgatgatattgaatgagataaataatttgataaatttgtttgctcaaaggaaataaattttaatgaattatttgttgatcttcatgcttagagaatggttgtttattgtagactctacccaaaggggagtttatgataatacaattgattcttgtattatattgcttatgcttatttaagcattttacctattgcccataattgatctagttgcaaatttttgtcaatcggtttcctttgttgtgaacaacaataatgctacaattgaaattctaagtgggtcgaactagaagagatggagatcagacacagagtttgtttttggaatgatggacttggacatggctctacgtgaggatgaacctcctaagcctactaatgaaagcactgaagctatgagagctcattatgcgaaatgggaaagattgaactatttgagtctcgtttcaatcaaaaagtccattgctgagcatctcattggaggaatacctgagagcaccaatgctaaggaatttctcgtagctgtgggaaatagataccagacatctgacaatgccaaagctgggtattttatggatgaattgatgaatatgaggtataatgatatgaaatgggttcgtgagtatatcctaaaaatggtgcatctttatactagattgaaagcactatacattcccattcctgataagtttattgttcatcaagcccttaatagtctaccatcttcttttagccaaatcaagactacatacaacaccctgaatcagtcttggggtgtgaatgacctgatcactaagtgtgtggctaaggaagaaaagctgaaaagagaaaagaatgaatctgctcatctcgttgctcttggaaaaccgaataatcagaagagagttgaaaaagctagaaagcctaacttccacagttataagaaaagccagaatttcaagaagagtgggagtgagaactagaagaatggaaatgaaaaggccaagaacatcgaccttaagtgctatcactgcaacaaaaatggtcacaagagggttgattcctttaagtttaagaattggctagagaagaaaaagaaggaacatggtatgttatctgcctatgtctgttttgaatctaatttagttagtgttcctttagattcatggtggcttgacagtggtgctactgttcatgttgcaacttctttacaagggataagaaatctgaggaagccaagtgaaaaaaagtcaaagcttaaagttggcagtaacatcgggattgatgttgagcatattgggattactgttttagaattagattttggttttcaacttgttttggacaatgttttttgtgtaccttcgtttagaaggaatataatttccctttcagtacttgacaaaactggatatagtttcacttttgcaaataaaagagttgaggtgatttatgactctaaagtgattggcaattatgttttgtctgacgggctttatagattgtcgttgttatctgcttgttcttacaatgttgaaaacagtgttggtaaaagacctttgactaaggaaagatcttcattgttatgacataagcgtttggggcacatttctaaagaacgagtagaacgcttaattagttatgggattcttcctcaccttgattttgatgacttagaaatttgtgttgattgtgtgaaaggaaaattgacaaagactaagaaaaagagtgcaactcgtagtcaaaatttgttggagattgttcatacagacattagtgggccttacttcactaccttgtgtggcaaaaagtacttcattacattcattgatgatttctcccaatatggctatgtatatttgataaaagaaaaggcagatgctcttgaaatgttcaaagtcttccgaattgaagttgagaaacaactggggaaagtcatcaagattgtaagatttgatcgaggtggtgagtattatgggaagcatggtgatgctggacaataaaaggggctttttacaaggtacttacaagataatggtattgttgctcaatatactatgcctagtagtcctaaacagaatggtgtggcagaaaggcgcaaccgcactcttatggaaatgaagaggagcatgatgagtagatcaaatttgctagaatacttatggggtgaagccattaaaacaacaacctacattctgaatcgtgttcctattaagtttgtgcctaaaacaccgtttgatctatggacaggtagaaaacccagtttgaatcattttaaagtatggggatgtccaatcgaggtgaaaatctatgatccttctttaaagaagacaaattcgagaactactaggtgctactttattgggtatcttagtcactcaaaaggatacaagttttattgttcgactcgtggcactagagttgttgagtctcaagtggcaaagtttttagagttggatgttgctgatagtataccctctcaatccaatgaaagagtcgaacccatggatgttatttctttacctttttcagtcttatacatcaaccttgatgttggagcttttgattctgggatttagcaaggagttgctattgtcaatttccccactgtcgaaataacccctattgtagatgagattcctcctgtggaaatgagaagatcgcaaaaaactagaaggcctgccttttcaaatgattattatgtttaccttggagaggaagagtatgacattggagaagaagtggaccctactacttatcgtgaagctctcaatagtgatggtaaatgaatggctgattgccatgagaaatgagatgcagtctatgtcagacaatgatgtttgggaatttgttgatcttcccaaaggatataaacccattggatgcaaatgggtattcaagaccaaaagagacaacaaaggaaatgttgaaagatacaaggcttggttggttgctaaagggtatacatagcgagaaatcattgatttcacagagactttctcactagtctctaccaaagattcctttaggttaattatggcgttggtagctcattttgacttagagcttcatcagatggatgtcaagacaacttttctcaatggtgatttgagtgaggaggtctacatgtcacaacctgaaggatttgaggcaattgggaaagataacatggtatgcagattgaaaaggtcaatttatggtctcaagcaagcttttcgttagtggtatttgaaatttgacaaaattgtgacgtcttttggttttatagagaacaaatttgatcagtgcatttacttgaaagtcaatgggagcaagtacattttcatggttctctatatcgatgacattctacttgctagtagtgatgtgaatctcttaaatgatactaagcgtattttgtctgctaattttaacatggaggatctcagagaagcatcttttgtgtcgggtattgagatttatcgtgatagatcttgaaacctccttgggctatctcagatagcctatatcaatcgtgtgcttaaaagattcaat

SEQ ID NO: 12671 - DNA, 2064 bp, Vitis vinifera
  Intron number 4 from transcript GSVIVT01010902001 (locus G SVIVG01010902001) derived from phytozome v7.0 (chr-ID chr1 1; pos 15963728 to 15965791)
ccctttttactcttcaagctttacctgtaagttatggactgtaccaatgttgtgatctttgtggaagcttgttctgggctattgtatgcatgacttagctggagttgtatttcatatgtgtgaagttaaatgagagtgatggtccaacattcgtcaaagtgaaaactgatttggaatttttaggaggatgaatagtcaacacgacttggactgttcctaggagtatgagcaaatttgttggctcacacagtattgtttgcttaagtcggaaaaaagaagtttatgccaagtataggactatgtgattctttgacacctcaggctggatagcagcataatatgaaaatttatactaacatgaaggtttttttttttgataggcaacgaaagcaatatattaatattataattccgttaagtttgttaaaacgttgaccattattctactaattttacaattgaagttcaacccttgttgtgcttgtggatccttttatgatttgaagtaatggttatggtttcaaaatattttaacatcataaacttgttcaaattaattccatttccatgattattgaactttagtttaaagtcaaacgcttataagtttggtaatatgttaccatagcacactgaaagaaaacagctacaaatgatagcaatgttttaagtggtcctttttgttttcaatgctagctacaaaatggaaaataaatcaaacaaaaaccttttttaaggtacattcagtgactaatatgtaagttttgtcatatttgggtgcggattcatactgcttagcaatcactggaatttttgacacagaacatctaaggctgcaaaaggagtcttttgttttgatggaagttctaaatttaattaatgtttatggatgaagtagtgggcagtatatagctgatctcccttttataaacctgtgaaaaatgtctgattcaatcaatatcttcaaatagtgattagagagcagaagtattgaagattttgataaatattttcaaaagaaaaaaattgatgataaaattttcactgcaatacctgtgataaggacacttctgtattggaaattgatgtgttcatacttcctgtgtcagacatccatttaaacacttacagaagcgtctttgttaacttcaacagtgtaaagaatgacaatttttttataactttatgttagagtgagtatggtgcttttacttcattatttaacttcctacttttcttcctcctatgaaaacagaagctcaaaacacataagggtgatcgaacaatttgaggtctaagcctcgatcgttcaagaacacattctgaagcagtgaaattagagcccaaaatttggatacagtgagagaaatcactttataaaagcttcctaccaagttaagaggcatagaattgttgccattaagggatttacagtcctggagataaagggaatgaatgttagttggtgatcctgacatcctgttgatactctttatgaaattaactcgttggacactttctttagatccttttcagcaccctcttggctatcttggtaaacagttattaagatgcaactggtacttggaggtttatctcatcatgaattcataacaaatctgttgtgtcaactataattacagatattctagtctctttatgacatatcttaagccatcgacaaatttttagtcccagtttgaaacatcttgggaatacagttttctagacgctggtcatttgaaggaattttgttgtaggaggctcaggaaagatcttacataggttgtcaaagatgcttcacttgaaatttatttttcttggataatggttcctgttcttacaatttcatctgctctttcttcttcagtaatcatatttcaatggaaacttgatcttgcattttgataaagacgactcatcagtccttggaatttaattttttccatttagttgacagttcccaagttttttataataaggaaatatattaagcctgttcagttccatctttattttttcaaaataggacacatcggtgttgaggagcaagctcttagagca

SEQ ID NO: 12672 - DNA, 13907 bp, Vitis vinifera
  Intron number 2 from transcript GSVIVT01009171001 (locus G SVIVG01009171001) derived from phytozome v7.0 (chr-ID chr1 8; pos 5695062 to 5708968)
tccactgggaagctctttgactattccagctccaggtactgctttctcttttcctctcctttcttctattcttgctagatgtcttcattaatgagaccaatgtgttctttatttttttcaacttcctgagaaggagggttttgagtttcatcctttcaaagcaataaacgaagcccgagagctttgacatgattcgatgcaaggttttgaaaaaaactcatctctcaaaacaagaaaataggagaacagaaaaggaaccatagccagatcttccctgaaatccctcggtttctggtttctaagcacaagaagtggaggaacctcgtgtctcacactacactacaccactttcatcaacttttgagacaacccatttaagaaaataaggaattatagaactcaactctgcaaggatttcctcagctctttctggttgaccctcttcttcattgcatatagattcttcagctttgcttataagttctagctgctgaaataagactgaaactggttctgggtgtgtctcacacagcttttggagcctcgccgtactgaaaatttcttcatttatggtatgaaagaggtggagatcataaactatcctacataaaatcttttacatttatatatatctcatgttgtagtaccgtggaaaaacatttccatttaagactagtctaatgtttgtgatcatatttggggtttgtaggaacttaatttgtgtccgttaggtagtgcaagtatacctccttatcctactagctagagccaccactacatgggtcaagcacttatctatcatcatgtcatccatcgatacctcactgcacgtacttttccttttcctttttctttcccttttccttttcttctgggggttagcctgttagggataatggggaagttgattctttcatttattctcgctgcaaaccaacagcctttagtagttgttgaagcttgacaattacagtggtcaattaaccaaagttggggctcatttagaattgcaaagtgattagatgatattgatctggagttaatgaaacccatgtctgcgtgacctaaactcaaaccttttagaatatagactaccgaggtccttcaccataagctgactgcaagtctacaatacatgtgattgacgatatagatgctcagattcacaaggttatgattgttgagtacatatctgtctgtctgtctgtttgatttatggacactcttggtctattccctaatcactctacttttgggtgatgtgctacttgaaaagacattaatatcatgtgtataaattacaaaaatgagctactttgctgaaaatggactaagtatatctgcacatcgcacaacttctatatataaagaaagatctgactggttagtgaacatgatgaaagggtgtcttagctcatatttggctagttggtgtgttgctgatatttcaagaatgaggtttagctggttcttccatttgaagcttaatttcaagtagctggccaattgcaaaataagccagctctggaaaggtccttttagccaataaaaacttacttatctgaagatttagatagatataacagtgggagaaacactaccgtggcttggtgaaaaccagaataggtaactgtgcttttggtatggctaggtaatggtgcctttctctaggtgatgcagtgtctaagcaattcttaggttctgtcaaaataatatgttgatcatttcctcaaaaaaccatatcaatattcccttattcttttaaaacatgttgacggataagaacataaggatttagttacttgattgcatggtgctcttttaaacaatattgttttttcataagtcagtctcttcctttcatggtattgtctgtccagtgaaataataagatttgaactgtaggaatattggaaatttcataattatatagaagtttcctagccatcagtttccataacggtgtgccctcagctttgttcacggtcgcataagctctatgaatgcatgtgatagcgagcttgggtagacaaacatgcatgttccttaagaactgcctatatggccctatggtcacactaaacaatctcgaacagacaacccatgttataatggtttgtcaacttcttcaagggctgcaacttgggataggttcaagcaaacctaattacccaaccccaccttttacatttttgggcaacttaatttgtaatttcggttggatttggacaaaaaatattaaccccaattaaatctgggttaggcttgagttagatgctcaggaaacccgagcctactcgaacccaattatatatatatatagttttaaatgttaggaatgatttgaagttgaggtttgatgcacttgcaaagatttttgttattttactattatgaataattaatttatctttcttgattttgctttgtacttttgctattatatgaaagattgataataaacttttaaattacttttaagaaacatataagaaaaatcacattttcttcgaatttgagtggattgtttgtgtaatttatttgtaaattaaaagttcattttaaaatattttcttcgaatttgagtggattgtttgcgtaatttatttataaattaaaaattaattttaaaatatttaggaggtatcacttttactcctaatttgattgttcgtttggaaattgctttaaaatgtcaatcaatcttatgtgatggtcttttgttttattttaaaaaatttagttcattttattaattatagtaagggttgtgactattggattgatcaagtaaatcaatgttataaatttatgtttcaacatatcaaatagcaacggttctagaattataattaaatgtatgccacttataatagattgactagtaaaatatttaaggaaacatgtattaagcttatggacccaaccaattggaatgcatatttactaacccaagtttaatccaatttgagcccaagttttaagttaaaaaaaataaacttgggttgaaccttgggttgggtttaagtttggattgactatcaaacttgacccaacccacctaaattttgatttagtatttttttcttgaattttttaattcctaaccatctttataactattttttatgtattttttgtaaatgcaatttaagattttcttatatatttatcaaaaatttgttcttcaccgtatatgttatatcctatattggatagaagaaaagtttttttatgctatatatatatatatatacatatgaggttctcttaactatatagacgcattttaaagtcgtaacttttgaggttaaagtgaacaataattacatgggaaggagtgagacgttataaaatgatatcaaaaccaattcccaactctagtgcatgagtttgtttggtcctgtaacaagtacttatctatttggcctcataggagaaaaaattctttacacattttaaagctttgaagactctttgagctcaaaccaaacaatatttgtatgggagggagcaagttgttacaacatattacacatacgagtcttttatttttttttttataaccgtggatgtctgggccagcttatgcgcaacgagtcttttacttttttaaatcttgcacattggcaaattcaatgcacaactagaaataagaggaaatgaactaatattatctagtttttgatagcctggactgaaagctgacttggaaagagtttgggtttttacaataaaatgtatatatgataacaccttgacaacacctagtttgacagagacatcgaaggtgcataaaaaacttcagctgaattgttcttgatgtgggtacaaactctaccttcaaggtgcattcttaaatttatttataagtcgaacagtttgatttctaactaatcaccacgtcgctagcaatcctattctatgaaatacatatatatatacataaaagggttctttatataaatttttaggtcatgcccatcaaaggggccgattggtaggaaaagcctaagatggcttgaggagacaccagtttaattcatgtatattaagctcaaaatcagacttgaaggcatcttcttaaggcatgcagttcaagtgcttggctctgctccagttctgatcatcatccatttacaccagttttgcaggttctgaactagtttgaattatatttcatgcaaatgaaatcaaggatagttcttcccccatgtcaaaacattatcagaacttgatcaaagactgccctaagccaaggtgcccctcaaactcaatttgttatgccacctattatgttcagaacttaagttcagtttcgaataggtcttaacatggtggttgaaagttgaaagttgaaagctaagttcaatccctgagtggctaagctttgccctaaagttaatttgtagaacacagtagctgggatatgtaattaagaattcataccgaatttcctaaaccatgaacaagtcttagtgatggcaagtgactggacacacaccagtttttttttcctcccaaaagaataggtgaagtgatgaaaaatactcacatgtagagaataaggtgtggtaagaactaagaactagagtgcacaagaaattaccaactcctactgttactactctagtattaaaccctctccatagatgaaggttacaaaatgaaaggctagttaaactttgcacaaccataaaataattatctcaagcccaaaaaattaatcaaccttcataaatgaaatcacaatgagacaacaatccaaatgaacctcatattcggatatgaaaatatatgaaacacatgaaatatcataaatgcctgcaagacaaaactttcacatgcattataaaaacctttttgttgattctaatccatttccaaattattttgaaaattttttgggagaatttttttagttcaaaacattttctataagcaaagcataaatctgcacttttggcttatccatatattggcttactaaaaaaacactagaatccttttgatagaacacatcccttttataatatgtatatctataataatagaaaaagatttcataagtcattttctttggataaaactattatactcaaattcctatgatcatacattagtaaccaagagtatattttctacatggattccttacttgaattaatgaacccacaaacttaatacactatacacccaattgtattcctattaaagattttaggatcatgcatatgaacaatctaaatatacaattcaagaaccttgaatccgttaattctttcagaatcaagagaacttactatctcttaggcaagtcaagcttagcgctttataacagtcatttaatgaaaccatctagttagcaacctcatccaatacataaattgtgagcttaattagtcgtatgattgagtcaagttactcatgtaatatagtaactattcattgtaatcgagcaaaagagattacccactttcttttgtgattatgacctaatttttagtttggaacgacttgataagcatgaacttccatacacctaatgctatgtaccatggtcatctacaatttgaactttgagcactttaatatactgctcatatattaaaatatgcacaacctatccaagatatacaataaaattcataataaatattttattaattaaataaaatgtccaaaatagtagctttcaagcatataatctcaacaattccttatttgcacttaaagccattttttactacatcaaactcctaaaaccctcatgtgagatccgaacactttccctataaggttctttgtgaatggatctgttaggttctaagctgatccaaacctttctccaaaaattctctgatgaaatgatacttttttgtgtgtttccctttctttttgttaaaatagaacccttaaaaacatgatataatataacaaataagatctcattaatatatttatatgttatgatttttggcttctttgattgcattatttactattcgagcatttacacctatatcacttgtattgtacatgacttggatacattaaaagttgcatagaagatcagagtcataggttccttacaagataataacatgaatgggttctctacaaaagattaaagtcaaaatagggatttggaaagctaataaatatgggatattcacacaaaacacaacatgaatgcatgaacattctccaagggaatttgagtgttaggagtgttggagtactccttacaggtgcttaaggctccttcttaagttttttttttaattatttttttattttttaaaatctactttctatcttgttatgcatataaaccctaaacctacaatatacacttgaaaaaataaggctaatcttaattgggaaaacacctaagaggggggtgggcgtgggggttgaattgggtttttaaaaaaactttttcaaacataacaaattcaagcaaaagaagcacaaatgtaaagagatagagttagagaaagcaaatacaaattttatagtggttcgacaccctttgcctacgcccactcttcttaaactcctaattgagtgagagttccactatccttgaagcttcaaccaagcttccaatgtttttacacttgatcgaattctaggtccaatgagctcttacacaatcctttaagtaaccaccaacttaaaactttctattcacacaatctcacttaaacataatgaaagaaactctcaaggtagttcaataaaggctcaaatacaactgaaatgctaggaagaatgacaagggtgcactaaagaatatgcaaatgaggatttaatgcatcaaggagagaataaaagcttttaagtgaaaaacatgtagtgaaacaattgaatgtaggtgttctcatgctcataaattaatttatagatttctagcatcgggagccaaaactaccaaaaagtagcctcaaccaattaagttgggggtcgaccagttaactagccattaagtaataaatgcatggtaggtgaccgttgagtctcaatcgggccttgatcaagaattcctacccatcgatcaagaatgtttagttactggaagaaagagaagattttttttgaccggtcctcgattggaaaggcttaatcggtcaagtgataccctaatcggttgggccggttgaccaatcccttgacaagttcacctattttggtctgaaaacctatctttttctattttttttttcacttctaacacttagataagccctttaagagtatgaataagttaaatttaaaatgatttgtctaggttttgtataagaaaattcgagttttaaaggaaattttactttaatgcataaactaagtttttaaagatgcatgaaaatatatgaaaatcctaagtgcactcatgcattccttttacatatgtttcttgagattaaaatgtcttctatatgtcttgattttgcatccatttggtcttttgatgaattttttggatatccttttgaattttcaaactaaaacctgaaattcttttaattcaaaataattagcaacttagtcatggtttgttatatcaaaacacaattaggagaacctttgagctaacaacgctttatgtatatcattatgctctgaacaactcaattgtacttatctaaatagtcatgtgaatgaattttggcaacaatctcgtgtctttagagccattgtaaaacccaagaagtacataagagtcaaattcaagaatgtttggaacaaaatttttaacctaaactaactagtctagatcactaactcatcactattgaaaaccaacatgtaacttttatttttttcacgtacttgaaaatgtgcttaattgatttccaatgattaagtctaggattggactaataacaactaaccattcccacaacataacaaatatctagtctagtgcatcacatgccatatatgaggcttcttataattaaatgataagaaaccttctttttttacccttcctcttctagtgtctttagacattgcttcttgcaattaggtaatccgtgtctgaaaggcaataaaccattttgggattcatgtatagcaaatttgactagtatcttgttgtatgtatttcttaggacaagcttaacatcattttctttctatctcgcaaagcttgatgtcaatgacatattggcttctcttaggtctttcatattaaaaggatttgacaaccaaattttgattgatgataatactctcacataagtactaatgagaagcatataatctacacatagaactaggaagaccactaagtttctctttatccttttgtatacacacaactcatccatgttttgatcaaagacaaaggatttgacagctatgtcaaaatgtttattccaactatacaaatcttgtttaagcccatagatagatttacaaagcttgcatgcgagatgctctttctttctactatgaatcctttggctatgtcatatagatatcatcctcaagatgaccatttaaaaagtcatcttgacatccatttgccaaatctcataatcaaaatatgtagtaatggaaagaagaattctaatggacataagcatggcaacaagtgaaaagttttccttataattgattatttccttttgagtatattgtttcacaacaaccttaccttgaaggttttcaaccttcccatctactcatttttttcttttatagattcacttgcattctatgagttttatcctagaaggtgattctacaagctcccaaaatctactagagtacatagactccatctagatttcctagcatgaagctattagcttgtgtctttgtttgttagaaatagctttatcataatcattggcatttgagcatgttccaattgaactgcctcttgggcttcccttaaaagcgtgtatcttaccaaatggtgttataactttcccactatgacgaagttctagtgtgggttaaggaatttcccgcatcatatatgatatttctttctctaccattagttcatctatcttagggcctacctttttatttcctaatatctatgatcatgaaataaatgagttctaaacccttttggttatctaataaacaaacacactacttttgatctagtatccaacttgtttatctttcccttttgaatgtgtgtagggctatataagtgtcttagactgggggcccaactcataactcacatggtgccttaggaattgatttattgggaactagattcaaaagataagtggttgtatccaatacatatccccaaaaggatgtaagattaaatattatcttgtcattaaactaaccatgtttaacaaggtcttgtttctcttttttgtaacaccatgttgttatgatatgctaagagttgtcaattgtgaaataatcccacaactaaccatatggtccttgaactcattcaagagtattcacctccttaatcaaatcaaagaacttttgatgtttttcctaattggtcatccacttttgttttgaactccttgaatatttttgaagattcagacttgtggtgcaataggtaaacatggtcacatcctgagtaatcatcaataaaagtaataaaatactcatagcctcctaaagcttgaatacgcatgggaatatctggatgtactaactctaacaaatcatctacccttaaccctttagtcttatgaggcctcttagtcaaattttttttctatataagattcacatattgggtgaagtccaatgcttatggattccaagagcccatttttggtcaatctttataccctatttagattaacatgacctaggcgtagatgtcataaatatgtcgagtgtatgcaaaaagttttcttttattagataatgctacaaataaattaagattaggagcatcgttatttgcagtaaagtttatgacatgcatatcattctttaataaactagaatgtatgatagaaaattgtttctttattaaaccttattggataaggaaatggtataaccatctttatttaaacaagaaataaaataatattatgcctaattctaggtgcataaaagcaattatttaaaactagcattctcctactaccaacatccaagcgaactacacctatggctttcacttcaacctttgcttttgaactagggtcaaatacgtctctcctttattgaggtttttgtttatatagaacccttgcaatgaattgctaacatgattaatggcgtttgaatagacaattcaagagctagtagagtctaccatactacatgtttcaatattaaagacttgatatatactttctcacttctttgctatgaacttggagcagttgtggcatgctaaaatcacttcctgtcgatcttgttagcttcatcttttttttttttttgccttatttttctaaccttttttctcttcttgcccattttttatataattgtttgtgtttttagcttttctttagtaacaaaactagctcgagctatcgcacttggtttagatttaagtatattctttgatgtttacaaggtattcaatagtctaggcgaggtatagtgtaatttgttcataatatgatttaacatgaaatgatggaatgacttgagatgagattgtagaataaacactagaatctcttcattgaggcctccaagaatctctagttcattaaggtatctgatctttagttctttaaatcatcttagtattcattagctccttgaacatgatttggcaagcttctcacccatgttcaccaaacattttgttaaggtttagcatcatcttgctagtagtagtcatagattgatgttgttgccaatgttgaagcacgtttgagatagatgctaaaatataacatctaaccacctcatctaccttatgccagttagtgtaggtatgatgttcctcttgtggtgcatctaagacatgtaaagcaagagaaccataatgattacaaattttacccctcaacagtaagcacaatgttaagattacagtttccaatcaacataatttggtcaaattaatttgttctctttaagtatcataacaagtggattaatgctagacattttatcgagaaaacaaagtaaaaataaaggagggtatctccttggagtgattactcccactaaactaatgtggactttatccaatatgggactcaaactaggaggtagtatgctagtgacattatccatctttcatgcttatagacaaggctctagcataccttacattgagttaatctatggaagctcatgggattatgtatcttgtcacccctcaccatcataaattttcttgtagagtttcatttgtttagatctatgagcatcgaaacttttcattcatgaaacatacatttaaagacaagaataattatgataaaaattataaatgtagacaatattcaagccaaatccataaaaatccaaaacaaataaaataatcgaagagggcgcttcattattctgtatggcttcgtaactccccccctttaccattttgtgctatgagactccttttagggtctctaagacttcttggacttgtctttgttgcaaaaagatctcaatatcaatccaaactctagattatctattttacattctttttcttatgatcatataagaagatcttacattcaaatctagaaaaggaattataaattataggcatagggaacaatactaggactaccttttctcgataaattcatatccaagcaaccctttgcaagtgccaaaatatcctactcaactaatccataaaacaaatcctagcttgctttattaattgcatttatatgatgtttaaaaaatatttaaccattcataatgtgtgtatatatatatatatatatatctttcaacatcatataaaatccaaaccatgtgatcttaatcatcatatcacgcataaaatagagatgcatggtttacttgattgcctatttaaatatgagatgattttgataccacttgaataagataacggtggtgcaaagctaaagattttttttgaaaaaatttaaaattttttacttaggctaaaagtcaatccttttgctcctttcaattttcaaaaacaagtatggatacggaattacctcattctaaatattagcaaaaaacatacatgatcattcatattgaatagaaatcataacccttattctaaaatctaaaattatttatattcttatcttttatgtctctttttttgtaaataaattcacaaactttgttgaagcatttttttgcaccatacaatcttcaataacatccttcttaacctttgtgcacttggagagtaggtttcttagaaccattcttgaacctttgtgcttttatggaaaaatagatttaagaaaaaaagggctttagaggctagggtttttttagagagatttttttttccttctctactattctcttcccaccaaccttttttatagagtataagagagaatgtcaaagtctttccatttatgttaattattcctaattatattattattctaaaatattctttacggaaattttagaatattctcataacataattttggaaataccttaatatgacttttgataaaatagaatatgtagtttattattaagtaaaaataacttattaaatatccatatatgaaaatattgaaatgtgtgaaataccaaaaatgcccttagaacaattttttcacatgcattgtaaaaacttcttggttctaatacattcccaaatcactttgttcaattctttagggcatgcttggttccaaaaaagatatcgaggaaaaaaattgattaattcaataaagttaaaagaacacctaccttgttgactaaccatttttattcttggtagatcttgagttttatctatatttgatcactcactaaaagacataaaagtccctttgataagagacatccttataataataatagaaaaaattccatgaaccaattttttatgaaaccactaggcttggacttctatgattatacaacatcaactaagactacattttctatatggattccttacttgaatcagtgaaaccacaagcccaattaactacacatgcaattatactcctattgtaggtcttcggatcatacacatgagcaaatcaaaatgtacaatttaggaactcttaagtctattcatcctttcaaattaagaacatttactgtctaacaagctactcaagcttaatactttattagtcattttgtgaagcaatttagtcagtgatctatgtccaacagtacaacaaataccgatgtataaattgtgatctcaatttcttctatgactagtcaagtcacaatatataatataataactatacattgcaattgaccaaaagagattatcgactttcttttgttactgtatgaactaatttttagtttgtaagcaatggataatcatgaacttttgtacatgtttaatgttatatacaatggtcatagtcgacatgcaataaaattcataattaatgttttattaataaaataaaatgtcagaaagagtggctttgagggcatacaatcccaacaaaatgtgtcatcggttgatccttaaaaatggctctctcacccacctttttttggatatcttgctgatgatggtcaagtgaggtcatggccagtacgtgcatgaatggaaaatattttggactacaatatgtcaaatagatttgggaaataatgtcattcatggatacttctatatgttttttgatcaagactactccatagatcctggcttaagctataaatttccgtatgaaattaaattcagctgtttgatatgatttttgactttgaaacattctaaagaaatttgtgatccttttatcatatgaagt

SEQ ID NO: 12673 - DNA, 2550 bp, Vitis vinifera
  Intron number 18 from transcript GSVIVT01031124001 (locus GSVIVG01031124001) derived from phytozome v7.0 (chr-ID chr 14; pos 1936379 to 1938928)
aaaacggctcgtggaaggttagcagcaaaactcttaatacagaaacgataagttagacccattttgccatgctgtttatgtattaaaaccacaatttcattattcttcttccttctgtcagttatctaaatttggaagtgcggagtgcgatcgactggtattggtagaatagataataaattaaattaactttgaaatcatttggcggggatattgcctggtatagatactgtgatgaaatcttaagggaagaattttcaactgctaagtaatcatccttcatccttcatcctctttgctcatggatttgaaccaaaactcagaaaagaaatgcatcaatgtcaagtacaacaaattgtgtctcttatcactagacgttatagattcttgttcaggtgcagaccacagttcagtgcgatgccgcatcttttggatgcggaactttgtccatggaccttgggtaaggcacaatagtagtgtgctgttagaaccccgtattgccttttcctcaagcaaccccgaacgtgaggttactagaaagaggaaaaggctactcttaagtacttattcaaaagcaaagaatcaaaagccctttgccatttgcttcttcttcttcctgttcatccttttctcgcctaaatcaatggattttggccccatcttttacgtcttgattggcttctccatgtcggtctccctctgtttgccaaacctgaaaaaatggcagagtcaacagatcacagcagagaaactgaggatcattagcgaggccctggaacacgctgaagagagagcaatgaggttccaagaaaggcacgatcgtgttctcagccaggtaggctcttactacctctgcaatcaggagcttctggaggccttggcggtatcccgaatcgccatgaatgaagccctggggtttgctgttggactgaggaaaatgcagatggagattatatgctcttacccagatgaagttgatgatgtaattctacgaagactctctgaaaacacaggttcagcctcagccacccgaagaaaccgttgagaggcttttgcttactccgatgtttgtttcccaggaatgcagactgtgttcattaatcgaaataaaaaagaaaattttattatatctggtattagtaaaaaacaaaataaatatataaacttcatttcattttgtaaggtaatgataactatcattgttcattctcatcttcactagaattttcaatacattttacatatagtggaactaatttctttatttcttatttttatttacataatatattattaaatttgtaggattgtggagagtgtaaggtttcgtttggcttacggaattcaagaatgggaatgggggttatattcccactcaaacaattccattatttgggaggatttttaggaatcatgaaaacgacttttgcttattttttaaaaattattatctatttcactttgtttttaaaaattttttataaagaacaataaacaaatattaatataaatttttaaaaataattttttattttttttatttttaaaaaaattatttttagaactttttttgaaaagaatgtatattttaaaatctattttaattgtttttaattatttttgggattgtttatgaaataatcatacaaatatgaaaaataattaaaataaaatcttacatgtaaaatttatttttaaaaaatataaaaaaatataaaaaaatataaaaaaatataaattacaaatttagcacattccaaatttcaaataagattttattccaaaaagcatcataaaacctattttgagaattgttttcaaaatacattttcaaatagattttacgtgttttataaaaaatgaaaaattacaaatctatcccttgtatttatttttaaaaaaaattaataacaaataactccgttatgaatataaatgttataaactatcaaacctattttcaattaacaatataatcaggtgagtgtatttgataagacttttatttaaatgttattttttataagcgttttgaggagagttttctatcaaatactgtctagaaacttctttttttttttttttttactttttcaaattgtttttattatacttttttctttttctttttttctatttaatttaaaaatatatttaaaggaaattcaacttgtataaacctttcctgttattatataaatttgattaatatgattatcaaatattaattatatttctaataatttattgatttttttaaatctattgttttttatttacttttaatttttctcactattttattttcttcacatttttcctcaaactttttggagccaaacacatcctaatattaaaaataatattaaaaaagcatgttgaaaatgattttttaaaaaatattaagaatatgtcaatttctttaaaaaagacaaaaaatttattaataaaaccataattcttttttttttaaaaaaaggtactgatcttgctagtggtatgggctagaaatcagagcgtcaaaaaatttgggccggcctcaccagaacg

SEQ ID NO: 12674 - DNA, 658 bp, Vitis vinifera
  Intron number 11 from transcript GSVIVT01021239001 (locus GSVIVG01021239001) derived from phytozome v7.0 (chr-ID chr 10; pos 2892390 to 2893047)
gtccattaccacctctcttcaattttaagcaggaagtaagggtttttattttatttttatattttttattctatataatttctaaactaatttcttgtctccagcctgaacatgtctgtccataatttcttcatgttgttggacttctgggtttttggcctttcaattttgttcaatataatgagaggccttttaaacacagatccttttgcacataactatattaacaagaattgagttcaataaatcaaatgggtctactgatatgtctagatcatcttcagttttatgatgtgaatttttagtctttcatgctgaattgaacctgatttgatggagataccttcattgtggaaacaatattcctgactgtcattagtaggttacctatgcattttaggcttgttatatatatatgggttttgttcatgattcatataattgtctaaagcaattggcctttgtctgcatttgttggaataagcctttgttaagttgctttgtattgggaaattattctgcaaatgtgcaatttcttagttctagtattatgatttctttttgtatgtttctggtccaagatattcttaatgttcacttgttatctttattgtgattcacagttatctggggcttctcctgagcttgttaataagtt

SEQ ID NO: 12675 - DNA, 604 bp, Vitis vinifera
  Intron number 1 from transcript GSVIVT01033307001 (locus G SVIVG01033307001) derived from phytozome v7.0 (chr-ID chr8 ; pos 21628147 to 21628750)
ctctatttccacagaaactgccaaaggtgtttatttattttattttatttatacgtaaaattcagttccctcttcgggtaccgagaaagccgaggacaagaaaagaaactcaaatttggagtccaagaaagagtggagattgtaacaaagataaatttgagattcgatgttagttttccctttttagtgaatcttctccctaatcgaacggaacttgttatttcgttccttctttggttcgcttccgatttttcttgaggtctgaaatgttctttttatgatcaatgtctgacttagctttgttatttttatgatatcttctgcagaatattgttgcgttttttttcattaattcctcctttgttgcgatttggtttgtgtagtttattaattttcaaattcttgttatttaaaatatctactagcaatctcatgtgttacaatcttatgaattttattttttatattttgaatcttattatggtgttaaaatcataatagtttcctgtgaaattcagtttggcaatggtgcatccaatatcttggtgcaattcgagacttctaacaccagttgtataatttcttagagaaaaagaggcaatta

SEQ ID NO: 12676 - DNA, 10666 bp, Vitis vinifera
  Intron number 9 from transcript GSVIVT01022468001 (locus G SVIVG01022468001) derived from phytozome v7.0 (chr-ID chr8 ; pos 3398511 to 3409176 reverse strand)
cattggttcgtgtactttcaaccgggaagcctgaggtatgagcaaacatctcccttcagacctgtactctttcatttctccttcctctaatctttttaaataatcctctgtaactgcctcattttatgcaatataaagcaaattatggtactgaccctttgaaagcaaatcatgacatgctgtatctccatatagcatatcatgccaaaatatgatcgaaaacttccctccttccctccttccccataagcatttcacatgcccatcccttagattttctaatttctttttttttattttatcagaaacgaagaagaatattttaaagaagaacagatacaggagagataaaagaaacaaaagaaagagagattttctaatttctaactgcaccattccatccttcattacctccacttgttcacttctgtccttctttataaagtgactctctcatgcaaatctttataaacacttctcaagaaaagctttataaaaactgaatgccttttatcatcaaattgacacctctaaccctggaacacactgtgttcttaccatgaagtggtatttcttcccttcagatttttttttttttttaactttttgtcactgcaattgagattgtgaaacttgaaacgaagggcattggaatattgaaaccaccttgacaatggttcatccaaatgcattgatacataaatgtaagcataataatacctaaaaaaaaaaaaagccaaagaatgacaaaaagggaaataatacattggagattaaaataattaaaggagacaaataatattacatataaaggtactggaagtctccaaaggggctactttgttgttgcaaaaaaaaattgaataatacttgaggtctggacacttggaaccgttctacaactcaaattttttaaccacagatttagttccatgtcattgttttcttgactcttgatactttgttctcaactcaatttttgttttaactacacatttacttccaatgtcattgttttgttgacatttttttggtctatgtattttcttttcttctgtaattcttaatgaacaattggatcattaaataatttataaagtcgttaaaatgttgtatttccataaaattgatctgtagtacaaaatcaagtataagaaaatcaatgcatcaaagattacattatacccattttacttgaggaaattttaaaaattatctaataaaaaataaaattttaaagtttcaagtaaattctaatccttaattatttaatccaatcttctgaagcttattgtgttgggttaacaaatgatgctggaagaaagtgggaaacattctatatagcaatttagtgcattctgatggaaaagaggagttgaaaaatatgtagcgattttcattttgccctgttttgactcattgatgacactgccaagtgttgctgaaacttgtaaattttgttgggactatgcgatgactacctatgcctttgtttcaaacctttgggtttcaactagatttttgttatgttatatttctggatctgtgattgggtaaaccaatatatttgagatgcttgcagttttaaaccaatcgtttgtggcacttaaacaaaactttcggccttggatcccaatgatgaatgtagtaatatataattggatcttattcgtgctcctgacaagttttggtgatataacttttaccttgggtgcatagctgaagtgtgaataaatgaaggcactcctaaatgatttgtcctatcacaatcacacacacacacacacacacacatatattgctattcctaataacttttggtgacataacttttacctcggtgcatagctgaagtgtgaataaatgaagtgagcatactcctacattatttgtcttatcacacacacacatactctctctctctctctctcatacacacacacacacacacacacatatataggaataagagaaattttatgaatatgaagtaaagaatgacagaaaaggattggagctccttcaaagaaacataaaatgcatggctaaatccccatttctacatataacaccaatcatacaacaccaatagagcttctcctaatttcacacaccacttatgacaaagatcctttctcctcgagcaaggagagctacaccccttagtcctagactccaaggacatcaaactaaggggaatacaaaatgagaaaactccttagtcactaatacttactcccttagtcctagactccaaggacatcaaactaaagggaatacaaacagtgataaaactctttagtcaccaagatttaaagagaagacaacaggtagatgttgtcccactgcactgtgatggaacttgatctacccttgaaaacatctcataatcaattttttttttttgataggcaaataagagtatgtatattaataactataaaaagaatgtatggaggaaattacactgaagaatatgggagagagcgagagagagagtgagagagagtgtgatggagaggagagagaaaatagcttggcgtctcgcagaagaaggaaggagagcagcttcgcagtggaatccaaggcgttcgagatcattgtagatgaaaggaaaggaaaaccccaagttctcatcgtggagaagaagggaggggtttcgtcatgggtccgactgggaccgaaaagcttagggtttttcatagaaggcctaaaccactgcatcaaggacgagaaagaagcaagatgaggaagggaatggaaggaaaaggggagattgtattccatgatgcgagggataaacagagcgggggggtttatccggttaggggtttttgatctggaaaggaagagtttctgcatcttcatcccgagaggcagaggggacaaaaggggatgagtgattatggcggagaagcttcatcaactggtaggaggtcttggtagaaaatcaaataaccaggaagcaaggcctgtggggaagtctgttgtggaaagctcgtatgcaacagtagtgaagaggccaatttggggaaatacaaactcaatcgcaatgaaggttaaaagggaggaaacactaggaaatctacagaaattggaacattgcgttgtggcgagttggaaagccagtacagaggaagaagaagatctcgagagtttgggaagattttgggcaaagtcttggggtctaagaggaaatttagggttggctaagttggaaaaggatagattcttgttggaatttgaagatctggaagaagcaagacgtgttgtatccttagggaattgttcgatgggagaactccaggtagggctggagcattggaaccctaggagtggctgctgggtagaggcagatgtagaaaatgaagtttgggtgagaatcgttgggcttccaatctcgttatggagtccgatgattttgaaaaaagtgggggaagaatgcggtggttttgttgcagttgatgactagacgaagacgatgggtgagattcagtgggctagaatcttggtcaaatcgagaggagatgttatgccgagtgtattggaaatcgaagtggaggaggatgtctatgctctgtcattgtggtgggagtgccgatcggtgttgaggaaaaaactcagcgaagaggctagacgaaaaagcgtcgaggttaggggtgatgttgcttcatgctcggagtagcgcgtggaggaggagtaggtaagcgtgaggctcgagacgctgaacttgtcaggtgaagagatgggtgagcagggggcaagtcgggccgggtgacggtaaacctagatcaaagctcgacaatcagggattgggcctcaatcggtaagatattgtctgggttgtcttccttaggcccaatcatgggcccaaaagaggcaaggagggctggtgggcttggcctggctaatggaccattgggcttaaagctaaaaggagtggcaaatagagaggatggtccagaagcaagcccatcgtcaaggaggtgggctgaagaagtgggctgccatgcctcaagcaaaggcccagtcacgtcaaaagatcaagcctcaagcaaaggcccaattatttcaatgggctgccaaaagctgattgatttagaaggaaaggcaagggctggcccaatctcgctagcagcccaagcctcaagcaatgactctcaggagaagggctatctattggagcgcaccatctccaaaaacgggaactcctcagagacagagccctttgtcgcatgggagtcagaggatctaaggaagcagcaaacttttgctagttattcagtgacagacagggcgcttgaagaggaagccttgaggtatgggtcggggttttgttctaggggagaaagggttttgggggcttctcatcttaatcctttttattttgatcgggctccggagggggagttttacgatcgttctggggatatagaggaggaaattcgggttgataaaacaatgtggttaacagtgtatgagggatacaatgagaaggtcagtggctgtagggacttgggagtaaccaagagaagcagtgataaagtcagggggacggagggggcctttggcacacctgaaatacaagctgtgagaaatgagcctgaggaaaaatgggaggagagtagtttggcaaaattcagtcatttcttaggattcccgacggagggattggaaaaggaaattctgaatttttttattaaaaccataaagagatgggagaagatacatagtaaagagcttctggaaaagtcaaagttcgaaagggagtgatcgctcggattttgtcgtttattggatcaaaacaaaatttataacctaattcactattctatagcaatttgtacccgatcaaaaagtggttttagtacaaactactgtaatatagtggtttttaggtatcgtccacaaggatggattattcttgataattaaggcttgaatgagatgataagaaatgattgtgatcaaatgaaattgatttgaaaatgcatgataaaatttcaaaataacaatgatttcaaattgagaggaaaatgaagtgtaaaatagaagaaaattaataggagatgaaattctcggagttaggattttctataaaacaatttccatggtgaatagatgttgagatctaattttcatcaagttagattgaaaacctaaattttcatctaaaccgatttttgatttagctttaggtctagatctaatttctcttcaaattaggtattctaatccaagagatcaattcaattcatatattcaattcatcttaaattatcttccaatgattcacacaatgcactattcaatctcatcaaatctaacattaagaatttgatgaatctacctagcttgcattgtagtaatcatccaagacaatttgaagagaaaaatccctaaatttcaattaatcaatcaattggatcaaattacctttgcaattcaagctcaattctctaattcaccatagatcttacctctaaatcctccctcctccaagaaaaatgagatttagccactcatgcttggagatttgatctcacaagacatgtttggctaccgagaaaatgagagaaaatgaaggaaagtagagaattatatagagagaagaaatttggaaagttctacaattagaaaatatccaaaagtcttttttaatgagtcaatcacgtttctatttataggtcaaggtcaagtggacacttggcatcatctaagaggtcttccagaggcttattcatcaaggaatctggagaaaatacattttggcacgagcccccagcaatttcgcatgatgatgcaaagtggaaaatccatcagctgcattttcgtcttgctggagcgttttgcatgactgtgtgaaaattttgcatggtcatgcgaaactacttttcatttcccttgtgtgctgcagccaagcctattatgtttcattttgcatgactatgcgaaaatttcgcatggtcatgcgaaattgaaaaacatgctttttcgactcctctttgcaatttctcccatttctttctcttgattccacttcaactacctccaaatcaactccaaatcccgatccaaactgattgcattgcttctttcattatgcatttggatcatcatcaactttattcttcaatttgattcatctcttttgtcaccaatttatcaaaatcatatcttgaaatgactccaaaacttcataaaacttgttagtaacttttgcaagggcaaaaacatgttaattgagtgttttaggcataattactactcaaaagatgtgaaactcatgagaattattatctaaaatatgctctttttgagtagtaatcagggagttaaagagattggagtgttctgtaaactatgagggggggaataagcaaaaaggctcggtacagggcaaagggagtcaaattgtagttgcccaatgaagctaaaagtcctgagctggaatgtgaggggagcaaacgatagctccaaaataaaaattattaaggcttttataaggaaccagagggtggttttactttgtattcaagagacaaattcatggggtccttaccctctcagtatttgggacttcctctaggggctcctaatagagctccttatatgtgggatggggtggaagagagagtaaggaggagacttgcgctttggaaacagcaatatatctccaaagggggaagaatcactttaataaaaagtactttggctagcatgccaatctatcaaatgtctatttttagaatgcccaagattgttgctagaaggctagagaaagtgcaaagggacttcctgtggggagggggaaatctggaggggaaaattcatctagttaattgggaggtggtttgtacagataaggaaaagggtgggctaggccttaggaagctagccatgttgaacaaagccatgcttgacaagtggatatggaggtatgtttgtgacaaagataatctttggaaacaagtgattaaggtgaagtatgggcaagagggtcttggatggaggccaaagaaggctaatggggcggttggagtaggggtttggaaggagatttggaaagaatcagattggtgctgggataacatgatattccgagctgggaagggtactaagatcagattttggacaaatgtttggtgtactgatacagcgctatcccattgctttcctcatctcttcgtcatggctgttcaaaggagttcaacggttgaggaaatgtgggaccaaaattctggtcaaggaggttcgaacctaaattttttgagggacttcaatgattgggagctagatatggttggggatttactccatatgctgaggggtcataggctttctttggaggaagactcagttttttggaggcaaggaagaaatggttagttcagggtcaaggaagcttatagcttgttgaccaatcctaatgataccggctttccttcaagaagtatttgggtggctagggtgccaactaaagtcgccttctttgcttgggaggcgacgtggggaaaggtgcttactctggatagacttcaaagaagaggggtgcaacttccgaattgttgttttttgtgtgggtgtgaagaagaaaatgtaaatcatatccttatacattgtatagtggttagagctttgtgggatattgtccttgggttagtagatgttaaatgggtctttccagaaactgtaaaggaggtcttaattagctggaggggctttattgtggggaagaaaaggaaaaaggtttgggattccattccgttgtatattttttggacggtatggaaggagaggaataaattaacttgggggggggggggtggttgaatatttagaagttaaagaatttttttgtctgtaatttgtgaaaaaaaaagaaaattgtggagttgggccaaattgtatttaggtgaggaggctttctctcttataggcttcttggagtgggtagcatccacttaaggggaggtgattctttttgtctttgttttttgaggccctagccgccttgtattatgctttgtggctttttgcctctttattaatgcatttccttttacttatcaaaaaaaaaaaaaaaaaactataaaaagaatgtcaaactaaagtggcaaatgcagtatacaagtgagaaacaaaaaccagctatagaagctacaaacccactttaaaaagaagagctcgcccattctataaaatctaataaagaggttggaccttcctgcctgtctcctagaaggaacccttgagaccacatatacagattagttacgaggaaatccttgagggcttgggtagtgtattgttccccttcaaatgttctttgatttcactccttccaaattatccataaaaagcaaagaggggatgttctccaaatcttcctttttttcctacccacaaagctaccatgccatccctccaacaaatccttaacggaaaaagaaagaacccacgaaatgccaaagaaggagaagagaaagtgtcaactctctagctatcccacaatggatgagaagatgttcaaccgattcatccgcatctttacacatacaacaaaaacctgccaaaacccatcctctcctcttgagctggtctatatttaaaatccggccccaagtcacttcccaagcaaaaaaactcactttagtaggagcccaagaatcccaaattatctttgaagggaaagtcacttcacccctatcttccaaaattgtccacatggtcgccagcaatatgagatgtgagaggactttgcttcagattcccaggccaaagcttttaaagggggtaactagcatgccttggactttttgtgggccaccctatatatgccagccaaagcaaaagatgataccacaactcaaattagaaaatgaagaatgatgcaatatgattctccactctaatgtatattgcgaagatggatgattgatttgacagaatttgagcctagatgtcattgtttgaatgtgtctccaatttctagtttagttgaaattctattttattgggaaaaaaaagtcctttttgttttagataagtaaataaaatgttttgaaaagagtgctaaaaaagtctttttctttttttgataagtaaataaaatgtttcaaagtgccaaaaaggggatggttgacatgtatatgggatgctttcaaggataacttaaaatctaaagaaaaaaaacagtatgtacagcttgcagaccacctgaaacatcaatgaatactataataaatatccttccatctatttatctaccaaactgttcaaacaaagggttcattgaaataattttcagctgtaattctagctggtccagaccataaaaagttcttctattgcattccctcaaaatatattaaaatatgcatactggggctgtattccatgcactccttttcccctcattaaaaacacgtccttgccagttagaggggacaaattagacatgacccatcaacacaactcaaacctgacagaataatcagctttgtgttgagtatgtcataatcatgccaatgcatataacctgctcaataaacttgtcaatttcaggtttggatgctcaacctatttaatccattgagttaattgtgtcataatcatggagcaccatacagataccttcagagagcatcttaatttgttatgtccattctacccttggtggagtttctatctcttcctgagataagaattgaagttgcctacctcatccacatgacttttatttactaatcaattgtgcaaataaatatgaaaaaaaatgtttcctactagcttcacttggattgtatttgttatccaatcatgtaaatcaatgtagtgaatgggttctccctgagaggtaggaaaccataagtgggggatattccaaattcttaaaatatttaaagacatgaaatttagggagtaggataaacatatatgatttttgattgaacaagctagcatcatgtcttacatacaaataacataaaacttaaaggtagtagggattgccatatatgatttttgactgaagaagtcagtatcatgtatcttaggcatactaatgaatggagcaggaacaaataattgttttactttacacttctgaaaaacaatagaagaataatcttcgtgcaaggcagtgaaaatgagctatagattttcatttgttgtatagtttcaggaacatctcttattgtgacaatatgattcaaagccattgcatttagaggatccgtgtttcctttaagaccttagaataggagaactgggttgaggtcttttagcaactaggattaaaaattaaaagaaaagaaactcaaatgtttaaatgttctatttgtttaaaagaaaaaagactctctctttctcctccacaacaacacaaccaccccccacaaaaaaaaaaaatcccccaatcgacatgcaaaaaaggaatagaatttccacttaatcatgactatgtaaacattgatttgagaatccttacaatactccattgataacatgtttaaggggtggtgaaccaaaattttcagttaagaactagttttcaatttgatttttaatagtaaattgcaaaggactatcattagcatcattcactgtcactctattttgctttaccatttttttgaaactttattttgtctttggcgtaggt

SEQ ID NO: 12677 - DNA, 4648 bp, Vitis vinifera
  Intron number 7 from transcript GSVIVT01011564001 (locus G SVIVG01011564001) derived from phytozome v7.0 (chr-ID chr1 ; pos 6436277 to 6440924 reverse strand)
gtaaaactaaaggggtttgctgaatgtgaagttgatttaatgattggtgcttggtgtttcgtatgtaataaagctttcccaagcttaataaaatcaatatggtaaacatccattattggacttgctatgcctctaatccatattttgaaagaagtgagtcactttttcaaaacaaggatgacattttcttgtatttgtaattttaaaaaatatagaggttacttttacaaaataataaatatcttgactttgtgaccaaaacattcctttgttattctcaaagctacgaaacatacttttaactcatatcttcttgtataacacattcacataaaaaaattttattataggtattttataattggaaattagtattttgtccaaatactttgatgaattccttggttgataagtaagggccaaaaatataattttgaataagtataattttatccaaagtttgaaatatttttatgcataactaccattcaaacattcttgatggatgacattagtcttgatggataacattagtctccattaaggataaaaatattgatttttattgaatgagaatgacatttaggtacttttcccacctcgtctttaatgagatgtgtttggaattaaataaatgaattagaggtttgaaaattttctttagaacttatgcggtttacatatcattttgttccacctcccctactacaagtatatatataattaaattaagggggagtgctttacaccttgactgagcatttaaaactttgacattttaccacttaaacttattaaatattaacactttgactccaattacaaatccttcataaaattataaaagatattaatctttttaaatatttaaattaaaaaacagtatatttatagtaaatttaaccaaagatatatattaaaaatctaataaaattattatatattcctttaatagaactatattcattcatttaaaaaatgaaaactacttttatttcaacataacatattgaataaaacatgaaatcttttcaaaatattaaacatcaaatactactttcaataaaaaatttaaattttatattgataatttatcttatcatattaatttttattgtaaacttatattttataaaatataagaaatttttttttcattaattgttttgatattttacttattttcaaataaacttatcttttcatattttaaaataaaaggatatatatatatatatataattgaaagtgaagtaataaataaaatgggaataatgtgacaaatatgaaaaaaaaaattaaaaattaagaattaaacgataatatataaatttaaaataaaatatcatgggcaaaatttcattttaaaaattggaaaaatactgctgcgccatcagccgggagtttgactttttatttcttttttcttttttctttttttttcagaattttttttcctgatatttcgatgatttttttgccgtgtgttttccttgctttagggcgtgatatttccttctttttttttttgtgacattttttctaggtcctaatcatttaatcacccgtatgttaatcaataaaaaaaattaaattattttaaggaacatgacacatgggaaggaaaagtgacatatttgaataacttaaattactagctattgagaataatataaagtatgttaaacttattattttattttaagtcttccacgatctcaatgattccatcaaatcaaacctattcatcttgagggtttattaaaaaaaaattgttgtttctaatttatatatttttgggtatttattagaattttagacctaagattattgattatttgttgcaattagatttgaaacttcttttttttttttctactttttcattaagcgattagaaagtatgtcccgatttgaaatttttatcattattgtttgtttgttacacgtttaaaaaaattattttaaatcatatataaaaatattattattaagtattttttcctctttttctcattgttatccatcattaaaattgaaatatctgaattcaaacattggactcatcaaatttatttatatttaaagaaaaataaaaataaaaaataaaaaattattttcatttaattaaatctaaataaaatttaatttaactcaattttaaatataacttaataatattaagtattaaattattttttcttttattagtttatttatattaagcattaatcaaaaagtaaaatattttagtttttatattcaataaaaaaagttttaaaaataaataataagtaaaaaaaattaaaaacaaataatgataattaatattaaataaaaaaaaacaaacatcaccaacctactattatcactctgtgttcacacgtaacaaacgcgacttaaaaatatttaattaaaaaataattttcaatattggttaagatgtggaatccgttttattgcatattttagatacaagtgcaaaatagaaactaatttaagaataagacatgatgagaagtttcgtaagaagcatgttatgaagacattgtgaccataaaaaaaacaatactaaaataaagcatctagaatataataagggaaatgaaaggcacactgagagcagccacccaccttagcttaaaaaatttcccttgttttattttaattcataaaacataagttttaaaaaataaacatatgaaacgtatggtcgtgattttgtatttaagtcatcatttaaattttattttaaaaggtttacttgaccttttaaaaaaataagataaaaatttgagaccttccgcagagatggggtcaatgagggcaggtagcagactgagtctcgcttactctcccacagcccacagcccacaacccacaacccacatccaatgagaatgcgttcaaaatcttgagcggttttctacttttattggtttaaccgactgtctgaggcagagtcagagtaggcaaactggattcgccgcgtcggttcgagtttcagagggttgactggcagctgccggtttccctcttccgcatttcggtaaacgcccaaaaccaccaattttgactgtgggcctattccggccgtaatcggctatactaggggctttcgcctttaatgatgcgggcacattgcaatgccgttcctacctgtctcttctccgttctctccgaccttacacgcattcaagaggaattttcttttgttaggagaagtttctttgccatttcagattgcatccaaaaaaggaagatgctgtttatgggacattcgatttttatcatatttttgtgatttataatcattaaaatagaaaaacaaaatggtaacctgaagagttttattacatttaaacgcatacgtcaccaaggttagattgatctggtcacagaacacccttgagtaaggaccattccgcagtctggggttgatctctgccaatttttccaacactcgtggatcacaattatgtgtttacctcgtcaccggtttggtttaagggttgaattccaatctgactcggctccaaaatgacaagaatttcaatgaacatgacctagcattttgtaaatccctccgttgtattattctttgggcacaacatgttggatttataacagcatacgactgagtattttttaaatgtcgagtcaaaaacttgggtatgtttgaatgaggctgcggttttgaatgggactggtaattaattccatccttggtctctaagttgaatgggttctaatgacttttttgccctattattatgcctttcctttttagccctggaaatatgctcgttcgttgaacggtttaaggtcggttggatgttttcaatttttttttattccggagaataacatgcaaatgattgaaatttaaaatattccccagtagcagtgcagtgaaaatcatggaacgtaaaaaattattatccacctgggctgctttaaaatatttgctaactatttgaggtcaagttggcactccttgggaaccttcccctaaattagaagtattttctgggattttggtgaatagcatttgtagcaatcataccccaacttttctggttattattattctgaaaatatgaattattttaaaattaaaagaatttggttgagccatatttacccaggaagaaatatttgtacgtatacaaatccagtccattaacttttggccccctggaaagctgacagtgcctattctaatctcccacttccttcactgcttttgctttttatattaaaaattatctaagccttctattacaaggcatcacagttgacgattttgatgtgatatcatctcatttgtgttaatgaaaaaggccccacacagtttaagcgttacgttttgagaaagaacaaatcaagaatcaaaatgaaaaagattgtcaaaataaaatatatatatttttgtttttatttgtatccggagtttctcacagactttataatacaatgacgtgcatgctgataaaagataatgtaattgggatccttcaattggtgcaatggagctttagccttcaatttgaaataagttccggggccggggccagccccagcgccaccagcaccttggttgagaaaattagaattgtaggctgtgggttctttccacgaagattaa

SEQ ID NO: 12678 - DNA, 12265 bp, Vitis vinifera
  Intron number 1 from transcript GSVIVT01027348001 (locus G SVIVG01027348001) derived from phytozome v7.0 (chr-ID chr1 3; pos 16041342 to 16053606)
acagaaggttagtaatgctttcatgtttagttccatgtgtttcttgactgttattctgatgacatttttggtttactggatcctctaaacacttagaaagaagtttatcatgctgcaaatatctatagcttgtgggtgatagctagcaagttcgtgttttgataaaatttgctctgcaactggaattttaggggccttttttttatttttcctatcttgaatgagaatgaacaatatgactttttttttttccttcccgtgtgtgatgttaaagcgcttatcggaaaaacctacgtgaggaagtaggcagggaatacctatggaataaaagaaggaagtactaccaaaaagggaaaaaacgactgaaggtcttgaggattaagataagcaaccaccctcaaagaggtcctggatcatgaaaaccaagacttttatgttatgtttggttcctgaaagtattaagaaaagaaaaaaatgttgtgtttagttgtactataaaaataacaaagaaaatcaatttgatatgcatattttgttgtggtgccaggtctgttaggagttttactttttttttttccctaataggaataggaattccattttagaaagtaaaagaaataaaaataaattaccaaaataattccttatcaaataaaaagactctaaatagaaaatgagcagctagtctagtccattccatcaatacataaatgattgaattatccttgttgaaataaacatataataagaccttaattaataagacctaattaatttgggtctcaagaggaacttagatatttgtatctcaaattaaaacttgggcaatgcgaccaacatttgttttcactttctataagtcttaaaaggtgctttaaatgatgttccccattaaaaatccattattccacttgttgagaatgttaattaacaaggtggattgtgaaagctaaaattggatcattctttgagttctcaatctaccaaaagctgaaggcatgtgataaggtattgattgtgagtctttttttttttttttttatagatattatgtctgctttaaaatcatcttctaaatttaagagtttcgtgttaagtagatgaatgtgttatgttgtgttgatttgagcattaagctcatcaattgcgattatgatggttcttggtgaattagaataacctagtgttataatagtggattaaatagcaaagttcgtatgttatcctttgtataaaggatgtaggtttaaggttaaaccaccataaatccttgtgtcatttttgcatgtttgtgttaagcaagtttgaagagtttgactaagttattggctgctgagcttggctgcaaagtgggatctcttccttccacttatttggggctccctttgggtgcttcgcataagtcggtgatggtttgggacggagtggaagagcggatgcggaagaaacttgccttgtggaagaggcagttcatttctaagggaggaagaatcactctcatccagagcactttggcgagcatgccaacctatcttatgtcattattgcgcatgccaagagtggttaaattaagacttgagaaaattcaaagggattttctttggggagggggagcattggagaagaggccccattttgtaaagtgggctgtcgtatgtactcacaaaaagatgggtggattggggattagaaatctctccattctccatagagccctcttgtgcaaatggagttggcgttttgcggttgaaagaaactcatattggaagcttattattagtacgaagtatggggttgaaagaggaggatggagcactcgtggggctagggagggccttgggtagggctttggaaggaaatcaacaaggaaggtttgttactgctcaataatgtttcattctcggtgggggatggtaaaagggtgaggttttggaaagacatttggtgcgggaacatgcccctttgtgaggcctttccctctttgtttgatttagcgggttctaaagatgcgtgggtagcggactattgggacccaatgggggaggagggagggtggactctccatttccttagacctttcaatgattgggaggtggagagattcctttcgtccattcaaggaaagaggctggatgctgatgtggaggataggatggtgtggaaagagacgaaaaatgagattttcactgtaaaatctctttataagtctcttgatcatagttgtgcagtctcgtttccgtgcaatattatttggagtctgtatgttcctacaaaggtgagtttttttgcttgggaagcttcttgggagaaggtccttactcaagatcaactcaagaggaggggctggattttagccaacagatgttgcttgtgttgtgttgaagaggaaacgataaatcacatccttgttcattgttctaaggcgaagattttgtgggatcttgtgttttctctatttggggttaattgggttcttccgtttatggttagagacactctattaagttggtatgtttcttttaaggacaagaagcatagaaaggtttggcgggcagtccctctttgtttattttggacggtttggaaggaaagaaataggatagtctttgataatgagattttgtcgattcaaagattgaaaaattcctttgtttgtaatctcttatcctgggctaaatcttctatagttgtaggccccttaactttgtttaactttgtggaatggttgggttcttgttgagggccggtgagtgcttgtgtttttgttgttttttttaggtgacgcttgtatactccttgtatgctcagggtcgcccttcaagcaccctttttctaatatatctttgtgcttttacctatcaaaaaaaaaaaaaaaagtttgaagagtttgagtgattgccatgaaactaattgatcatatcttgcttggttgatcatctcttcattgttactattcctttctccataaatcgctcaaggtcaaacttagaaaaggaatttttgaaaagtcctattcacctccttctatggcattctctagtactaaagaggatttcaacacctaaaacaggcaagagaaatatagaaaaggtccaaatgctttgttaccacttttttgacttttaggtatttggctcttctatagagacattgatcgagtttacctagaagtatggtaggtatattgatcctcctttaggggtacttcgtagagttaaggtcttatgacatatggcttgtatcacttaggtttggattattggtggattggagtgccaagaattttaaggataggtagaggatgtcaaaggcaatgtaggattttgtctctttgggtttcttttgcttaagcctttgtaggtggtctctcttgagcttgatattgctaattgaaattgcggtctaagacatttggttgaggagatgcatatcatatggaaacctacttttgtaggttctatgaacttaaattttatgcggtgttctttggtcatttttgggtttggaggggtgctttcaaatcatgtgctacaatgtcaagagctttttctaaacctattgaggaagctttggcctattatgttgaaatacaagctcttttggtagggtaggtgcatgctatgtccttaaggctgttcatttttctggtggagacccaattgtgctcttgttattttgttagtatctacaaaggtgaaagtttcatggacatttgatggtggttttgctgaattattgattaaactagcgatttaagttactcttcttgaacatcacactcttgctaatagtgtgactcattatttagctatgtgaggaaagtagttagtctcaaagattaatgttttggtgattttgctgaaattttgtgttttagtgtgcataggtatgattctagggacaaaaatttagcctaaggaattttgttgaatttttgacaatttattgctttttttttttgggcaaaattttttattaatagccgatttttccaattaattgctgatattttggcaatgttttccttgagctttgctgcatcaacgctaaatttaaaggagaaaaattgggttgcttgaacttcagccttataatgggaaaagttggctccttagccactagggcaactttgcccttgttgttatatatgcacatattatctaacccaactttgtgatgtatctatgcacaaaattaaatattaaaataaaactttagtaaataaattaattttaattatcttatttttaaattttatttacttagttcttaaaaatataaaagttattataataatcttcttaagaagtttttttgtttatttttatttttttattttttatttttatcttttgtacaataattaaatacaagagatagataaacttataaacatttttaaataaaaataattatttatatatcataatttcttttatatccttaaatacatccaaataagatagatcatcaatccaatattaaatatattttcaagttatatatgtattattgttgaacatgagaaattttatcatacatacattgatttttcaataaaacttcttcaatatatgtattattgcttattttattatttcttaaagtttgtttctgatatttttacgagttctgatatatatatatatatatatatatatatatatatatatatatatttatggatttttgtatgatattaccgatatttccataaaatccaaagattgaaaatttcacattttctaatgttttgatccttggttggtctcacttatggcaaacattgggaagtgtggtcctagtaagtggcacatggtcttaggttcaaatctgatgataccctgaatttatctggtgctggttattgtgaggcgatcaataccccgaggtttaggtccccatgaagagtcctaagggtttggccatggaaggttcttcggttgttaattaaaaaaaaaaattttttttgataggcaatacaaaaaaacctatataaataaatatggaaagcatttgaatcaaaggtatgataaagtacacacaaagtatactaatgttgctcaaaaacaggcaaatagaaggaagaggaaaggaacaaaaaccaaaacacccctcaccctttttcgaaagaggagtgttgagtggttggattgcccttttttggaagaggagattcacaatgctgtgttgcatttaaataaggaaaagaccattggaccagttggtttcacaattagtttttatcaagagtgttgggagacgattaaggataatcttttaagagtgttctaagagtttcacaataataggataattaatcaaagcacaaatgctaccttgattgctttagtgccaaaaaatagtcaaacaagtaggatctcagattatagatctattagtttggttactagtttgtacaaaatcatagccaaggtactcttagcgcgattgcataaggtcctccaagacaccatttttttttaactcaaggtgctttcattgaggggagacaaattttggatgctgtcttgattgctaatgagttggtggatgagaaaaagagatcaagagaagaatggatagtcttcaaaattgatttcgaaaaggcctatgatgatgtcgattgggattttttggaccatgtacttgaaagaaaatggtttagttcaagatggaggtcctggatgagtggatgtttatcttcagcaacttttgcaattttagtgaacggaaacactaaggggtgggttaaggcatacagaggcttaagacaaggagatcccttttccctttttctcttcaccattgtggttgatgttttaagtaggttggttgtgagagcggaggagagatgtttatttgaggggtttctagtgggcaaaaataggactagagtgtctcatttacaatttgcgggcgacaccatcttttttttagagcatccttggaagagttgctatctctcaagctaattttgttggtgtttgggcgtttattagggctaaagattaatctaaataagagcactctatttggaatcaacattagtcaagaccgcaccgtcaagttggcttctctgcttgattgtgtagtctctgattgacctttaacataattaggtcttcctttaggggggaacctaaaatggatttccttttgggatctagtgctggatcgagtctttaggaggttggatggatgaaaaaaagctttcttgtccttaggaggtaaaatcaccctaatttagtcttgtttgtcacacatatcgagctattttctatctcttttcaagatcctagtttcaataaccttgaggattgagaaaattcaaagagattttctatggtcgggttctagagagaataagagagatcatttggtcaggtgggacatagtctgtaagcttaaggagtctggtgggttaggatttaggataatttctctgagtaaccaagctttattagggaagtggctttggaggtatcttaaggaaagttttaccctttggcatcaggtcatcttgagtatctatgtgacacatcctaatgggtgtgatgccaacaatataatcagatggtcacatcgttgcccctagaaggccattgcatatattctccaagtttttctacacgctttgtggtgggtgttggaaccaaaatttgtttttgggaagacctatggtggggggaccaacctttttgcttacaatttccaaaactttttagagtcaccacaactaaaaacctttctatttaagctatcttgggtgataacacttctttgtcttgggatcttgtcttcaaacgcaatctaactaatgtagagattgtggatcttgaaagagcaatgttcttattttcccttgttcatttgactccttcagttctagatgcaaaaggttgggtactgtcctctttgggaattttcttagtaaaatcgtttttttcagccttatccaatgtctcaaattctattcctttctacccaactatttttttgtggaaattaaaagtcctttctaaggtcagggcctttgcatggttagtgacacataagaaggtaaatatcagtgacatgtttaagttgagaaggtctttcaaagccgttagccttgattggtgcattctatgtagaaggagtagagagatgattgatcatctcttctttcattgtccgattactttgggattgtggcataggatattttcacaagctaggatgacgtgggtttcatcagacagtatttgtgatatgatgaggatttcttccaagtgttttgggaattctattagagttaagactctttggaggaatttgtgtctctctttgttgtggattttgtggagagagagaaacgctaggatttttgaggacacttggaagacgccgaagatgatgtgagatttgcttcatttctatgtttctttttgggcttactatatagacgttttaaaaccctatcctttgagtgtaatttagcttagttggctttcaatatgtacaccctagggttaggtctacagggtcaggagttgttatacttgtataggccttttgtactttttgtatagccatccgtagttgaggtttacttagttcttttgattaggtttgtacatcatggggaggatttctcatccttcttatgtttttattcttaattaatatatatgtttgtttttgattttttttttttttaaaaagcacccctcaccccttgcccttactttgaatgaattcaatctacaaagcttatcttaatcatgggaaattcaactacatacaacctaacccattccaaaaaagtattcataaaagagagtttgattgcttgttctgttagctctgaatcttcaaacacccttctatttctttccttccacaacttctagagcacacagataggagcagccctccaagcttttttccgcttcttatccatgaaggaaccatgttagcttaacaattttatcttttgaataaaacacaagatttatatattaatattaaagaaaacatgagaaggatgaggagtccttataattaaaaaatacttgactaaattatgagtaaacttctccaccatacaaggagtctatacaataggtttagactacaacacaatatacaaagatgtcatttcctctggttttgacgaagctcctctcaatgatgtcaaaacccttttgatatacacattgaatgccaattaagttgaataaaattgagaggaatgcctttaaaagccttggtgcatgaggctcaaaaagaggaatataagtgaagtaaatcccacaacccctttgccattctccacttatcctaaatttttttggcctttttcttttgccacacaatccaaagcaatgtgagacaaacaatttggcaaagggtcttgcctctaatggagctccctaaacccttatatgaaatgatcatcatatcacatatattcctaggtggaacccaatcaatcttgactcgtctgaatagatagtgcctaagttacaaagttattagacaatgaagaaagagatggtcaatagactcttcactccccttaataaaatgaccaattaagtttaagggatttgaaaggtctttttaattgtagtatatcattgacatttaccttcttgtgtgccattaaccaagcaaaggccttgactttagatgagactttgctaacttaacacaattcctctaattgttgaatgcatcacccaaacaacactaaacaaagagaaaatcaattgccataggatacttactataaggcaatggaggagcaaacgattagccattgccttcgttttacacatataacacctatttggcgtactccatcctctcatttttaagttgattgatcattaaaattctgccccatgattcttcccaagccaaaaaacccaccttcacaagaacccaaggattccaaacacaatttacgaggaaaggctcacgacttccatggattagtgaagggtggaaggatttgatagagattatgccacccttggattccttccactccaacctatcaacttcctcactcctaatgagcaagcttgcagtttatggaaaaagtccatcactccatcaagctcccaatcatgaaactatctagaaaagcaagggctccaccatccacttccctcacttgctcccacacatctgcaacccaagcaattttgtttgagctaaagagaacaaagacataaaagattgtttcaaagacgagtgtttgctccatttgtctttcaaaatttgaaccttcttccattgccaatagagaggtgaactttgcccttgatgaagtcccacttttttctgattgccttctacacacccaccctataaccatctcttactccccttgagtaccatcccccttcttctttcgcaaatttaagggtgataactcttttccaaagagattcccttttagttgcaaatctccaagaacacttgccaagaagagctttgtttagaatagagagatttctaatatcaagacctccactctttttgtccaagcaaactcaaggccatctagcaggatcggatttttatgcaagctctactccgccctgccttgtaggaattctctttggatctgctccaaccttaggcttatcacttaagggggattttttatccttccttactagtgttatgcaattcttcaattgcataggttgcaaatccattctaatgtgaatcttgttttgcttcatatggggcttactttttttcccttttattaaattatgtaaattttgagaggtttttcttctttttttaaattacattttcaatgcaatgatttgttgttttttattaaagaacaaaataaggaataaaagaaagtcactagtttttatcttgttacatttttcttctttgagagtagaaaggtattgaagagagagggagacaaatgtttagactatgtttggttcttagaaaatttgagggaaaatggaaggaaagaaaatggagaggaaaagtaaaaggaaagaaaagtgaaggaaaatttgtgctctcaatttgttggtttttatagagttatttctgtgaaaaacctcactgtctcaaatgtctttggcaattcctttccactgtcttggaattttaattttcgtcgcaatcttactgatatagaaattaatctccttcagagattaatgtccttccttagttcaatgcttttctctcattctttggcaaattcaagagcttggtctttgtcatcatcagacttgtttctagtgaaatattttttcttggccttgtcaaaagtctcaaatcctattttgttccttccggccaagtttttgtggagttcaaaagcctcctcaaaggttaaggccttctcttggttagtagtacatgggaaggtaaacaccaataacaagttgcaattgagaagaccctacaaatccctctgtcctcaatggtgcattctttgcaaaggaaatggagaatcgatcgaccgcctttttctccattgtcctattactattggactctggcacaagtcgttcaatctagcaggtttggcttgggtccctccaaggagtattgtggatatgatggttattgcttttaaaggtttggggaattcattaaggggcaagacactttggcaaatcgcttgccttactttgttatcgatggtgttgcaagagagaaacaataggatttttgaggataaggggagaacggaagagatgttatgggacttgattcttttctatttctctctttgggcctcttgtactgcagcttttagcggagttcctcttagtattttacaacttaactggactgcggtttgcgcttcaaaagtttgagagtgttctttgtttttagttttctaaagttgggtgttttctcttttgctcagttttgtttttgtgggaagaacctctcatccttctcttgttttctcatctttctcttgtatctcttctttctcttatatattttcttcttttaatataattttcctcgtttctgataaaaaaaaaaagaaaaaagaaaaaaaagaaaagtgaaggaaaatgaaaactaaatttaaagtcaacaaattatttttatatactattttaaactcatttaacttattttaactttttgatataaagattaaataatttgaaaatacgtaagtttctaattaattttaattatatttgatttgcttaggtattttccttaaaagaaccaaacataaaaaataattttttttagcatttttttttccttagtacgttttgggaaccaaacataaccttagagttttcttttccctagagacataaagaagggggagaaacaggagatggaaaagagttttgtcccattttgtggggattttctaaaatgaaagctgtggttatgcatcatttttttgtgggtggcttattcgatggttaaacatgaaactgaagcaaaggttattattattttttaattttttaagaaggaaaaaacatgtaaaggtgcccctgttgtacaccttgggcctcaacagaagttatgcttccctcatacatggtacctgattcaagtctttgctcagaactgttggtaacactttgtttatatccaatctcagttttaagcccaaccctgctttatttagattacctaaaagcatgggccttaatctccctgttctggcttgccacctttgctacatgaggccccattgtgcctatgacattgccaattttcttatccatttagaagcccatctatggactttggttcttctttatcttgcccctaattgtttctccacattttcccctttcctcggagaggtaggtgcttttctggatattgctcgaggctactgttgaatttattgagtctttgatagtgcctttgtaaactcttattctgtttaatagaatatgctggcaatatgagatatatgtgtcttgttagcctctttttctctaactattttgagggcgtgttaggctatagtacaatggatttgtttattttattaatctttatttgagtgccttctgttcatgtttgaattctgatattggtaaacaaatcgcactgctacctcatttttgctgatgattgattcattggaaatgattttggaggtcctcctacttttatttaccttctaatgagtggtttataccaattggttctcatgaatggatacttgtttgacaaattttgatctgttatctgagctgaatgttgaggtgctgcaggtttggct

SEQ ID NO: 12679 - DNA, 13583 bp, Vitis vinifera
  Intron number 1 from transcript GSVIVT01015618001 (locus G SVIVG01015618001) derived from phytozome v7.0 (chr-ID chr3 ; pos 14137863 to 14151445)
gatccttagaatttacaaatagagagatccaaagtgtttaaagactttagattgtcaattgaagttggaagatgttgtcttgaaataatagaactccctaaaaggtgtagtctttgaattaatctccaaattaatattttattatctattttaggtttgttccattatattaattccttatagagagcaaaaatcccatgaaaatataaataaaatcaatcacataaatgaacataagatttaacatgaaaaaaccacctaacaacctactagatgaaaaaaaaccatgagtggtctctcaaccactaaatatgagaaaatgatatacaattttaccagaatggttgcacttacgtactcctaagggtcttatatcactagcaccctacactcctattccacatccccaatgcaatactctcatctgttttttagtggatcccttaaagtccttattgaagttttgcaatgggatctctaacctttgttgtagttctcaaaaaagatcttgaaagtttgagagtttgaggatcaagcttttgatgaatggttatactctctacaagttcataaaatccacatctttttaaataaaatatctttatttatatttataaaactctttttagaaataaagaaaattttataattctaaaatattctaaagatcctttttagaatcaaataccaatttagagataaacataattttaaaacttaccaaacacaatttttggaattaaaaatatagtagaaatcaaattagaaaatagaaagtagtctcttcctaatttcttgtatcagtcatttcaaaagttttaccaaccataaatacatacttatcttaaattttacaaccccaaataacctgaatccaaatttgatgaagtctgaaattgttttaaaacaaataagaccaaggaagtaagttgcatctaattaataagaaaggaacaaaattgccaactaaataaaataccctaacaatcgagatgaaatagatcatgaaatttcccataccctttgtaccgtgccccatttatttttaaaattttaattttaaaaaaaatataattatgttaaaaataaacataattcataaataaataaatattataaatttctataactcattttgatgagaaacaattatttttttttttatgtacttgaaaagaaaaatgaaaatttgaataaattaatttataattggatggaacaagcaaaacaaggcaatattcgaactagccccaaatgggttttaatttttttaaaaacatatagctaacccatttatatttttcttaaactagtcatgttaaagaatacccaaaaaaacttatttgattctcaaccttattattgagatttttaatatttaggaaaataatcaatagttaaaaacacataattaagggtataattaaacttagtaagagcccaaactttagcctttccacaaaaacatgtgggactagtcatgcttctttcttaagtgtttactccattagacttcactctttatcaactaattgggtagaattggtgctctagagcttagtatgcaaaataaaattttgtcaaattataccgttaactagtaattctggtttaaagagaattaaaccactaactagtgattcaatgacttagaataaatagaccacccacttattaggcaataattatcgattttggtatcactattaatctagaaaacattactgtctattccatctttggtatcacttattaggcaataattattgattttggtatctctatttgaaggaagactcgtcaatatttttcaaatgaattatcagataattatatctattttttatgccaaatatcatcatttccatggaaatatattctcaagtaactttttactaaaatctcatcaattcatggatcactaaatttaaaacaatagaatgttaaaaaatcattaattaaaaatattacatgtgttcttcctcaatgtgctgtaaatatatattttgtgtcattaatggaaaatgcattaaatgataatacataaaaatttttgtatcattatttggttacttgttttaatttatataaggactgaccaacctatgcctcttttactcttttcgaggtattatacattcctcattagtttatgtagatttccttttccaattccctatgaatatatatatatatatatatatatatatagttttcatattcattttatttgtaaaattataaccggaaactaaaactatcatcactctaagtgggcaaaagtctcaaaataacctatatttttcttttattagtgtcatttagcaatcaaccttatcttgtattttttataaacccatgatctttcaaatttagaccaattcaaatgcccacttgctttctctctctctctctctctctctctctctctctatatatatatatatatatatatatatatatatatattgtacctatattctataatgggtttgagctcaggatagtttcagatttagtagttcttttgttacaatctttatttttattttttgatattttactataaatatataaattaataaacatttattagggccattatgagatctcacatatcttccatagaaatattataaatattgtttggattaagatggtatttcatacctttgaaccacataagtaagcattttgatatgaaatgaaatatatttcaaaatatttaaattcaataaaataataatatttggtctttgtcatgatttggaataaagaaatcttcaagtcttcctcaaattttgttaaaagaacatatatatcaaaggcataattatatattataaaaaccaaaatattaatttttttctccataaaaccgtgtggggactaattgtgtttattttctttgtgtccacttggttagacttcaatccttactttctaattgggtagaattaatgcattaggacttgacatgtaaactaaacttttttggtcaaattaaattttcattgttttatactaattaaaaaagaaacaaaaaatggacttaggaccaagaaattaactatttaatgaccattgctctatgaaattatgtttaatatattaataaaccatcctcttattctaaagtgaaagcaccaacaatgactttggattaaagaaagtttccctacttacaccacttttggggtcattgataaataataaagtatacatagactccaagagaaaaatctgattaaagatctaggatgaaaaaaaaaaaaatcatccaatcaatattatttttcatatgactaatgttaaatagtaattattaatttaatcatcactatcaatccaaaaaattattattatttaggtggattgaaatggtctacaaatccctatttgaaggaaagcttgccaatgttttttcaaatgaattatcatgtaattattattatgaaatgatacttgtaacaataatttgaaaataaaataataaaaagaaaaatagagcaataaataaaataatggtcaaaagtacttacaaggtaaaaactctcttaattaaaagggaaatctccacaaggcaagatgaaaaaatatccactatatggaaacaaaattacaacctctctctcaataaaaaggagaagacataaaagtttacaaaaaaataaaaagcttttttttgggatgaatagtatagggggtagaggcctccttttataggataaggaaactctcctctttttgtcttcttctatatgggatgaccaactttaataattatatctatttttgtgtcaaaaatcatcaagatagttattccatgaaaatatattctcaaataactttttattaaaatctcatcaattcatggctccctaaatttaaaacaatagaatttagttaaaaagtcatcaattaataatatttcatgtgttcttcctcaatgtgttataaacatatatgttgtcattaatggaaaatgcattaaatgataatacatgttaaaatttgttgtatcatgatttgggtacttgttttaattttatataaggactcaccaacctacacctcttttactccttgcaaaggtaccatacagtcctcattattctatgtagatttccttttccaattccctattaaaagaatacaattttcatattcattttggaaaattataatccaaagctaaaactatcatcactctaataaaataaatccttgtttggtaggcaaaagtctcgaaataatctatatttttcttttatttgtatcatttagtaatcaaccttatcttgcattttctataaacccatgaattttcaaatttagaccaattcaaatgcccacttgctttgacatgcattctatttttatttttattttttaatttaatttagtttaacctattgtactttattttataatgggtttgaactcaagatagcttcggttttagtaattcttttgttacaatcattattttttgatattttattataaatatataaataaacatttactatggtcaatatgagatttctcatatcttttaatagaaatattataaatattgtttggattgtatttcatacctttgaaccgtaagcattttgatatgaaatgtaatataattcaaaatattttaattcaataaaataataatatttggattttgtcatgatttggaataaagaaatctcaagtcttcatcaaatagtgttaaaagaaaagatataatcaaaggtataattatatacggtaagaatcaaaatgttaacctcttttccataaaactgcgcggggactagttgtgtttgttttttttatgtgtcgactcggttagacttcaatctttactttctaattaagtaggattaatgccttaggacttgacatgtaagttaaacttttttggtcaaattaaattttcgttgttttatgctaattataaaaataacaaaaaaaaaaaagtgggcttatgtttaatatattaataaaccatcttttgattctaaagggaaagcactaacaatgattttgtattaaagaaagtatcctcacttacactacttttggggtcattgataaataacgaagtatacacagactccaaaagaaaaatctgatcaaagacttcggatggaaaaaaatcatccgatcaatatttttttcatataattaatgttaaatagtaattattaatttaatcatgactataaatatagaaaatgattattatttagatggcttgaaatggtctccaaatccttatttgaaagaagccccaccaaattcttttcatacaaattaacatctaatcatttcaactacaaatatgaaaaagataatcataccaaattttaaagaagcaaaagacttcattcatgtatcattaagaccaaaacagtaaaattcaattgatgaaaaagaatatgaaaataaataaaattttaactaatattgtattatatatatatatatatatatatcttctaagataaatagaacatgagattttggattcctccatgcttattttcattttaatagaaagttctaccatccaagcaggacttaaatgatatctacacaatatataagatttagaacactaaccatttaggtcttcctatttcatacatgagcaagtctcagattttcacatagaagtgtctcaaacttgcttggcaagtagccaacaaaaattcaagacagtggaagcctatttgggaatttcttcatgaatcttgtactttgagatgtctagaaaatactcacttcattttttaatgcctaaaaaaaaacacctcagaattctgtgaaagaggggatcatcttgaacatatacaggatttctctaagccaaataaatcttttctgattcttatttcttattttcaaatcaattatctgtaatgaactagatttagttcataattccgaaactcagtatatgataggccttcaaaaatgtatagaagattttaatttcattaagacctctacattctcagtatacggtgggggtaatttctgatgaaatattacgaaaagttttggtcatgcatgatagtcacagattaatcctcaaacattaggtatcatccacagagctagtactctaaatgctgcaattaactactccatacaacatggaatgtttggccaaagaaaaataaggctattgtggacccgcatttttcacgtgcgtccccactcgatcggcgagactctctttttatttgtgaaaaattatttagttttggaaaagttggagccgccacttattttatttttattttaaagggaaaataaaacaagaaagaaaaaccctaaaatgtgactccataatttttggaaaaaagcatgtctttgaaaaacccgagtctaggtccggggatcaggttacttattaagaaggtacctctaggaggtagcacccttctaagccctaaagaggtctttactgactaaattggggaaaaattgattaattgtagatacctaagtaagctaggtgattttcagaaagtagcatgctaaataaggagagatcattcacaataaaggagagttacggtgcgtacctgaaccacttcttaagcgctatcataaaacatcaatggttaattcaaaaatatgacacacaacatgcattttatcaaggatgatcaaacaagcatcgaggcaatcaagtatggcatcaaacaagggcaatgacatgcatattcatgaaattttgggaacgtacctggatagcatatataactcctaatgcacttcctcaggacatgggggttagataataaataataaataataaatcttagcatgcttatctaattaattagcaaaaattatcagaattaagaataattaattatcatacatatcttgtatacaattcatacaaagaaaaatgtaaatatgattacaataaatagcagggttgtagcaaaagtaaattttgaaaagattttcttatctaggggtttcaccaattccccaaattaatatacacgaatttagcctaaaattgtcccatttatttgggaccacaaactttgattcgcgttttgtttaaaaccaaaatttttgttgaaaattgagaaggatgcaaaccgattaagatatggttgcatattgttttttttaaaaagaaaatagattttgattctagaggctttaaatgaataataataaaaaaaaaattaaaagggtttttttgagaaaagagttttgttttaaaataaaagaaattaattttttaaaataacaaaaatagaaaacaaaatatcaatcaaaacaaaaggaaacaaagatcacgaaataaagattttagaaaatcttgtcaattaaagtggtgagagtaaaggccaaccttcatgggtttccagtggccctaaaaaaaaatttgaccaacaaattactaaggcaacaaatttatgacttcctaatcaaacaaactaacaaaattatcatccaaaaactaacatttagatttcaagaaacacatgaataactagaattagactaattggaattaaaaatgtaaactttacctcacaagatcgattaaactaaagaattaagatcgataacacattcaaattaaaaataaactagaatttaaactaatcagaattaaaaatataaactttaccttacaagaccaattaagctaatagattaagatcaatgacccattcgaattaaaaataaactaaaattaaactaattagaattaaaaatataaattttatctcacaagatcaattaaactaattaattaagatcgataacactattcaaattaaaaataaactagaattaaactaattggaattaaaaatataaattttacctcacaagaccaattaaactaaagaattaagatcaataacatattcaaattaaaaataaactaggattaaactaattgaaattaaaaatataaattttacctcacaagatcaattaaactaatagatttaagatcaataactcattcaaattaaaaataaactaaaattaaactaattggaattaaaaatataaattttatctcacaaggtcaattaaactaaagaattaagatcgataactcattcaaattaaaaataaactaaaattaaactaattggaattaaaaatataaattttatctcacaaggtcaattaaactaaagaattaagatcgataactcattcaaatttaaaaataaactaattggaattaaaaatataaactttcatgtaaattaaaaataaactagcatagaactaatgaattgcaatcataaaatagagacatttaatctaagaaaaataaaagattgttcgaaatcgagatttaaaagaatttatcacaaacaattaattaaaccaaacaactaaaacctaaactaaaaaaaagaaatactgtatcgaaaacccaaaactaacctgtattgtatccgaaaaatactctcttgatgtgtcctctctagaaaagatcccccttgtatgtgaatttccgctccttaagaaaaagtctcctcctccccctccgaaaaaaaaaagttgcttatgcttggattctcccctttatttataaggcagcccactccttatggaatatcttatttccattttttcatacgtgcccgtggatatgggaagtccattatgtgtggctcacttggagatttccccaaggatgcagccgtatcttgtttggtaagtgatcatatcccctttaatcttctttccatatgctcctggattccttcttaaagtcgtgatttgcccactttctatatgcaacccagattccttcttaaagcaaatcatatgcagcccagattgttcttaaagccgtgatttgcccactttctatatgcagcccggattccttccaagtttccctatttggccatgatctcctctccttgatgtcttcaattgtttccttatctcctagagccacctttccttaaactctcccaaaacgtatcttccaatctcattatggtatccattccatctccaatgatcaagcatccaaggaaatcccacattccaaatatcaataccgtgcacatcttccatacatttcctataaaatttcaaataaataaggacaagtaataaaataataatattaataataataataataataataataacaataataataatactaaaaaaatagaaaaataaaaatatttacacaaaattattaaattaaaatagataagtaaggacaagcattacggaaaaagtgacaaaataataaggaaataaaatagatgaagaaatagacaagataataaataaaataaataagaattaaataataaaaagtcaagttgtgcaactttaaaataaacgagtcatgcaagtcatgcaagccatacaaaaaatgcaatcatgcaaacatgcaaaaaattacctgaaaagtgacctaagtgggcctaaatgagcctaagtgggccaagtgtatctaaatgggcttagggtgtctaaatgggcctagggtacctttatgggcctagggtgcctaaatgtgcctagggtgtctaaatgggcctaaggtgcctaaataggcttagggtgcctaaatgggcctagggtgcctaaatgggcctagggtgtctaaatgggcctcgggtgcctaaatgggccttatgtgcctaaatgggcctagaatgcctaaatgagcctagagtgcctaaatgggcctagggtgcctaagtgggcctagggtgcctaagtgggcctagggtgcctaagtgagactaggtgcctaaatggtcctagggtgtctaaatgggcctaaagtgcctaaatgggcctcgggtgcctaaatgggcctatggtgtctaagtgggcttagggtgcctaaatgggcctagggtgtctaaatgggcctaaggtgcctaaatgggtcaaaagggcctaaacgggcctagggtgcctaagtgggcctagggtgcctaagtgggcctaaggtgtctaaatgggccaaaagtgcctaaatgggcctagagtacctaagtgggcctagggtgcctagggtgtctaaatgggcctagggtgcctaagtgggtctagggtgcctaaatgggcctagggtgtctaaatgggctaggagtgcctaaacgggcctagagtgcctaagtgggcctagaatgcttaagtgggcctagggcgcctaaatgggccaagggtgcctaaatgtgcctagggtgtactaagtgggcctaggatggtgcctaatgggccaagtgtatctaaaaactatcctaaaaatgaatgaaaagcctaagtctaaattaaggttgccaagggtcacaataaggggtcaaataatccctcaactaaagtccccgaggtggctcaaaaaaggtaagtagtgtgagtagctataggccaccaaggaactactgtggagcattggaagtgaacttaaagacatgtgctaaagggacaaaattgagggtctacagctatatatataatactaatcatcattgtcaaaatatgtctagcttaaaagtagagtgcaactgagccaggttgacccaatacaataaggttctcataaaacattatcattatttataaaataatatgcaattataaaaaaattaaatattaaaaaaatcatatggatattacgagtacaacaaattttgaatgcctaaatattaaaataatataaaagataaactattaacataccattttataagcattacatcattatccattgatttacatttcaaattttagaatttatgaccaatccttttatattataattaaaacataattttagaactttggatgcgacatatatatatcaagtaggtggcacatgcaacttcatcacatagcataaatttcttttatccaatttcatctccttgtacctcaaccctacaaggatatttttggaattataataaaatcatatccttaaactcaattatatatttttgcccaccttttggattgaattttacaccttttatggacttgaggcctattatcttctttagctatcctaaagcacaattctcccatgatagaaacgggtgactaatcatattattgcacacttctgcatagtgtattagtggttaatgaaaatttctcaaattgattttagtggaaatgctatcaacttttggaattctctttttacccttatttttagaacttccacctaagaaatcaaggacttgactaggaaatggagtgcttgactacaatgaacttcccctttcactttaaagatttgtttattaaaatgaaaaaaaaaaattgcttttatctaaaccaaaaggcaaacgtatctttttggtttttgtgttatgagcagggacgaaaatgttgcgatatattgtgtattggaaggtttcgacatgatatatcatggagatatatcaaagagaagaaattttggtaaatatcaccaaaataatgccgatatatcggttggaggggataaatcgtcgattttttggtgatatatattttttttttttggggggggggagggaggggaacaccttctctctaccccaaactgcctaccctagtcacctgcccctctgcccaggctcccccttccccagtcaaatccccagtcacctgtcggggctccattcttcgctttgcccatatataagacctcctacaacctatgctcactaggacagttatgccttttgttaatttgtaccaaacgtgtgtgtgtatatatatatatatatatattaaaagtcagcacaaaagaatatttttgaaaacaaattaattataattattttataactgttacaaaaaatataaaaattatcatcataatttttttttatagtgtttttaatatcatgaatagattaattaaatattaaaaaattatacacatattataatttattttatatcatttaatataattaaattaaatggatcataaatttaatattaaatatattttaaaattagatatattataattaaatattataatattattatgaaataatattttatataatttaataataaacgtacacttataaaatactattatcaaatataataaatcatattatatatatatatatatatatatatattaaattctttaataaagtaacattaaaatgtttaatatacttctaattatatttctatgaggttttttttttatttacattttcatgaattttaatcaattttaggtttatcgatattttttttcaaaatatccatcgatatatccttaaaactgaagtatcgatatatccgtgattaccggtattttcatcattcgctatgagaaattttaacaagaaaagtcgtagcatccaggttccctttaaaaggacattgcaattaatgtgctagaaattgtaacaagaaaagtcttctttaggtttccaagaagttttctagagtgaatcatttgcatataaattggtgtgtactcatcaccatttctgtcatctctccactctcaattgctttgggaagaatgatgtctaaactcctcttcctcctttattctcttttcttcatctcctaatctccacttctttcctcctctttctctttctctgattcaaccaaactgtacccgcatcaccaaacccttgctttgctccaccttaaacaatcattctctatcaacaattctagttcttcgaattgccattcctatggtgtcacatcttatcctaaaatagagtcttggaagaagggtagtgattgctgctcatgggatggggtcacctgtgataaggtgataggccatgtaattgggttggagcttagttacaattggatctttggcatcatccattccaatagtaccctcttcctctttccccacctctgaaaggctcaaccttgcttccaatgactttaatgggtcctctgtttcagctgggtttggctgcttctcaaccttgacgcatctcaacctctcctactctgtattttctagaaaaattgcacttgaaatcttctacctctccaacttgtttcacttgatctgtctaggaattatagagcagaatttgtcttgcatgacttcaattctctggttcaaaatttaaccaagctgtagaagcttcaccttggaggtatatccatctcttcattttttcctagttctttgctaaatcggtcttctttaatatcattacatctctttgactgtggattacacgggagattccttgaccatgacattcaccttccaaaactcgaggttcttagtttagagggaaatgttaatctcagtggaaacttcccactattcagtgagagcaattcccttatggtgttgtttttatcacacacaaatttttgcggagagcttcctacttcaattggcaatctaaagtctttaaagactttggatctctccaattgcaaattcttaaggtccatccctacttcaattggcaatctaaagtctttacagactttgaatatcagattttctgaattctcaaggtccatccctgcttcgctagagaaacttacacaaatcactttattgcacctca

SEQ ID NO: 12680 - DNA, 8966 bp, Vitis vinifera
  Intron number 14 from transcript GSVIVT01034780001 (locus GSVIVG01034780001) derived from phytozome v7.0 (chr-ID chr 18; pos 21365204 to 21374169 reverse strand)
aggatcctttccttttgcctcaagacaagaaggatgtaagtacaaaaatcgaacatgttaccttatagcgcatcaatgagccatagttgttaaactcattaaatgtatcatgcattgtttttctatttttctatatcgtgtattgtatcatattgtgtattgtacgttttgtatatagtgaaaaagaaatacaaaaaatatgcatacatgtgcttatatatttgaagtatgaattaaagggtaatatataaccaattttatgaaagatagttggatttaaagagctaaaccatatcatgccatatgaagatattaaatactagggttttaaaaagttctgttgaatataatgtatgtatagtatactatctttccttgttaatataggtcacatgtatggtagttaggactcctagccttgtatatatatatctctcaattgtaagtagagattacaatgaatgtgaataaggtttttctcctttctctctctctctcaacatggtatcagagccaaggaagaaaacctaattctttcctgttttccgtgtcatcaactccgggaaaccttccggtgaccgtgtttccttttggtcaccttccccatctcccaatactttccggtcagttggatcgtcgttagaaaccactcaccgctggcaaattttccggcgaaattttccggcgacctatttttccgacaccgaccataccagaaggagcgcctggaggagatctccaacttttgtgaaggcaccagcaccaaaagagcagccacgcgccggccacgcgcaattttccggccggcggttgaatctcacgcgccggcgcgtgggggcgcgtgagagcttttccggcgacgcgcctcctcctccagcttcgcctgatgccgatcagccttcccacctccctggttctcccatctgagccctgcacgtacctcttttggggatttttgtctccgtcggccctccaaacagtctttccggcgaagctccgaccactttttctccactccaatccctgcacgtgccttgggaagtgttcttctccctttctagtggtaccacaccgcgatctgaggccatctccctttttcggtggtgccacgctgcaatctgaagcggtattagggctctcttcgatccaaacatacttcattctccagataagtggatatggctactaaagcttccattttttcctctgtcatatctggatctcctatgattacttcggagaaattagttgggagtgaaaattatctttcctggtctgcctctgttgaactttggtttatgggtcaaggatatgaggatcacttgattacacaggaggcagatatccctgaggtcgaccgcgtacagtggaggaagatagatgcacagttgtgtagtgtattatggcaatcggttgatccccgaattcttcttcatcttcaggcctataaaacttgttttaaattttggactcaggccaaaggattatacacgaatgatatccagcgtctttataaggtggcttctgctattgtccatctcagccaacaggacttggatctatctacttatattggccagattgcctctcttaaggagcagttcttgactgtgatgcctcttactcctgatgttggggctcaacaaacacagcttgacaagttcttcatggtccttactcttatcggcctccgtccggatcttgagcctattcgtgatcagattcttggtagttcatcagttccgtccttggatgatgtgtttgctcgcctcctccgtatctcgtccactcagactttgccatctgatagcgcttcagattcttctgtgttagtttctcaaactacctctcgaggaggacgcagtggtacccgaggtagaggccaacgtcctcattgcacctattgcaataaacttggccacactcgcgatcgttgctatcagttacatggaagacctcctcgcactgcccatatggcccagtcctctgattctccgctgcctcagcctccgagctcctccgcatctcagacatctcaggcttctattgcctctgttgcccagcctggtaatgcctctgcctgccttacccacacatcttctcttggaccctggattctagattctggagcatctgatcacctatctggtaataaggatcttttctcctctattactactacctctgatttacctactgttaccttagctaatggttcccaaactgtggctaaaggtattggtttggcccttcctttgccttctctacctctcacttctgtcctttatactcctgaatgtccttttaatcttatttccatcagcaaaatcactcgtactcttaattgctctattaccttttctgataaatttgtgaccttgcaggaccggagtacggggaagacgattggcataggacgtgagtctcaaggcctctatcacctcacctcagattcatctcctgcagtttgcatttccactgatgctcctctcctcattcacaatcgtctgggccaccctagtctctccaagttccagaagatggttcctcgtttttccactttgtcgtcgcttccgtgtgagtcatgtcagcttgggaaacatactcgtgtctcgttcccaaagcgtttgaataattgggcaaagtctccttttgagcttgtccacactgatgtttggggtccttgtcggactgcgtctactttaggatttcagtattttgtcactttcattgatgactattatcgatgtacttggttattcttaatgaaaaatcgagctgagttattctctattttccagaaattttatactgaaatccaaacccagttcaatatttctattcgtgtgttacgcagtgacaatgccagggaatatttttcagcccaatttacttcgtttatgtctcatcatgggattcttcatcagtcttcttgtgctcatactcctcaacaaaatggggtagctgaacgcaagaatcgacatcttgttgagacagctcgtactctcctcctccataatcatgttccttttcgtttttggggggacgctgttcttaccgcttgttatttgattaatcgtatgccctcctctgtcttacacgatcagattcctcactcccttcttttccctgaccaaccactttatttccttcctcctcgtgtctttggttgtacttgctttgttcatattctcactcctggacaggacaagctttccgccaaagccatgaagtgcctcttcttgggatattccagacttcagaagggttatcgttgttattcccttgagactcatcggtactttatctccgctgatgtcaccttctttgaggactcaccattcttttccaccacttctgagtctcttcctgtttctgaagtcttgcccatttccattgtctccccacctgatgctatgccccctcgaccacttcaggtttatcatcgtcgccctcgtgtcgttgctcctctcccttttcctgaggcacctgctgactcacttcctatcccttcggcttcacttgccccggctctgccttctcctaatgacttacccattgctgttcggaaaggtactcgctctactcgtaatcctcatcctatttacaattttttgagttatcatcgattatcttcaccctattctgcttttgtttctgctatatcctctgtttctcttccaaagagcacccatgaagctctttcccatccaggctggcgacaggcaatggtggatgaaatggctgctctgcactctaatggcacttgggatcttgttgttttaccctctggtaaatctacagttggttgtcgttgggtctatgcagttaaggttggtcctgatggtcaggttgatcgccttaaggcccgcttagttgctaaaggctatactcaagtttatggttctgattatggtgacacattctcccctgttgccaagattgcttctgtccgcttgcttctgtccatggctgctatgtgttcttggcctctttatcagttggatattaaaaatgtcttccttcatggtgatcttgctgaggaagtttatatggagcaacctcctggttttgttgctcagggggagtctggtttagtgtgcaggttacgccgctctctatatggcttgaaacaatctcctcgagcatggtttagccgttttagttctgttgttcaagagtttggcatgcttcgcagtacagcagaccattcagttttttatcatcataactccttggggcagtgtatttatctggttgtttatgtggacgacatcgtcattacaggcagtgatcaggatggtattcagaaactaaagcaacatctttttacccactttcagaccaaagacttggggaaactcaagtatttcttgggaattgagatagctcaatccagttctggtgtggtcctttcccaaaggaagtatgctttagatatcctggaagaaaccggtatgttagactgtaaaccggtagacacacctatggatccgaatgtcaaacttgtaccaggacagggggagcctttaggagaccccgggagatatcgacggctcgtaggtaaattgaactatctcaccattactcgtccagacatttcttttcctgtgagtgttgttagtcaattcctacagtcaccatgtgatagccattgggatgccgtaatccgtattcttcgatatatcaaaagtacaccaggccaaggtgtattgtacgagaacagaggtcatactcaagttgttggttacacagatgtagattgggctggctcacccacagatagacgttccacttcagggtactgtgtttttattggaggtaatctaatatcttggaagagtaagaaacaagatgtagtggccagatctagcgctgaagccgagtatcgagctatggctttggcaacatgtgaactcatatggttgagacatcttcttcaggagttgagatttggaaaggatgaacagatgaaactcatctgtgataaccaggccgcattacatattgcatccaatccagtctttcatgaaaggaccaagcatattgaagttgactgtcatttcattagagagaagatcgcatcaggatgtgttgctacaagttttgtcaattcaaatgatcaactagcagacatcttcactaaatctctcagaggtcctaggattaaatatatttgtaacaagcttggtgcatatgacgtatatgctccagcttgaggaggagtgttgaatataatgtatgtatagtatactatctttccttgttaatataggtcacatgtatggtagttaggactcctagccttgtatatatatatctctcaattgtaagtagagattacaatgaatgtgaataaggtttttctcctttctctctctctctcaacaagttcaattttaaaaatatgaatttaatgaataggttcatcacaaaatcaacataataaactttttaaatttttagatttgattttctggttccaaattctaactatacatatgcattttatttgttgttcatatgtctttatgattcatctccaaagttccaacttttcatgattgtcaccattccaaataataatagtaataataataataaataaaagtttttatttaccaatcaccatcattttcaatgtcaacattcaatccatttaaatgcaaattttctaatgttcattgtaagaataaatttacctatattacattatgacctttgctaacatgaatataacttttcatatagtattattttacatctctctctctctctctctctctttgatgatcaatttataacctttttgtatatttaaacacttaatataacaattctttcaacaaaataatttttgaattctatttttcttaaaaattacaaaaaatagttgaaggtgtatatattattgtatcacatattatattgtaaactgttggtgtatcataagatacagtaaagattacgatatgtatcaatttccataataaatgtttcgtatagtaagtttttaacaactataccatcaacttcattcatgcagtggattttcatcttgtgttaacacagttgaacctacgaatataaacttgtgtcatgagtactatttcatgtcaactttatgggaaaatgatattgaaatgtgattagaatccagtggaagtgtgcttggcagaaacaaagaggcagcaatttttctcaatataagagaccttaatttttctctaagtatgaggaggcaccaaaatccctagggctttccattaagagaccttaattttgagtaaaatactataagaagtcatttattaatcctgttattgtttggcatagctgttatgcctagtatttctcaatagtggaacccttgaccaaactttacccaagatccagaataacttcattttgctaaaactttttcatcactcaatacctaatttaaagaagatggtgcatataccattgatttttgacagatataagatattgtcctaatcttaagcccgttacataatattcatatcaaaaagtccttctggataactggaacccattctctagtcatggactggaatatttcccaggagacatggctttttcttgactaacatgaagttgaagtttgattggattgcaaggatttgggttttttagaccatagtaagagggacaagatgacagatggtatattcctgattgttttaaaaaaatttgagtatcaagttgcttcatgagttatttaatcttcttgcaccataaattatcccgcaacactgtttccaactttgtgaaaccaactcgcatttcctgtgcctatcattttagcacactgtcattccttcctagtctgggatgatataatgtgcatgtactactccatagttcacatgctgtttcctgatatcagtttcttaatatactgtttagtttcagatacttgcatgcttagcatgatttatggcttcattatggcttcattattctttcacatgctggaacttgtaggattttattgtgttcttctttctcatgtactttgctggtcataaaagtcatttttgccatatgttttactgcagtagtcattattttttagccccagtttagcaaatattattctttgtactatgtgaattttttggactgctctctcttgtaatcttctcattggatcgttgccttctaaacctcaaaatagtgcctttaagctttttgtgagattggttcctcaaagcctcttggctattcttatatagaatttggtttaatcatctcttggtcaagagcttcttccctttttcaaactttagaataaagtttggaactaggtattgtatcatttgaatctttttctttcattggagattttgggaggatgttgctcatagactaaaactgcctagaaaaattgaaggtgtggtgaagaggttaggacttcttgtggaatcaaataacagataaaagagaatagaatcttttagaaaactgaagtcctaaaagtaaaatcaactagttataaatcagaacttttcagtaaagaagactctccagattttgaataggattcaaatatgagtctgcacaaaatagaattttaaataaaaagttttaaaagtatatgaacttataatggtaaaattttcagtaaaaaagacttttcaaattctgaattctactagaataaccaactacctttaacttttgactcagaactactggatagccaaatcaacagaatgttatcacacatagaaggaagcttgttaggcaaatcctctctctctctctctctctctctccctctctctttctgtctctctctgtcttttagtttttgttttgttttttaagtaatgaggtgcttgtttggaaaatcctcatgctataataccaaaaaatcagcatggcactccagccagatattcctattcttctcctcctttttcataatgttctcattttattgctgtaaagataataacagtaacctgttagcatgttttgcgtatcatccaatactgatctgagatgctgaagctgatgcacctcaagacctcccaagtcaatcgctgacatgactttgaaccgtggtgccaaggtactatccagacatcttaagagaaggatttactttggccattataagagttggtaaaagtgggagcttcaaaattttatgatgaagacaagatgacatagattggattagtatgagatccaagttattgtgctttaacagaggatgtggtttatgacaagcttgaatggtgaagcaggatccgtgctagtgctgtaaaaaatggctgtcatgaggcatagtggattaaacaattgattgtgctagtgctgggaagactttggctgccaattagactcaaaaataggtttgttgcaagtcacttagattttcagagagctgtcaactggatttgatgaggggcagcagaaggaatttttttgcaatgattatattgatgaattttaaaggagaagggactaggagattaaattatccatagattggtttagagctttctacttgaagtgttcagttataagtaccctttaaaaaaaaaattgaatatctgcagaataaagtgcatgctctgaatgttggaattctcttgtgtgatccatcagtgaatcttatggttcagtctgataaacttcgttgcacgctgtgactgttacataacatttgagattcacaaggcataggggatgattcaagcctttctttttgttggtgtacaaatggcctactttttgtaaattaatcctaaaaatgtagcatgttttttctttttgatatttagttattatctttttttgcacaatgtcaattgctatgtactatgatgcatgcattggatttcctctacatggatgccctgattaactaaccactcttctctttctctaattcagttggcagggacagcaaaatctagattctctgcaaa

SEQ ID NO: 12681 - DNA, 1006 bp, Vitis vinifera
  Intron number 2 from transcript GSVIVT01028084001 (locus G SVIVG01028084001) derived from phytozome v7.0 (chr-ID chr7 ; pos 3693998 to 3695003 reverse strand)
gtggagaggtttccatttcattcgcatttatccttacttttatttaaatttacatagaaagaaattttgattacttgagaataacctcacctccaatctgaatagctaataattgcatgagctacagtctattaatcaatataataaaaaagttctccatgataacaaatgtagaaaatacttctctccaacttcttgtgatgtacactcatgcatacataaagcactcatccatgcacactctgccaaagtagttgtatatctacccaagacaattaaagattgtgattcatattttatcaaaattccatctgggaaaaagtcctatatcatttattcaatttatttgatggatatgcattaggagttgaatccttcacgtgtaacatatcaatttgacttgccaaggtttatttagtgtgtattcttctaaatttcacatatgggtttggatactgctgaatgatgaaaatgtttgatgtagccaaccacaaggagttagcattaaatatttgtggagttgagttgggtcaagtatcaatcatccatttctagcaaaagcatcaaggaagagcaattgctacaataaagttgaatttggcctactaccaccatctgtttctggaagatttattgattttaagtagcactgtcctttaccatttggtcaacattgtgattctgtctttaggttcatttggtcttactgtctgatagagttgataatttaacatgttgcttgagtgataatgattctttagtaagttgttttaggagtgtcttgtatatggtccctaatcttaaagcatgagtttttcaacaacgtttttggtgacacatggtgcagaaatgatcagatcaaatccaagagttgttatgcttaataaataaaataccacaagtagttgttcattgacaatttcttcttccagttgagcttcaataccagcatttcataatttcttcatggtttgctcttaaaaggttgatttagacttgggtaact

SEQ ID NO: 12682 - DNA, 8201 bp, Vitis vinifera
  Intron number 2 from transcript GSVIVT01036434001 (locus G SVIVG01036434001) derived from phytozome v7.0 (chr-ID chr1 8_random; pos 5105120 to 5113320 reverse strand)
tcaagatcttcgatcgccatctcaaacgcaaacaagttaagtctttttttttttttttttttttccggagtcctcagtttggctgccgagacaatttgggaaaaataaaagaaaattgaatttagagtttcctttgtttatttggattctgttttatattgttttgggctataggaaaaatataattggagaaaaagctgcacctcatcagagaaccatggggttaagattttgctattgtcgtccctttggttgttgggaaaatgtgggaaagagaagtgaattaaaacatggagatttactgttttttcttttggtgttctcataacttaggaaaaaatatggtgttttttttttataaaaaagatgaaagctaacataatctgagacatgtagggcttaaaagcttgctgttaggctgtctttggtttctgaataactgaaggaggggaaacgaagatggaattaggatgcatattgtgttttcttttgttgtttttgtttattggagaaagaaatgattcagaattattaaagctgtcctcagctgagaaatgatctaggatttttttttttttttttctattagattctgtttggttactgagaaaatgtgggcaaggaaaagagaggtctgtaggatttttaatgctctttatttttttcttttttggtttattggaaaaaattaagaaagcaaaagctgatctcaactgagaactagaggagttaaaaatattgtgcttagcgtctcttcagttcctgagaaaatgcaggcaaaggaaattgaagtaaatggaatttggagtttattgtgtttgcatttgatattttggtttctttgttgttttggcatagaggaaaaaaattaattgaaaagaccaaaaaattgactttataagaaatataggatttaaaattttgttgttagccatcgtttggtgcaataaaaatatgagtagactaaatagaagaaaatggaatttggaagttcattgtgaattggtttattgtgtgtgtgtgtgtgttttttgttgttatggttcaaaggaaaaatatgaaagaaaagctggcatcagctgagaatggagggtttaaaattttgctgctagcctctgtttgattgccgagaaaatatgagtaaggggaaaagaagtaaatagaatttggatgttaattgtgttttgcttttttttttttctcccagttcagaggaaaaatataattggaaaaagaaaagctggcttcagctaagaaatggaagctttaaaattttgctgttggcctcagtttggttgctgagaaaatgtggacaagtataggaaagaacatagaatttggtggtttattgcgtatatatacacacatatatacatatatgcatatacaataaaccttgaaattctattcccatgttttcatttagagggaaaaaaatattgaaaaagaaaaagggtcaacttcacccgagaagtacagggtttaagatttttctgttagcccctgtttggctgcattagaaaatgtgggcaaaaagggaagagaagcaaatagaatttgaatttcaatttttattttttattttctaatctagtcttgtttacaggaaaataacaattaagaaaagaaaagctgacataaatagagaaatcttgactggctagagagaatgagagagagagagtgcgagagggtgagagagagggcgacggcgattgcgaaggagaggaggaggaggagagatcggcgtcgcaaatcagaaggaaggagagtaggttttcagtggagtctaaggagtttgagatcgcagtggaagatagaagaggaaagatccaaggatgcattgtggagaagaagggaggggcctcgtcatgggtccggctgggagcggagagcttaacgttcttcttggaagggttgaacctctgtatcaatggtgagaaagaaaccagatggggaagggaatggaaggagcaggggcgagtgtattctatgattcgggggacaaacagagcgggggggggggggggttcattcgcctaggggtctctgatgtggaggggaaaaggttctgcgtctttgtcccaagaggtcgtagggataagaaggggtggacgataatggcggagaaactcaaacaggtgttagggttttttggtaaaaatccggaaaaatacaagggaaaggttgtggagaaagttgctatgggagggtcgtatgcaacaatggtgagaaagtcgacgacgggtaacctaaatgctgctgcaataaaggtgacaaaagaggagtcagaagtgttaaaaaggaaattgcaaaattgtgttgtggcgagctggagagaaggattagggggggaagatgatattgagaaatgggggaaattctgggcaaagtcttgggacctcaaaggtaacctagggctggctaagttgaacaagaggaaagtgttgctggaatttgaagatttggaggaggccagacgagtcgtttcctccgggagctgcgcgtgggaaggaaccccggtaaggttggaacattggagctctaggagcggatgttgggcagagggggaagagagaagggacgtttgggtaaggattgttgggctcccaatttcgttatggagcccggtaattttgaggaaagtgggggatgcatgtggtggttttatcaccgccgatgaaaatacgagatcgatgagagatctccaataggcaagaatcctagtgaaatggggaggggaatccagacccaacgtgttggaaattgaaggggaggatgaaagctatgttgtgtccctatggtgggaatgttggccggtgttgaggaggaaatgcagggacgaagcggatcgtcaaggcagggaggttagggatgaggaggatccacgcgcggggcagcgagtaaggaagggttgggggagcgggaggctcgagatgctgcacctgtcagatgatgggacgatgctgcaggggggcgggccgggtcggattgagaccagctcagtgccaagcccgtcaaaccgtaattgggtcccaactgatgagatgaagccttcaagcccaatcgcgggcccaagggaaacaagaagggagggcgggcctagctttttgtttgggtccatggactctaagaacaaaggggtgactgtaagtgatgttggcccagacgaaggcccatcggaagctgtgggctgctattctaaaggtccagatctgcctctagcccagatgacagctaaaggcctgcttggtttaaaggcctgcacaacaagaaagggctctaaggcattagcagtccaagaggtaacgggccttagtctgaagggtcctgcgcacagtcagttcccagaagcagagttctttgctgcgagggaggaggagaacacaaggaagctacaagaaggggtgaggctgacagagatggatagggtgcttgaggaggaatcaatgaggtatgaaaagggggttgattcttgggggaaaagggataaggggaattctcatcttaattctttttctcttgatcggactctaggggggaagtctttcgatcactctggggatttggatgaggagggtcgggccgataaatcactgtggctaacagtgtataaggcatgcaatgagaggattaaggagtgtaaggaattgggaggcatacactgcaacagtgacaaaggtagggagatggaaggggcaggggttatagaggatgctcaaattgtgagaagtgagctggagggtaactgggaagagagtggtttggcaagattcagcaagtttctgggcttccctacggagggattggagaaggaaatcttgaattttttgacaaagatcaggaaaagaagggagaaaatacatagcaaagagttactggaaaagtctaaatttgaaagggagttaaaacgtttagaatgctccataaactatgagggagggatgaaacagaaaggctcggtacagggcaaagggcgccaaattgtagttgtccaatgaaggtgaaaattttgagctggaatgtgaggggggcaaatgacagctccaaaagaaaagtaattaagacatttattagaaatcagagggtggacttaatgtgcattcaggagacaaaagtgcagtgtatgatggatagcattgcgagaagtataggatcagggagattcctaggctggagagcagtgaatgcggagggagcatcaggaggtatttttatatgctgggatagaagggccctggacatgctagattgggaggagggtcagtttaccttgtcttgcagatttcgtaatatagaagatggaaatgtatgggtttttacgggagtgtatggcccttttactaaggtagagaggaatgctttatgggaagagtttggggcgatcagagggctgtgggaggatccttggtgcatagggggggattttaacattactttgttctcaagggaaaggagtgggcagaggaggattagctcagcaatgagaaactttgctgaaattgtggatgatcttgggctggtggatcttccgctgcaggggggagattttacttggaatgggggtctacataatcagacttgggctcgtttggacaggtttttggtgtctcctagttggatagatcaattcagtgggattaaccagtgcaggctgccccgaccggtgtccaatcatttcccaattatgctagtggggggtgggataagacgaggcccgaccccattcagatttgaaaatatgtggcttaaggctgagggatttaaagagcttctacgcagctggtggcaaggaatcgatgttaggggtagtgctagctacaagttggccactaaaatgaaggaaatcaaacagaagctgaaagtgtggaatagagaagtatttggtaagctggagagcaacaaatatgcagctttgcaacaggtggaattttgggatagggaggaaaatgacagaattctgactatggaggaagtagaactgaagaaagaggcaaaggaaaattacaaaaaatgggtgattatggaggaaactcattggagacaactttctagggagatatggctgaaagagggggatagaaacacgggtttctttcatcgtatggcaagtgcccaccgtagaaataattgtatggagagagttaagattaatggggagtggtttctagaggagcaggaaattagagaaggaattgctaatgcgtttaaagagcttctttcagaagatatggggtggaaggcggatattgggaggcttcagctagatcagatcagtcaagaagaggctgagatgttggagaggccctttacagaggaggagattcagggggctttaatggagatgaatggggataaagcccctggtccggatggctttactctggctttttggcaaagctgctgggagtttgttaaagaggagattatagaaatgttcaaggaattctttgagcatagctctttccttaaaagccttaacaatacttttttggttttgatccccaagaaatgtggtgctgaggatcttggggattttagacctatcagtctattagggggtctctacaagttattggctaaagtgctggccaatagattgaagagagtggttggtaaggtggtctcaaattctcagaatgcctttgtgaggggaagacagattcttgacgcttctctaatagcaaatgaagtgatagattcatggcaaaaacgaagagaaaagggttttatatgcaaactggatattgagaaagcttatgacagtatcaattggaagttcctattgaaggtgttgcagaaaatgggctttgggtctaagtgggtggggtggatgtggagttgtttatcttcagctaaattttcagtgatgattaatggagtgcctgcaggtttctttcctagctccaaaggccttagacaaggagatcccttgtctccttatctctttgtcatgggaatggaagtgttggatgttcttattaggagagctatggaggagggcttcttatcagggtgcaacataaggggcggtagtgaatctccattgcatatctctcatttgttctttgcggacgataccatcatattctgtgaggctaggaaggaccacttaactcatttaagttggattttgttttggtttgaagcggcttcaggactaaagattaaccttgcaaaaagtgagatcattccagtgggagaggtggtggggatggaggagttggctgttgagctagggtgcaaggtgggctctttaccttctcagtacttgggtctacccttaggggtactcaatagagcgccttatatgtgggacggggtggaagagagagtcaggagaagactagctctttggaaaagacaatatatatctaaagggggaagagttactttaataaaaaacactttggctagcatgccaatctaccaaatgtcaatcttcaggatgcccaagatggtggctagaagacttgagaaagtgcaaagggactttttgtggggaggaggacagatggaggggaaatctcacttggttaattgggaggtggtatgtacagataaggccaaaggtgggctaggcattagaaagctagccttgttgaacaaagcattacttggcaagtggatatggaggtatgctagtgacaaagataatctttggaaacaagtgatcaaggtgaagtacgggcaggaggatttcgggtggaggccaaagaagactatgggggcggtgggagtaggggtttggaaggagatttggaaagaatcagaatggtgctggaataacatgttcttcaaagtagggaagggcaacacaatcaggttttggacagatgtgtggtgttcagagacagcgttgtcccattgttttcctcatctcttcgctatggcggttcaaaggaacgcaacggttgaggaaatgtgggatcaaaattcgagtaacggaaactggaatctaaattttttgagggacttcaatgattgggagttggggttggttggggattttcttcagattttgaggggccacaaaccctctggggtagaagactcagtcctgtggagtaaaggaggaaaggcgcatttcagggtaaaggaagcgtataatttgctggtgagatctgaggatacaggctttccttctagaagcatttgggtgacaagggtgccaactaaagtttgtttttttgcatgggaggcgacgtgggggagggtgctgactttggatagacttcaaagaagagggttacaacttccaaatcgctgctttctatgtggttgtgaggaagaaagtgtaaatcatatactcatacactgtacagtggttagagttttatgggatatagtgtttggtttagtagatgtgaaatgggttttcccaaaaactgtaaaggatgttttagttagttggaggggttcgtttgtgggaaagaaaaggaaaaagatttgggaagccattccgttgtgtattttttggacggtgtggaaggaaaggaataggataacttttagggagggggtgttgaacgttcagaagttaaagagtatttttgtttgtaatttgtggagttgggccaaactgtatgtaggtgaggaggcgttctcccttatagggtttcttgagtggatggcttccacttaataggagatgtttttgttttgttgtttttgaggcttagttgccttgtataccccctgtatactttgtggcgtcttgccttttgaatgaatttcctttacttatcaaaaaaaataaaaataaatagagaaatcttgaatttaagaatttgtcattgaatcacagcttgattgggagaaaatgtgggaaaagaaaagcaaatgggtttttagatcttgcgtctttcatgctgggcttgctggagtgggttttttattttttattttttttattttcagaccttaaacaagtacaaatagattttgtttttgtagcacttccatgaggaaggtgaggcttcatttgctttactggagaataattccaggaagaattttcctagaaaatgcacaccctaaatacagcttaatttcatcattgccttcttttgataagtaatttcatcatctttttacatttcaccttttttattctctatttatctttgggtctttcactcattctttattatcaaatgtggttttgttccttggcagcgtgatcgagctgcgtggttggc

SEQ ID NO: 12683 - DNA, 11772 bp, Vitis vinifera
  Intron number 6 from transcript GSVIVT01009623001 (locus G SVIVG01009623001) derived from phytozome v7.0 (chr-ID chr1 8; pos 9983606 to 9995377 reverse strand)
gaggctcttcttggcaagtatgtattgcttctttatctttgtcctgatgtggatttgtgtgcttctatgttacatggatttggatgggcgttcagctgtcagattcgttgcatcccaaaattttaagacgttgggatttgtttgaaaatggtctaactatgggtgcaagtactttgatatgacattaatgaaaaataaattaatattgaaaattagcacgatagggtaaatataaatcatctatactactacatggttaattgtagttggagaatgtatattatatcttttctattttaataagatgctaaacattatcttattatgatgttctcattaattatacaagaaaaacctatttattatgtcctttattttagtaggatgtcgagaaaaatatttaagaaaatattgtaccacattgttagtaataaaaatcttctaatatactaaggtggtgtttgttttttggttaaatagaaaaaaccaaaatattttaccttttccattcaactaaaaagaactcattgacatcaaccaatataattaaactaaacttattgataacaagttcactttagttatgttggttaatatcaacaaggtacttttagcttaataaaaaaaaccaaatattttggcttctctattcagtcaaaaaacaaacatcacctaaatgttgataaaataaattcatattttaatttctacaaaaatttagacttcttttacattaattattataatttatctctaaatttttttagttattaattttgatatttatttttagactttttatgttggtaattattttgtttatctttaaatttagttcattagttccaagagttagaaattaattcaatttttctttatatttttaggacaattgcatttatgagaaactcttgtcctctaaactccgtgttcaagatacggaaaaaagagaagaaaaaatgtagggcgcagtggtgaggggaggtcgctgttggttcagtggactccaagtcttttgatctttctatacaagtagtgggggggaaatgagaggcgttattgaggaaagagggagaagtctttcaacctagattaggtttggagatttgagtttatgttgcttgttggaaggggtgaagacttgttgtagaaataaagacttggtgaggtggagtaaagcatgggaggagggtgggaggaagttcaagttggagcatcgattgaatggggtagggaggttcttattttggtcggtggtgactgagaaggtgaagaggttttcgttgatcatccttgaagggaggggcttccatggggggtggttagttttggtggagaagcttcgtagtttagccctaggagtaatccccttagctgagattaggggattggtctcccctttaaagttgaggaatattcaaaaggagggaccacttagtgggtcttttgcagaggtggttaggaaggatttgggtgtggggggagatgctattgatgtgttgcaaccttgtgacagaacaactttggtacgagagacgataactttctgttttgcagtagctgcaggaggggggacgtcttaaggaagtggtgtgaggtgtacaactggagcaagaggggcttgtttggtggaacactgtgctaagggcgcctttagtggggatgaggcaggggcccaaagttagggtcacaagtggtcgaagggagcccaaagtcctagtggttgtgcttctacccaggcccaaggccttagtatacctactgctttggagcccattcaactttagttaatgaagtgagaggatttaagagtgggtcaggcctaaggaaagtcttgtacaaccgggggtgtgcgggaggtgggtttaatgggtttaagtgaggatcattgcttattggatttggttgaggaagaggactttctagggtttctcaaagggagggctttctttgcagagaccaaggcaacagcgcagtacagttgcgttgaagatgggcgtgtgaggcttgaggcgttgctaaagtcagtcttggcgaggtcccgcatggcgttcaccgatgaagcacttatggcattcattgacgaagccctcatggtggaggcctctctttcttctttagggcttttggacccaggaagccaaccgctaaggatgttgtttcaaaatgacaatttgttggagtttttgggaaatgttgagaaggacccttcagctaaggaggtggtggctttggctgaggaggtggagccccctaaggccttggaactcacttacgttctagaggagaggttttggatagtctccctagtaattttgtcaatttcaacaactttttagggttacctgttaaggggtttgaaaaggaaatcaattccctactaaagaaattggagttaagaaaagggcgttgagttaaggtctcaagcggaaagatgattattcccccgacttcttgttttgagaggcaaatccgtaaactagagtgcttggttaattacaacaagtctccgattactatcaggggaagaagaaggagcattggggattcatagcctgttttgtgaggttggtctagagttttggtttgtgattgggttaagggaggctttagctttcttagggatggtcgattagttagggtggttggtgtttgctttctcttttccttctcttccttttgcttgtcctttggcattttttgtctactcttaggtgtactttgttgtgccaatttgaaagtgcttttaatatatcctcctaattcacctatcaaaaagaaaaaagaagaagaagtcgtatttgatacaatataagcataattaataaaaaaataaataaataaagatataaaacaatcataaactaaatatccctatttgatgcaatataagcatattagacatggatctcacacccacaattgtgtgatattgtgttgatgcgagtattttggctgaaattaacatgtccatatatcacacatgtgcttatttgtgttaatgcaggtaagtatctatatttccttaaacattattttttgcttaaaaggttagatcaatatataatattactgaaagtaaaatagtttatacttgttgtgccatttccaaggctttgcttaatatattcccttctattgttgataaaaagaaaaaaaaaaaaaacgaagtaaaattatagtggtagaaattccttgtacattattgggcaaaagcaaacaaaacaaggagaccaaaaaaaaagaaaaattaaaagctgaattttacccaattgtggagaaaatctactcaataaagctcatccaatcaataggcttaatgggtgatttttttcgtcatacatctttatataatggctcatcatgcatttctctgatcttttgctaatgtgtttgtagatctctctctctctctctccatttcttttggcttcctcttgtccttattacctttaaatttttttttataagcaaataaaaaaaatatattaatagcatttatgaaaaagtgcactaaagtacataggacttatacaagggtgccaaggtaagaataaaaagaatacacgagataggcataagaaggaggattttaatgcttgatccaattttttcatgtcctagaagcacttcctgttttttattttattttataggaaaccatacatgaatatattgatagaaaaagaagtacaatagaaaaagaagtataataggaggatgaggaatcctcccgccaaaggtgaaactaaacaacacaaaaagataacaagacactacactatgtcaactacacacaagcacccttgactataccgtcccattggaactacacactactagccaatttagttgtaatgcgttaaggggaatgccctcaaaaaccgcgaaacaaaaagcctaaagagaagcaaggaaatgaatggagtcccaaagattctctgaattcctagctttgtcctcaaatatcctaacatttctttcccgccacacaacctaaattaaagctatgcacgcgttttgccacaaaactaaccctctcttggacttgagaaaacctttataattgatgaagatcatgtctgaaatgcttctcggaggaacccaatccatcttggctagctgaaatagtttgtgccacaaccctaacgacatagaacaatgaagaaagagattatctgctgattctccttgctccatacacaacttacaaatgtcagggctaagagctttgtggggtctcctcaattgtagcaagtcattggtatttaccttcttgtgtgccacaagccagacaaaagccttaactttgaaagggacttgagatttccatacaaacttagtggggaaaaatggatatgaatcaggcatttgggataaggctgtaaagaaagacttgactgtaaacaatcctgaagacaataaggaccaagatcttgcatctgaagcggaagtggataaatgcatacaatcaagagagcgcatgaggcgttctagatcttctatctcagaattggatagattacggcggaaattaaagttccatgagaaagggtgagtagaactgagaattgaagatataagaatatttttatccgttactactctaaatagtcttggatattggtctttgaagatttggttccccaccacaaatcttcccaaaagcgaattctttcctcatctcctatgacaaactgagtatacttggaaaaatcctgaaagacttgtgtaatggccttccaaggacaatgatgtcaccatctgactaaagtattgacatcttaaccatttgagtgtgtctcgtagaggctaagaatgacctgatgccatagagctgtactctccctaggaaacctccacaaccatttccctaaaagagcacgattccttaaaggaatcttcccaaaccccaaacccctttttaccctcggcttacacactgcatcccaactaacaagatgatctcttttaccttccccaacccttgaccaaagaaaatctctttgcatcctctcaacttttgtagccattgaagcgggaatcttaaacagagaaagaaagtagttagggatgtgggaaaggcatgagtgtacaagagttatcctaccactgaaagataagtaagccttttgccacccgtctaatctcctagagattctctcaatcactggatcccagaatccacaagcagttggattccctcccaaaggaagacccggataaagtatgggccaatctgaagccttgcattcaagcaacaaggctaacctagagagatgattctgatcaaggttgatgccaaaaatattacttttgtcaagattgaccttaagcccagaaacttgaccaaacactaacaataaactcaaagagtttgcagttcttccgcacaagagttagcaaagaggatggtatcgtctgcgaattgcagatgggacaccctacatctatttctacctaccctgaagtcctctagcaaacttctttcctcagctttcaacaacattctactcaacacatctgcaacaatagtgaataggaaaggggataaagggtcaccttgccttaaacctctagatgccttgacccaccctttagcaataccattcactagaatagcataagagaccgccgacagacaacctctcatccaaatcctccatttagaactaaatccctttttctccaacacatgatccaaaaaatcctatttcacatggtcataagccttttcaaagtctatcttgaatacaactctttcctttcctgatcgttttttctcgtccacactctcattgactataagaactacatccaaaatttgtcttccttgaacaaaagcaccttgagtagagtggatggtcttgtgtagtacttctcttaatcgccttgacaagacttttgctattaccttatagagacaagtgatcaggctgataggtctaaaatccgaaatcttctttgacctactttttttgggcaaaagaactatgaaggaggcattggtgttttgattaataatcccactattgtgaaactttgcaaataccctcattaagtcatccttgatcacatcccaacaatcctgaaacactgcaatggtgaaaccatcaggcctcgacaccttatccctatctaactgaaaaatggtattaaagatttcttcttcggaaaaaggggaatccagcctagaagtactctcttctgatatagggaaccaatcaataccttctactctccaagactctctaggaggactcgagtagagctttttgaaataaaataatatctcatctgttatgctctcggaattgtccaacaccaaacctctttcattctccaagaatttgatgaaattcttgttccgtctctcgttagccattttgtgaaacaactttgaattgcaatctccgtccttaacccattttaccttagctttttgtctccaatgaatttctttcctcaaaattatttcctctaacgccccttttcttacaactctttgaacagaaagatcagaagaaagaaccctttcttgttcaatgacatcaatgttagctatttcatccaagatggtttttttcctttcctttagcattccaaaagtattcttattccaatctttcaattttgccttaacaaattgtaacttcctcatgaacttgtgaccttcccaatcatttccttcaaattctctccaccaactactaaagcactctttgaaactaggatgttgcaaccacatattctcaaacctaaaaggtgttgggccccacttgaaaggattggtattcaagacaatcagccagtgatccgatgtccatctaggaagaacttcttgaaggctttgagggaaggaaagctcccacacatttgaatagagaaaccgatccaatctcttgcacaccagtgactcttgcatatttgaccaagtaaaagaggcattccataatgggggatcatgtaattcacattctcttataaaaccatcaaaatccctcatgctagaagtgagtctagagccacccagtttttctgatcttctccttataacattgaagtcacctcccacacaccatgaaggaaaagtaaggccaaaaaggtctaacagctccacccaaaaatccttcctaattaaggggttgtttggaccataaactgcggacaaccacaatggtccacatccatccaacaagaacttgactgagacagaaaaaatccaattaccacctcctcactgctcattttctttgagtcccaaatgatcaaaatccctcctgaagccctgcacgccgggagagcagcccactccttattcctaatcgaccagacactacctacaaaccttttgtcgcacacctttctttttgtttcctgaaacattactacatcaggattctggagccgcaaaaaatacttaaccaccctttgctttttcttagatcccaaacccctgatattccagcttatgatctttgtaaaaacaccttactgaccctatgcctccaaaccaacgccaacagatctcaaatgtctgtggcaattctgttctttcatcttcaatacaccttactatccaaggagcttaagacctcacaaactttagccattttgctgggggaaaaaccttttacttggaacccacccatctgggagaactctgcgtctccctggttaactgtacccagaataggggccctaggaggcgtgctgggtttggtcttaacataattaaaactctcagacaaaagattcaaactagccaactggaacaccgcatcatcatggttaggattgccaacaaacccaagacgataagccccaacgtcatttttttttttgaaaaaatttcagagaagactcgatttttcataggaaactgggattgaaaggctgaagtggaaagatagggaatagaaggactcgggtatggagtagccaagccagagaaaggagaaagaaaatgcagagatggctaagaaaaatgatgagaagatacctcaaaattttccactaccatcattccacagtaccccatagagttgagccctttttcgctggttgcgggataagaaggatgaaccgtgactaaagatccactatgagaacaacccacaaaacccttaaaacctgctccgtcttctcctttagcaatattgcgcattttctccttcccttttgatagaaaaggagccctaagaagattcctttgctccacgttttccttcgtcgacgttgttccttcctcggaacaccttttttgaagccctgacaaacggtttggactcgcactgaagccttgaaccaactgtgttcctgctttgaaaacgtcttccattggaagagcatcgctaactgacagcgatctctcaatcatgagtggctcgcttcggcttcaacccccttgtcggcatgtagagcttgaaggaagcagagcattccacagcttctttgaactgcatttcaacgcggagcccctctgttgagtttcagaatcctcgtagtctacctttgccttcccctttgcagaaagaacaactctgtgtaaagggcccttcgtatatctgtcctgattgcctcccagctcttggcccaacaactgaatcgagcctttcctagggactttcctcttctagcccacgtcaaattcagattgtggactgggcttactagaagaatgggcccttgtcatatgtttagaggcccgaatcctatcctcaaaagttgactgggctttgacccctccaacttgttctcttctagcctgccttggcctagcagaccctactctttgactttttgaatttgaattgaaagacagtggaggttgggaccaactgttccccactgtcgtcttgttcattccacgtgtcctcctaggagcattcttagccttttgacccgctctccactcctttgttctgccaactgccctaacagaagacccccttccagccgttaatctagcttcctcaaccctctttctgccatctgtccccgtgtaagcctcaaccatttgccgagttgactcacccatttctctatcctgcctaccattttccttcctagccactgccactgaaactatgaattcccaacccccatctaacaccttaatcaaagcagggagaaccaatcattctttcattacaactctcaccctagctttgcttagatcaaacagtttcaacgttcgccaatcaatctctatcaccgtcccccactgctccataattttcttcaagtgaacctcagaccataaatgaaatggtaaaccccataaatctatctcacttcctgtttctttcttgccaaggaatccaaaagatgcataaagaggcaaccttcgaagctttttttcttctcttccccacaaagttctcttgccaacttaagagggccctgttaattgaatttgtcatcaccgattctacttcaaacaaagagaagctagctgccataatattcctgttttagcgcaatgaagcaaaagatgatctgtcgagtcttccttatttttacataaggaacatctattcactaaggcccaacccctttttttcagctgatctatggtgagaatcctgccccaaattgcctcttaggtgaaaaacccacttccattggtacttgagggtttgatttaatgtcttttagaaatggatcatatctcctgacaacaaataggaatatgaggattttaccaaaaacatgtgtcttttcgatcctaacaagaccatcttatcctcactattgcttcttaccacttgtgaatgcaatattgagaggaaatcctccatatcttcgagctcccaattgtgtaactgtctaacaaagaaagggctccaacatttgctttcccttaactgctcccatatatctactacccaagcatcatcctttgcagaggctttatcaaaaagagatgggaaagaagcactcaaggttgactctctataccgtctatctttccaaaacttgacccttcttccattccccattataaagcaatatcttcttttgacaacatcccatgcttttctaattgccttccataggcatacaccatgcccatcccttccctcattagaacttcatcttcaatgaacttccctacaataaccctttactaagaagctttcctttcagttgcaaaccttcgagtccatttacaaatcagggccttgttaggagcagccaagtttctgataccaagactaccacctttctcctccatgcatataattgaccaattaacaagatgaggtttgttatttgatgatttcccccacaagaaatctctctaaatcttctctggccttaaactcacttttttgggaatggaaaacaaagacatgtaaaggaaggcctagataactggtgggtattggaatcagctggattattaccttaaattaagcaaaaccaatttattgttattataattggtttgcatggtcaaggtttaatggttgatgtagagattctagcctagggaaagctttgagcctctcaaatctcttagtaggagattcccttgttgtcatatcactaagaaagaaaggagattgttgaagtttgatgggtggttaggtcaagttattatatttctttagagttaggatattccttcaagtggtctctttgcttagggaatcttgcatcggatgcattagtaaagcatgtagctagatatttggtttcttttgtaggagattttttattttttcataaaatatagtgagtgttgttctaaccattttgatgtctgtagatagatttactttttgatctagtatagattcatcatatttttttatcagactttgtatagagagttttgtacttgctggaaggatttctcatctttctttgtaagttacaatttctatattataataataataatatattattattattattattattattattaatgctcctacatgaccaagccactcatcatattctcaaatgcctactttaatttcctaaaagcaattaatttctaattcaatcatttattattttgacatccatccatcatagctctctgggtacttatcttatagtttcttgtttcttcactacattggtccataaccatttaacttttcttgttttctgttgaccacatgaccaagttgttatagccactcatcatgttctcaaattccttctttaacttcctaaaagtgcattaatttttaatttgatcatttattattttgtcacccatcatcttgtagcttcttgtttctttgctaggttggcccataaccatctttacttttcctgtttgcttgttgaaaaaggaatggttcatgtcttgcccctagatgaagacaaatatatcctattgattaatgttatttatcttgttcttttggtagataacctttttttcctttcttcttcttctttctttcttcatttattatctcgttcctactgctttttgcctttttatttttttatttttgatttgctgttacatggaactgaacctggaacctcctccttcattccatcctcatcccgacctcttgtcatttgagcctgcccccaagggctgatttatgttatttatcttactttttgttattttcttaataactaattgtggtttttctaagttgagtatcaattgaatcatgaagacaaaagccaacttagcatccttcccacattagtttctctgtcattacttgttgaaactacttcaatcaagttctgacaatttcagtcatggcatgatatgcagtt

SEQ ID NO: 12684 - DNA, 7050 bp, Vitis vinifera
  Intron number 5 from transcript GSVIVT01008492001 (locus G SVIVG01008492001) derived from phytozome v7.0 (chr-ID chr1 7; pos 1372019 to 1379068)
tacttccagtagtgattcgggctcttcatcaagcggtttgtgtttctgtgaaccttccatatacacttcttgcaaatttgatatttgtttttgggagttggagttcaggactacgcagcctattttgtttgttaagaaacaagggatcgaccacaataggacattaagctgagtaagaccctagaaaagaaatcattgcaaacaataaaagaatatctgctggaaacattctcccccaggtcctagatatcctaattatgatttatgtttcctgaatttcttcttaatatgcatatttgaccttgtagaatttgtctcaccctcgctttacttacagcccaaccaatctatggaatctaaaaaggtctgtctcaccattcatatatagtcttaaatcatctcaacttctttctgatgacacctccatttcccatctggacagaaaatgcctcattcgtcacctcatttgatgcaagtcttagttcaagttttatatatgctgatgaacagttaatctgactcataccagttagtcctggcttggttaccatacctgcccagtctcttaatcagagtactgtatctatagtgtatggaaggcaaaggttgggaatttgtctcctggcatctgttttaagatctgcctagcacttcacctgccacctaacttaattagacttaaaatgaaattactacattgaagttatagtttataaaaatttaaatcagatagttgtactcctaatatctctgtttgtattctgttcctcaatctccaattgttcaacctcttttgaccattaaactgctttaaacttcttttctcctctctaagctctgtcaaaacaaacattttgggaaagtaaaataatcttgaaattttgtggtttctcaagtgatgatgttgtgtacccctttttatgttcacatttatgcttttgtttatgttgtttccttttgtgtgtgtgtgtgtgtgtgtttgtgtttattaatttatttttctaaaaagttatgttgaagttcatattttgttagtgggtcttggttgctgtcacttttcttttctttttattcttcatgatccttattgtgtgattctctttacacctttttatactttggattttatgggggtggtgtctgatacattgatacttatgttcccctttggcatttttatatatatgctttgttacttatgagagatacttgttttggagatttgatgaaatcaaacataatccaaaaactttcaacagcggtgcagatggtgtccaataaggttttatgtttcttaaccagaatgtttatgtgcaccttcctaaacaaaaaacccagaatgtttacatgcgcctatgtatgtgcgcgcctgcatgtgtgtgtcttatgtaaaatcctaaatgttccacctcacggaatatttaaataagtttaatagaaatgtgggaatgcattccattgctttattacaaaaaatccatgggatggacttgtaaacttctcatcatagtttcaagcttctattaaattttttatcttaatcttttgctgtatgtatgcaatggttccatctggagtcaaacacttggcgcctccaattagacatgggggattacaggattacataatgtgtcattagctttagcattttaggcactattaggagtcacttgatgttcttgtactttaattttgggaagctttagcatttgagcaatagattgagtccttgcagataatgatagaaagaggattatgtcttttgtggaactaggattatacaagacatgaataaaatctggaaacaaaatgagggaactaggtcttctcatgtttctccatctttgtcttttttccctttgtaaccaagaagcacgggaaagtgctgtctgcttttttttttgatagataaaacaattttttattttttttctttccttattttgcttttgagctttggaaaatcaatttgctgttgtacattgtataaattaccatgcacttttttgacaggcaaagtcagcatatatgttagataaagatgcctaatagtagattgagcaacttgagtacacagtaagtgtgaggtacactaaatttgaaagaaaaagaaaatgcaaaacagaccaaccagcctatattgagtccaaactattaaataataaatttaacatccctcatcaaacatttcttccctctttttaatataattattctgtgtttacctatcaaaaaaaaaaaacatccctcatcaaacatttgacccagaattaatatttgagaaattgatttttcacagctaacttgaacatctctattctttcagagatttattattttgctctttgtgaattaatcagaaaaagcaaagggagtcattctccgattcaaatgtgtatctataaccatgcatgtaatgccccaagagaccccaaatggggagagagccatacttcataaattgaatgttcatgggaatgaatcaattagtgtctagtgtttgtttacacaacactagttaatcagagtcttacctatctcataagatgattgatgggatgagtcttcaaggtctatctacgaaaatgaagaaaaaagaactggaaactttggtggatttttagtttctttagcatcataattagtaaatagttggttatttaagtctcagttagaatttgataatgttttttattggaaatttgtccttaaaagaagttttgtattcctaggctttctattttttagaaaatatatatatatatatatattttttttagtcagaaacaaaactaattgattgatagaaaattgataagtacaaatgaaggatgaaaaatccttctccaattgacaaaatctgatcaaaatccttatgaatttgtaaaggggttaaaaaatctgctacaaagggagcccaatgcttggctactttcttttggaaaaaatatttttccttttctaaagcctagaaggttatttcatctaatcaagagattaatggatgaaccgatgatgaataatatgaacttttctgcaatccttgcaatttttaatggtaaaattacactgtttttcttctaaatgatacatatatttcatctaatcaagagactttatcttatctctttttctctataagttctctcttttctcttttttgtttatttttccccactgctgtaacttttggtcataatgccttttcttaagccctaatgtggttaaggttttgcctatctattgttataattctagattgcttcccatgcaaagaatgccacctttgactagtgttcaataccaaggaaaagattacctgaactcaattccttgcaaaaggactacctgtgaaaatttgtatctggcaagcctctaatatcaactaatcctaagcacctccatgaattgtcactgttgctcagacccctgatttcagctgtctactgcccagtcttctttttaacagctcaattaaacaagcttggaacaatgcttcaaaggagccaaactcttaagaccatggtcactgaaatccaatagctagagcgagtcttttaagccttcctaatagcttttcataggcccgtcccacgagtgtccttccagcaagcaccaaccaccctcccaacctcatttcccaagtaaagctttattgaggatcaagagatttccaatgcctaaaaaaccctttactgaggatcaagatactttcaatgcccaagtaaagctttaaacaactatgtattattcaatcctctgtatctaggtttggttgaaagagaattaaaattgcatgtcatctaacttcatctggttgttccatttttttatatgtaagttgtctgagtttttgcaacaaaatctttgttgagatgttgtgcttatgcacaactaagtttcgtgagggtatcagtgggtagtgatatatggtgcaagttggtgatgctaatttaaaaatatgcgagttgggtaagtaagaaaagaaatgatgttttctaggatttgttaagtttatagtacaagcactttggtattttgactccttgacattggagatgctttgggtgaataggctcagtgcactttggatacgaaaaaagctctggtacctcttgtcaatttggaaaatatatatttttaaattccttatattgcagttattgtcattatgggagtgagtggaaatttcagagcatttcaacaacaatttcaattgttaaactaatggcacttgagttgtatttgtaatgaaggtatcttgatagattgattggatgtggatatgaatatttaagagaggtacttgaatcgacaccaaacaagcacttggtgttgatagcacttggcgttgagcggtctgattaatcaattaagtctttattcatgtatacttttgtgaattgggctagggtgtatatagaagatcacattatatatatgattgattttatagattgtttgcttgtaaagtaaggggaaggtctttttttgtctccatactacttagcttttgggggcgttatttgtatacttcatgtgtactgctttcgttgcttttaggcatttctaatgcaagccttttattacctatcaaaaaaaataaaaataaaaatttaagaggtactaattagaaattttaggtatttattggtggatggttgttgtagtttgaccaaagaaatttgagatgtgagacttattgtttttgacagaggttgattgatagtccttgaagatttgtctggtcagttttgaggtattccttgttgggttggacacccttgaaattctgaccttgtattagaaattgtgtgccttgattctgaatggttccatcctattgtatggctaaacatgaactccaccggattgagtcataggatttaatacttgcattcctagacagcaaaatcacttaggtgaatggttttccgagagtgttcatattagtttaacattgttcccactatgacctagaaccgagtacagcagtccaaagtagtattttctaggaaagtaatgctgaaaccttcttaaaaatattttaaaatacagaagaaaaactttgaatcagtcacatatataaaagggcatgaatgcagatatataatatggacaagaggggccaacctacaggtacttcataaaaaataaaaaaactacaattatgttaggaacagtggcaattcattggaaaaagaaggaagtatttctactgtgggtttggtttaaaatccatgggttaatggtgtacagtaaggcttacattatctcatttgttcaaaaatcacaaagaatcaatttggtcaattaaggtttgggtaaatttgttaactgaaagtgagcatgctgctatcaaaggattaaggtagctaaagaaatgaagaaaggtaagctaaagcctgagcagaaacaaagtcagcattagttgatcttcaaaattgacatcagtgttaatagcatgttcaggcaaagagattaatagtatttttggagtggtgtgggttttgcattcctcaattaggagtctgttgggttgacatggctcttttgtgggtaaaaaaacgaaagaaagcatggagggcagctcttttgtgcttgttgtggactattttggaaggaaaaaaatagaagggcttttgacaaagttgagcagtccgaccaagctattaaatctgtttttatgtatacttttgtaaattgggctagggtgtatgtagtggaccacatgttgtctatgttagattttgtagattgattgagctctaaggagaaagttttgttgctccttacttttttcgcctttatggggctttggttgtatgcttcatgtgtacttgctttgcctctttttaggtgcttttaatacatgccctctttttgcctatcaaaaaagaatacattagctatatgaactaaatgcagcccccaaagaaggaaaaaatggagatattccaaatttaaaagtttggacaattgtgttgagttttgcatatttattttgtgaggagtgtttgaatcatttgccactgagcttatatatctgtgtcattgggtgcctaaagctgtggttccatgccagaatgacaaactgttctggctttattaaaatttcctattttaaaagctggtgatcttttacattcatgatgtttgctgtgcatgttccttaataaaacctaccctccagggtagccctgttggtcaggttggacactgggatgtgtggtcccagtaaatggcacgtggtcttgggttcgaatcttgccattgatgataccctgaatgtacccagtgctggttgttgcagaggtttgggtccccatggagagtcctaagggtttgtctatggaaggttcataagttattaaaaaaaaaaaaaaaagttcctgaatgaaaactttgcattgaaatggaagattgaatatgattaaaatcttgcttgccacctgctctcatacttctagtagttttgacacagggtttttaaggagattgtgcttttatcttctttgattgaggtggtctgtgggaaggcttctgtggcaccactgagggggctgacctctttggcaaaagttggccaagatgtagcttcaatatgtccatgcacagagattaggacattgattattggcaatttgcatgtgttttgtgcatttaaataaggaatgtttttaattctttcttatggtgtgggggtggtggtaaaatttatagcttcagaggttatcatttttcctggcaagaacttttgtagaagattagcgtcttgctgtttatttttgtaagtgtgaattctacaatgtcaatgatgatgtcaaatcttaggacaatgtattcatatattcatgattagcataatattgtcccaaaaatctttgaacaatttagtttaatgagtgaaatctctctctcttctttattcttctattttttcatttgcatttagagtttattatatcttatttttgataggcatttgtagtttactgtatctgttgtctttcagactcagactcaggcagttcttcaggtggtgaatca

SEQ ID NO: 12685 - DNA, 5686 bp, Vitis vinifera
  Intron number 3 from transcript GSVIVT01036893001 (locus G SVIVG01036893001) derived from phytozome v7.0 (chr-ID chr2 ; pos 18081970 to 18087655)
tgattttgttgctggttgaggctattggtgggtttatgattcattttcattatttgtcctatccttgatcttctatctgcactcatttaacttctctaattcgaaatgttgctcttttatagaaaatatattgtatgttgagatggtggagtgttaaatgatttcagaaagtagaaacttctttggtaaggctaataatttgttagggagtgtaaaggaggtccaacccaactacaggcagagtatacacggatcagaaagacaagaaagagtagaaatctagtggcacaatttaactcaccaaggagaagaaaaaggaacttctcctttccaaatggaactcttgaggctaatagtacaaagtagaaagggataaatgctaagtttcaatatcgagagtttctcctctctgaaagtcctttggctcctttccttccaaagcatccacatgaaacccaaaggagattcctgtcgaacattacattctcttcatgaccaattaatcccaggtccagtgtcttctcatcttgcttgcatgcagacaaccagttgggaaggatcttacctctgtgaacttggtgatcaatagtcaaaatcctttccaatgaagcagccaaataaaagacccctttgtgggactgcagctgcgccatatctttttctaaggaaattcccttaacagtgccccaggtaatgattttataaagaagtaaccattgttggcttggtcctcccatttgataataccctcctgcaccatctgagtgccaaatagaaccttatggaatctaattgataaactccagctcccactcctgaaagagggatatgaatgttggtctgcataaagaaccctgtataccccttccctgctccccaataatccaacaccttagcctccttattcctagctgtggccaaaaggtcaggaaaagttactttcaaaggcttatctccatatcagatgtctatccaagacttaactctagcctcattccctcttacaaatgaaactcactcctaaaatcttgtcacatcttgctgacacttttcgacaaatcaatcctgtgagaacccctcatgtccctccacagccggttccctagaacagcttattagcccagccctccaacttgtttagagttgtacttgaatttcttcccttcataagttgtccctctgaagtttttctatcctcttagtaaacatagaggggatgtaaagagcacatgaaatacatagccatgttgttaaagtattataaatcaaactcaaaccatttccttttggtagatgatactttctccaccctaccaatctcctttgagacaatatatcatcatatcctggtagcaaccctatttctccccctcaaatttgcaagaagctaggctcctttgcaccttcataatgggtgaaattagcttgactttctctttttctccagatgtattcctaaccccaaaactgccttaaggaatataggaaaaaaaaaaaaagtttccaatgcttctcaattgcaccatattcacagcacaaaggacaaatctcctgcattaaaaagaggcaagattggaactgtttcctcattttttcttcctaccacaaatcgttcaaccactcatgttccattgccctaaagataagtcatctaagcacctccttagccagaatgataagagagggtgacaaagggatccccttgtatcagacctctctagctgctgagcatacctgagggctctagtcatccatcactgagaaccttacagttgagaaacaaacaacaattcatctctccctcagaacatgaaatagaaaaactccaagtaatttgatcataaccttgtctatattcaatttgctcagggggctggatcatgattcctcataatagagagcatattcatttgccacctgaactacatccagaatttgcctttgcatttttagaatgctacaccagcttgtcccctaccctcctctatctcaagatcaagacctgggcatgtcagctgttaaaactccctaccaagctggtaatcaaaaagtctttgaggtcttctgctgccttcctttttggcaacaagagaaaaaggtggcattcaggcttttaactaaaacaatgcatttatgaaatgttctgaagcccacatcagttgatccctcactaaatcccggcctctcttaaattaatgccttagtgaaacctttaaccttcttagatctggactgcatcttcgtttttatcatttttaatgtctgaaaaacacactttagacttttgattaataatattcagaatcatttagaatatctttcttctacttctatttctcctttctgtattagtttttctctactgttctacatcacttctcctcaaaaggtttctccatctctgccctgtgtctctctgccaacctcgtgaattccgtctcctctatcaagggtattacagttgtcttgtattaatgagtattgtacttttcataagaatatataaatgcgcagtctaattaggtcttttttgggtcttcctcaacctgctacatatggcatcatagccaacctgacagaacctggttcttctcccaatccttttccttcttcaatgtctttttttcttctttcttacttcattctatcttcctttgttttttgttggatcagaattccttactttattctagcttttctcattagcatgcaggagataatacattttatgtctgtgtgttttcccaattacacaactccatattctattccctttcctattctttatcctgggcttcaccttaatagtgacctcaatgtcatcttccttttttattcccaatttgtaatatcacaaatcatttcccaatcaaatttgttttgaaagttatttgatatggcacaatcagttcatgccttttcttttatgcaacaatcttctcgattaatggacagctctagctttcctccaaaaactgttcttgatgaatctaacaaataagttttccatctaactagaaggattttctccattcttgtcaattttgctgacgtttctcaaaaggtactctatcccaagcaccattatttgtgtctcctccctgtaaactagggaggaggtatgccaaatcttcaaaactttcttttaacaatagtcagtatcatgactggacctttcttggaatagacttcaaatgtcaagaaaggaacttcttgtcattcatcatcttgtgcttgagtttgaacttattagtcatacacttaatgctctaaagcttgacccagactatcaaccatttgtctttgcaaagaaaaaccatgaaaatcaaccaacctttgatggtcaaggactcatatactggtgcataaaccatgagtgcaaagtattcacctgcacagattgtcaagattggactgaatggttcacaaatatcagaagtcaccttggttggacacatccatggtccaacacaatacctgaccagaggcctgattattgtgcaggggtgatgggtgtcatacttatcaccaatcccaacactacatgatggacatgatagacattagtgactttagtgcccttgatcatgacagctattatgagtgttattcataacatgattattgtgatgcaaaatttgcaagcagcaatgctggaccatggctgatttaatgtcctcttccctggtaatataactcccattatatgatctgtttaccaatatgattaaactgctgatgtgagtgtaccaccatgtctggctttccttacctcattttctccagctcttctttattctttctttttaactctttttttgaaactgtcatgtcctagctagaacaaaagtaaaaggaccctcccaccattggagaagctcaatacttgatccttccaccattgtttaactttctctgtgaaaccatcagctttcaaccatattttggcggtctcccctcatacaatggaatcaagaaaaacaggaacatgattgctaaccagtcaagaaagaatatagtggtagatctggaaagtgctccccctactctgatgatcgagaatcttttcaatatggatatcaagggagattctgattattagtcaagtgaaaaacctcttttcaaaagcaaatatcattagtatctgagaagtgcctctaatcttccttctgcctctctttgtgaatggatccacaaacattagaagaaggattgtcctgctcctaatccatcacccactctttcaaaaacccagctgttatgtatcttgaaaaaccatgtagagccatcatttacatgtttacagacacaagataggaaaacctaactatgacatccttgtaagctagtaagttatcatcctcttctctggcatcataaggataacctcccatcacacccgttgcacctagagctacctagtctgctgatgccctgacccactactgtctgagcatttcattgctcatttatttcctccatcttcattccctgagttctcatgaaatctggcctccactcctttgaaaaagagttcattgctactccccaactaggatgattaagattgcttatattttggggaatgatcttgatcttgatgatagcatcacaatttcctgtcatctttcttcctcctacctctcctccctccttaccgccaccgtctcaatttaccaaactcaatgtggttttctagttccctcttctttgattactacaactcgcctttctattcttaaaagcttcataacccctcttcccccatctacccttagttattgtaaaaggactctggtctcctcctcaaaaccttcaaatgacactcccatgaatttactaagacccacaatcttccttgttacccaatctggagcctctttctccacctaatccaaaataaattcaccctcaaatttggtcatgtcaccaatgggattaaaatgacaaccagctccaataccttccagttctttcatttgatgcagagtcaaagtctccctttgggagagtcttctcctccaaagcaacaactatggcaccgccaaggctagaccttcttgtccatggattgctctgtgttgaccctctgcacctcccacttttgcctaaggctcttagtcaaacccttgagctgcccaaaacccagggcctccatctcttcattgaagccagcctaccagctatcagccacaatagtggttcttcctcccacataccaccttttattcatgattcaatgtatgttattattgggaatttagactccatggaaatccacatctattactggaataaagtgtccaaaaacaatctgaggtggcttgttaggacatgtttggtgtaccgatttctaaatgcaactgatgggtgatccggctgggactaaaacttatgccttatgaagatcccctatggaggtatgacatgtttagtttgacttgacacaatcctttagttactgaacttcagttttgacttggaaaatgtaggtggtatattagagcaaattcactctcttattacaattattagcagtcattatccagtaaaaatcactatttgtttatctggaagtgataagaaatgcatacatgcgtggagcatcctccttgatctctgatttttaaaagatcaatatccatcttaatcaatcctattaataatggttttattccatttgtag

SEQ ID NO: 12686 - DNA, 2472 bp, Vitis vinifera
  Intron number 1 from transcript GSVIVT01010789001 (locus G SVIVG01010789001) derived from phytozome v7.0 (chr-ID chr5 ; pos 22607088 to 22609559)
ccgaagagagaatcaagttcaagcttgaaaaggtgatcattttttttattctgtactcttgattactattattatcgttgttcttcttgtaatattatttgaattgttgattgtggctagttgaaaagggtgggattattaaaatgctgcgatggtgaaacctttttgtttgtttgatgattatgttaagctttgtaaatttcattattgtttctatttttgaattggcttggatttactgttgacattggtggatttgatgaacaattgggccttgtgtcgttggtttctgcagtaattcatcaatttataggactggttttgtcggagactttgatacattgatggattttataagaaatagattgtgtttttttcctgcttcaactacaaaagagttgggttgacgaattagtctaatactgtaaagaacactagttttaaagccgattgggagctgggaaatgatgcaatttgtttgtcttgcattcaagatgtgattgtatttgttacatggatgataaatatagttgaagtcttctaaatatgggaaattccttgtcaaatctaccttaaggctgtgaatttggatctcggtatatatttccagtatagatgggtttggggatcacttgttcattaagttggtatcttatttgggtagcagtttggaagcatatttttattttggacaatttaggtgaattggtgttgtttgtgtactaaggagaaggaatgagccaattattaacttatccattgtgagatgactgaagcttggtctttattgttttgaagatttggtattcctagggtgcttccttagtcaatcaatgagacattgattagtttgcagggaaggtttgtctgtgagggatatgtttgttttgatgtatttgaaaggagtggaattaatgggtgtttttatgaattagaccaataagaattgcaattgaaaaatgtttcatgacccttttgttcaagtggttcagtagatagactagagatgggaggatatcatttgtggatttcattgatattttggattgtattttaggcattaggagttttattctttgtgacccttttgttcaagtggttcagtagataaacaggagatgagaggatatcatttgtagattccattgatattttggattgtattttaggcattaggatttttattctgtttttttttttatccctattcatattgttgttgggtaatccttgttcatatttgtgtgcatagtttgttctacctttacgaaataaactaagattaaaaaaaaaaaaaaaaaaaagagcctaaaaaagaattctaaagttgatctattctcatttagattatacccgttatcacctatttgatacacatgggtcttctctatccactttgtgcatattatcttagtggaaaatagtgttatcaaaggccatcgcctaggttgtttaagctattaggccaagtgggacagataaaagtcgccttttgaagacataggcaaggtggcttaaaaaaggcaacacttagacaatcaccttgggataaggagcaaggcataaaggaggtcatcttttaccatgagttaagattaaacatacttagattataatttcattcaatctaacattggattaaacaaagtataagatgaattgttatgttatcaatcatagagataatgagatgaagggatatcaatctaatcttaatgggagtgatgacaattttaatttcaatgatgactataataatgatacccaaagcttctctaggacgttcattctcttattttgttttttattttgatttttagatgtctgaaaaattagaatatgcatttagacaacatggatatctctaaacaatatgatgtttcttatgaaaaggggtagaatatttaactctttgaataattattactattttattttaaaacaagcgaaaataactttaaaatatattcttagataacaccctgttttcaaaacaagttctcaaaaaacttttctgtcaaaaaaattaataaacatgtttttcatttctagaaaacaagtcccaaataggctttcagcctctctctctttcacctcccctccctcctctgctcctcttctccctctcgtcatgataatggacaaaagttttgtaaattaaaatttgctgaaacatactgatgttcccggttttcgattactcgttcatgaactgctaggataaaaaggtgtattgatgttcttatatgcaccataaacgatgataatggacagaagttttgatatctcaaaataacaccgatctttgctgaaacatcgatttcctagtcttctattactggttcaggaactgattctcaattatgttgtccttatccaaagccctaatttcttgtgatcttagctatatgttccgtttattatttttccattgcaggcaagaatcaaggaagccttactcattgaaagact

SEQ ID NO: 12687 - DNA, 14773 bp, Vitis vinifera
  Intron number 5 from transcript GSVIVT01028406001 (locus G SVIVG01028406001) derived from phytozome v7.0 (chr-ID chr7 ; pos 7240666 to 7255438 reverse strand)
attattgtgaaacaatagtaagttggtccaatcttgaaatgctctctatctcttgaataattttatggttttcctgaagaataatttcaaatgagatatatgccccaatatatgtgcttatatttgcatttctgtgtatgctcacatatgtttcatatgatatatttctttcattaaggagtattggaatgccaagtagacctatcattccattcttgtaggattgaattggtgaatttagaaatacacaaagaaagcaattgatgatccttgggcatgataaatgtatgggcagatgaattgtttgatctcaagtttcttctcatattcacgtttcactttacatttaaaataattcttaatgaagttttgaaaattttgacatgaaatggattaaaagtaaattttacaaccatgccaatatatgcctaggtgcatctgatgaccaggctagttctcaagggggagcccactatcctaaaatgcttaaatgctgcacaccttcagtaccttttgttttcttcttctcttcaggttgtcacttaattttgctagtcagttagaatagtgacttagcggtaacacacaaacaattgctatgttttccagaaaacaaatatctatatgatgtagggaacttctccccttcaatgattggcatttcagacacttaagggcattaaacctcagtcacttttctggacacctggaaaagagtccatcattgttgtttaccttacaaatttgttgaagaaaaagcttgttaacattctgcttgtttttttttttcatgattcacactactctccttttggttcttttatactagcatgaactcaaatgcagatatagatagatacacatgttcacacctagacaccatgcctaggttttggacagttccttggatggcatcctatttccttaatatgcaactcccatgttccaaacatgcatggatttagcttgctacctcatgggctgtctcctgtgggcttgcacatggctcaataagcgaaggaaataaacaagtagtaagattcaaactcatgacttcttgaaaaccaaaactctaataccatgttaagttacaaatttgactgaaaaagttaaactattaggtaattgatcaataatgaatattaagctaatttgggctaaagctaatgtctagtctcacgggtagccttctttggcttgcctgtggacttaataaatgggggaaacaaatatgcagtaaggctcaaactcataatctataggcaatgaaggttttaataggtaccatgttaggttgccattttgacccaaaagcttaaactactagataatagatgaacaatgaatatgaaactaatttgggataaagctgtaatggtatcaagctattttataatgttggtgattgacatcatgattattgcactagtagggttttcttttggtaaatcctagattatgaatggaacaaaccaaaaaagttctaatgttacaatgaatgaaacaaaattgctaattttaaactacatagcctaatgtaccaacaatttccccctttgacaaatttgtatcaaattatgaaccccctagtactctcaaatggagtttacaaatctctcaacaactctcgtctaaaccaattcattctataactagcagatgaatataaattgcaaccaaagatgaattataccccaatacttgtaactttaacacaccaaccagtaactaactaacaatatacctagattaagcagtatgtgggaaacaatataactcatcaattctatcaaatctagataagggtaaaaagcaaatcgatgcgagtcatgcatgcaatagatatctaacaattgattaatcaattaagaacaaactatctccccctttttgtcacaaaattgacaaagtgcataataaagtaagaaccacatggaagatagagacaagaaagaaactgatatccatatataatcaaacggttttggatataagagataaaaatataaaatacatccaaactaacaaaatacatgaggaattgaaccaatacgactttagtgcaaaaataaattgatctacaaaaacaaatagcaactaaaagtttgaatcaaatggaggtgggggtgtagagttggaagcaccctaaaacttcagccatgaggtgagggacacgagttgccctttgagactgaaagcgagcatccacatgctttgtgagcttgtgatggcgggtgtccacatgagtgctcaatgcatcaatccacaagtggagttggtccatagagtccatcatgcgttgaagtctaggatcattagatgtaagggccaagcgacaaaaggatgattgtgaagagctcacccttctaggtttgggtttgaggagctcgttactttgctccacaggtggatcttgctccattgcatggatctcctcttgttgcacgacccttggagcaatcgggcacgtggctcatgtgcatggaccacgaactctcgttgatgagagcatacaggccaggcacactaagagcctgatcaatttcaaaaccagtgtcggcaaggatgtgggagatgattagggtgaaaagaaggctaataggacgagacaagtcataatatgcgaccatgatgttgaggatgatctgagcgatatcgaactattgcccaaaaagaatggcatgaatgaaatgggcatcgaccaatgaatttgtgtttagtgggtggagggaaagaaggtattggagaaataagtggcgaggactcatgctaacttggtgaaggcaacaagagagatataaactggtagaggacgaggctcgttgaagagtgtaacaggaatgataaagagcttggagcgggtgagggcttgaatctctgtagggtaggcatactaagggcttggcagatagaatgaagggtgaccaaaatggtctaatcgtacatagagattacaaaaatgagctcaaccataacataatgaatttcacatagaacattcgaatatggtgggggtatgcaaccttgcaaagagacatgagaggctcccaacctctctcatggaaaattgtacgaagctcagtgtcgtgaaaggtgcttaaggcgatacctcacttgatctcgaccttgcggactgagaattgagcgtagtactagtcctaagtcacctaaaaaaacaaacactcaatcgggagatcatcaaggtcaaaaggaccctacatgggaatgcccatgacaagctcagggaatggaagttctaaaggtgcctctctaggacgacgatgacctggcacgctaggtttagaatgaaaaaaaacgaaaaaacatgaaaaatgagaagctacctaaaaaatctaaatcacttgaaaagctcaaaaagtatttgggaacactcctatggagtcagaatgagtgaaaactaacttgaaatgccactagaagtccaaaagacatgaagtgggagtgcgaaagacaactagggactgaggaaatgaacaaaatagggtgcttgaaggctattatagcctttggcatgcatgaagcggttgaaaccagattagtgctcaagtgtttcaagtagtgaaagggcgttggaaacaactttgagccctcgaagggggctagaagctcctaagagcacttgagcgcttgtcatcaagtgctaatctcaaggacaatgctcctttgagaggtcgaaatgttctttttaatgtaaataccgagaaaacatcttatacccaaaagaccccaaaaagatatgagagaccaacaattacaacttagggtttaaaaaatccataaaaacttgagaaattagcaagaatgaaaataaatcaagtatggagccatatgattaacttccataaatgcaagaatgaatcaacatcatccagagaaaaaaattaattactaaatcgacctaaaaaatatttcaatactaaacaacatatagtaggactaaaataaaccaatgacattgatcatcaagggtatcgacttactgtctaattgacatatttcaattttaaattcttaaagatcactaaaccatgtcattgtctaatttattcaacattcatttaatttgaatgtagtttgctagctttttgtttaacacgataagcattggtttacttacaacacaactttttcccccctcaatttgatatcatcatttttcttttgttttttattttttaaattttgaatagtggaggttgacaagaaaaagaagagaatgatgatttctcattaaacaaaataattggtacacaacaatgtataaattattctagaaaagaaaaaaaaaggaaaaaactaatttaaaaaagtcaaacctataaatcatatgattgaagggataattttcctaactaaacatatacactgatttgtttcctaacaattaggctatgacaactatacaattcaacataggcattatacatcatatatggaaaacatactttcaatcatggttgccttattccacttgagggtgtttcaaaattttacaagtgatgacatttttttcttagaaataatattgaatttgttttaggcaagatgccaaaaatcaattcaggaaacaattttagaattaagtcaaatgtgatatgtgaatttaatttgaacaggcatgaaattcattacttttggtaccttaaaatctactttatcaactaaacttaagaagattccctattaatcacttactcaggaaaattttaagattgctatgttatttactttgttttaatggcctgaaaagtggttaacgagattctggggaaagttgttaaatcttgtagatctagtacatcaaacacatagcataaacttaagatacttaagtagatgctaattaaacaagttaaggaattttaagataccctaagatttattatggatgagctaaggactctaaaaaatgtactactctaaacagtgatccttaggcccacaccacaagatcttagtcattgagatagatgcccaaagatttcctaaggaactcgaacctaagagaatctaagggctttgtgaagatgtcaactaaacgatattcaatgggcacaaactttaagaaaactaccttgttttttacaagatccccaataaaataatgttgacattcaatgtgtttagttcatgaataaacaacaggattcttagagatatttatagcacttgagttgttacacatgatgttcatggtgtcttggtcaatgccatagtcattgagcatttgcttcattcaaagatgtttagtacaaccattgatgaaaatatcggtaattacggatatattagtactttgattttacggatatattgacggatattttgggaaaaaattttggtaggtcaaaaattgatcaaaactcatgaaaatgtaagaaaaatctcatagcaatgtaataaatctacctaatttgcattgtaatagttttttaaaacaatttgaagagaaaaattctcaaatttcaattaattaatcaattagatcaaaataccttgggaaattaagcttcatttttctaaatcactatagatctcacctctaggtcctcattcctttgagaaaaatgggatttagccactcatgttcgaagatttaatctcacaagacatgtttggttagtgagaaaatgaatacttgtaaatactctcaaatctctcactttaggagtttcaacttcatttatctttcaaaatttctatattccaacaattaagaccactatttttcattctgcatttaggttatcatcattattatcctcttcaagtcgattaatctcttttgtcactcaattcatcaaaaatcacaacttgaaatgactttaaaccttataaaaattgtttgtaacttttgcaaaggaaacaacatattaattgtgtattttagggataattattacttaagatgtgaaatgcatgaaaattgttatctataatatgctctttttgaatagtaatcattccctccaaccaacacattgctagtcccttagtaatggtatgacaaaaagaaagaatactataaaagaactaaaaacaactaaacaactcatttgaaaaattccatatcacaattgattaataggaaaacacaccctacaatccatagatatcatcaaaatgccaacttgtttactatctctaataaaaagaatatcatgcaaatcaaagtatcaaagacacatcaattttcattccctaaaataatctttctaaacaagtcttgagtgtaattaagctagcccccaaatatagtattcaaaactaatcctccccctaacctagctcaattcatctcaagcaacaaaaaccactatctcataggtcaagaatgcatccatctttatttatttatttttattttttcaaaggactcattgtaggagtgcaatgctaaaggccaagaatacagtccatgtaacggggatccattggtgattcctaaccataaggcatacgatactaagtttataggattatttcatcagccactaactcttcagactttaccctaggctcctcagaatgagatccaataccttagcacctacaattgagctcatactccactcatccaaccatataataagcattgaggttggtggctcccaaccaaaatggcttagggcatcgggcttcaaagacctttgggtcatataccccttggtccttgcttgggtttcaaagtaagtagaactcaaccttttttattcatcaattttttttttccaaattgggcacattgtcctttttccaaggtgtctcaactcaattcaaaagtaatccatgtcactaagacaattaagtttaagtcttaaggttagacttgtttttcatctcatatccgggatttagagtgcatagtgtgtgtcaagactcaaatagaaatgatcctcggagaaatgagaacttcaaaatcaaatcaatttcaatttacacaacaaatcttttaagatcaagcaaataagctagtattctaaatcaacttctttcaaactatgtatgctcattcattaatcacaagtgctatgtttttctcaaaaaaaaaataacaactaagtctaaaaaaaaaaaaaaaaactagctgatgcaaactattataaacacaacaaaggaaaaaatatagcaatagtaatgctaaatcactaaatccctttctctttctttcctacctttcttcaaaccaaactaaacatcgtcctcaatgttgaccgagaaaatgtaaacaaaggaagggcaaggtacttgcaattcactgctttttagctcccatggctaaaacaaaacaatatcaaaacacaagtgtggaggaaaagaagaaagcaaaaaagtgaatactatcattatagcaaacacaaaaaatcaaggaatgtatatgtagtatcaaagtgactgcaaaagagagtggtatgagggaatgtcctcaaacatgagaggtaggagaggagatgatctctaaagttgctgcagtgggtgtaagaaatatagtatccatccctgaagaggtgacctttggagtagcttggagtggtgcaaaaacagtatcatgtagctctaggtcagcagaattggtgaccatttgaactctagcatcaagtgtctccaataaatgctcactctttgcagttgtagtgaaagtagataaacctaaagcaaacaatggagtaactggtactccactactctttagcctaagtgtatgatcaatagaggtagtggccatgatagcagaggtataaattggaggagagggaactggtttggtgtgggagcctgaaaaacttatccgaggagtggtggaaaacatgtcgaaatgaacaacaacttgtcccttttaaggctcagtgtggactaaggattgctattgctatatgaccattgtaaggtcatcaattgactggatgagctgctgttgggtatgttggatagtagcttaagtctcttgtatcatatccaacctagctaacaattgcttgaatgcatcaatggagaattatatataaccaacaaaaggtggaggaaacatgacaggtgtagatgaaggacccggtgaaacaaggaaagctatagtggagtttggagaattgaaaacaatatatgctgcagaaacaactgttggtatcggtgacatatcctctctatcacttagaacacctagaaatagattagggaggtacccaactccctagggaagaataaaggatatttcttggcccttgtagttttttcatatatactttatcttcaaaataaaacaaagcaaccataaacaaatcaacaggtgtccactacgactcagtcacaattcagaacaaagttacaaggacgtcttcccttctttgcattgattgttgacatgggtacacattagaacgaagcacatgatccaaaaaccaaaatttggattccatttcctttcttaacgctgcatgtggattgctagatcgaccttgggaaactattttaaccatttcagctgcatcgactttggtagaagattgaaaatcaacagggtttggaggtgcaattagtccaatgctttggctgccagtttgacatttagcatcccttgttttccatcgatctcaaaatgaatcacttaaaggagaattagtatctctgctagtcatagtctgatagaattcccggattacacgtgggtataagaatggtctgggcaccatgaatgactccaaaaaatatcaataacagatcgttggaaaattgagttaaaaggaaactcagcaaatgctttaaaatcagagtaatattcctcgtgaaattgtccaaccaagcaatcatcccgtggaccaggggcaatttccattctcaaggcttttgtaaaatggaattgagctatccattctagttgaggagtagatttggtaacttgtttcaaaactgaggctgcagaactaggagatggagatatagggttttgaatcaaatgagtagcagaagatgctggagcagtaggaaggatttgttgtatgttggtcacttgctttcttttcactggtagcttatcagagaattgtatctttgctttgcctttgttctacaaagctcttgtgacatatctttgggttggagtttcagaaatggagattcctgtaggagaagtaatgctaacatcattgatttccacacattcttcttcaggttcaatagttttttgtttttgattccccatccgtaacgcaaaaagaaacaaaataaaaaacttgaaatgagacaatagactaatgcacaaccaatttggctaagaatttcaactatcccgataatttcgaaagttaaaaaaataaatccttaagatcgtcaatgaagtagtgactaaatttgattcaaaattattatttcttaactctaatctcaaccctaatttacttcgcaattggaaataaagagaaggatgaaaccaaatacctcaagtgtccaaaatgtagggtgtgcccaagaaaattctaaggaattcaaaagcgaatataaaaagtttaccaagtggtgtagccacttccttagactagggtatggagggaagaagaaaaggtttggatgttcttgtgcctcttcagtgtcttcgtcttctggagtggcatgaatatttgttttgacatggtaatgcgaaatgaactagagacctagattttttacaagctatataaaaaaatggcactgtcatgcgaaattttgcatgagcgtgtgaaatggttcagagagccattttttcattgcaacccttagcataatgttcacatagttatgcgaaaattcgcatgagcatgcgaactggtttagagacttaaaatttgtatattttcaatgaaatgaaaactcccctatttttgcttgaatgtgtgaaatgactataagacgttaaaatttcctttttccttgctttatatattccatccttttgacaagtcctttaaaacacaaatgaaaaagttttaaagggattcataaactagagactaaaaaaaattcaaacaaaaaaaatgaatgattcaaaggaaaaaattgaaaaatcacttggctggttagtctgtgagaagactaagcccatcaaaccttgaattttcaattcataggaggttcaaggaggtataattcctttctcttgtaccataggttccatatacggtttgagccaatgtctattaaccctaaaggcacatccactatttgaattagaaatttcaatagccccatttgaatgcaccctttgaaccaaatatggaccatttgattgggatttgagctttcttgaaaagatatgcaattttgaatcatataagagcaccttttgttctttttgaaacttcttcctaaggacaatttgatcatgccatcttttgagtttgtccttagaaaattttgaacttatgtaagttttgtttctcatttcctctacctcattcaagtctaggaacctcttcaacctagctctttgcatatcacagttcaattgctttataacccaccatgctttatactccatttctagtggtaaatgacacgtcttaccaaaaactaacttagcaatgacattccaagaattgttttgaagatggtacagtaagcctaaagtgtatcgaggagtctcaatgcccaaatcatgatgttctcgatttgtattcaccattttcaccatttagcgaaaatgttctcgatttgtattcaccattttcatcaagatgttctcgatttcatggttccacttgcctagtagtttgtggatgataaggtgtggctactttgtgcttcaccccatatttagaaagaaggttattaaattgtttgttgcaaaagtgagtaatccatcactaataatgacttttggtattccaaaccttgtgaagacattcttcttaaggtgatgcaacttaagacattttcaaaccttgtgaagacatcatatcccaattatccgtggttgaactttcttagccacgacaaatgctataataaattgtcggaatgaggtgatgcaacttacctttggaaatatgactcttgagttgaatgttttccatttatgtaagagacatccaaaccaagatgaggatgagcaggaagaagtcacatctttttgcccaaaaggatgaggatgtctcttaagttgcatcaccttaaggagaatgtcttcatgaggtttggagtaccaaaagtcattattagtgatggaggtactcatttttgcaacaagctatttaataaccttcctgctaaatatggggtgaaatataaagtagccacaccttatcatccacaaacaagtgggcaagtagaactagctaaccgtgaaatcgagaacatcttgatgaaagtggtgaatacaaattacaaggattgtgcattgagactccccaatacactttggccttattgtactgccttcaaaacaattcttggaatgtcattatataggttggtttttggtaagacatgtcatttaccattggaaatggagtataaagcatggtgggttataaagcaattgaactttgatatgcaaagagtgttgggttgaagaggttccaagacttgaatgaggtagaggagatgagaaacgaaacttacatgagtttaaaattttctaaggacaaactcaaaagatgacatggtcaatagcttttgctaaaaaccatttttgattagacaaaagttgccttagcatggattagattataaattttattttgatacgataaacgaaaaaagtccatcaatcaccaagttagtatgggtcctcaccacttatttctcctatactttttttacctcctcgcactagacctagattcattagtcggttgctcgtttcattcatgccattcttttttgggcaacagttgaggtcgcttgggtcatccatgacatcatggccacatatcatgagtaatctcatcttggcagccttcctttcgccttgatcatctcccatatactcgtcaacattgattttgagattgattagactcttaatgtgtctggcttgcatgctctcatcgaccaaagttcatggtccaagcatgtgagccatgtatccaactcgattggtttggaggccatgcaggaagaggaggagtgatgagttccccaagcccgcacctagagggcttaatagattttagcacattgatgcattgagtactcatgtggacacttgctatcgcgagctcacgaagcatgtggatgctcacttttagagtctcgaggagcagctcgcgtccgtcaccttatggttgatgccttagggttcttccagctctacacccccacctccatctaatccgaacttttagttactatttgtttttgtagatcagttcctttttgcactaaagtccttttgactcaatttctcatgtattttgttagtttggatgtattttatttctttatctcttatatccagaaccatttgatcatatatggatgttaatttccttcttttgtctctatctttcatctggttcttgctttatcatttgtgcgacaagaaaggggtagatgatttgttctttattgaatgattggttgttagatatccattcatgcatgacttgcatctatttactttttactcttatcctgattggatagaattcatgaattattgatgagttatattttttcacatgcactactttacctggatatgttgttggttgatgtgtatagattacaagtattagggtatttattcatctttggatacggtttatggttgtctactagttatagaataaattggtttaaaccagagttattgtgagatttgtaaactccatttgagagtattggaggatttatgtaatttgtattttgtcacaaaatttccaatgggggattattggtacattaggctttgtagtttaggattgacaattttgtttcattcatacttacattattctagattgtgtctttctgtccattgaagactcgaggttgctgcttgttcaaccaggatgacacaggtaagtatagaaaggtctgagaaaggcaaattggtgtttggtaaagcatggtgtggattgaggtttttaaaaccaagcgaaatgttgtttaaatgtgttttaaaaactccatcgagcgctaaagtgcaagacatagtgttgaagcgctcaaagagcacttgagtgtttacaatagaattctcaagaattttggagatctgtcttttctatttttaaaaggattatttttaggaattttcgagatttgatccactaggttcctaggtctatatatacatttttgcccaaaaagatttttggtttgctgtttttgagttgaaaaacctaatttgctctttcgttcccaaaactctcaaagaagtatttgtgttcgcttctgccgagtttgaaggagatttgcatcctctcaggtgctgaggtgagatccactggtagcacttgaggtgctacatcgcaaatgtgaagtgtagtgtaggtgctagggagtaagtcttaggaataacttttgctaggtaaaactatgtaccatactttcatgtaatggattgtcgatttaaggcctctgaccttgtggtttttacatctgcacattgtgtgggtggttttctacgtaaaaaatccttgtgttcttgtgttggttgattttaggcttctgtaaattaataaaggaattttcaggattaaaaataaacaactttttggttaaaaagagttcaaacatctattaatccccctataggtgatatccttctagatccaataactttcagatttggttagttgagattgaaatttaggtttaaagtggatgctaaaattactttcttatttgtttttactttttgctaagagaacttctatcaagtgtgtttttattttaatagagaatattcttaattttcattaatactagaaattgtttaggatgtccaattacttatacatttgaaaataccaatggaaattgtgtatatgcatgtgcaaatgctatgtgcattgcatattgtctaggctagtagcagagtcactgctttaaagtttggcagaatctgggcattttttgaagctattcaaaattttggtcagtttcaactcattacaccacaaaggtttaatattctgacaagtccacaaaaggaacaaaattcagaaatataaatgtgaaagatttgttcaagcccatgttattaaatgcaaataattactgaaactcagttatcacaaacatgtcttgatcaatgacctgtctcatatcctcatgtcaattgacacttctttatgtttgatcagtaacccatgcatatcctcatgccaactgacacttctttcaatatcataatttagtttaaacgatattctccctctagtttggatgttcaagcaatatcctcctcatcattgtctcaaagcttttggctgtcttaaatttactatcaaacatatcttttggacctttttttctttttcctcatttaataattacaggttaaacatgatttgaagagcttcactgctacaatgctgaccttgtatgcccatatattaattgaagttttgggattaaataatgaaagaaaatatattcatgccaatcaaacttcttgttgaattccctatattgttctcatcaagttacatagatgaatctaactcttttcttaatgtatttgttaggaattcagttgatattttagttgacattcattacataatttactttttctgttgtctgatttataacaggagctcttgttattagg

SEQ ID NO: 12688 - DNA, 7596 bp, Vitis vinifera
  Intron number 7 from transcript GSVIVT01026008001 (locus G SVIVG01026008001) derived from phytozome v7.0 (chr-ID chr1 8; pos 25926876 to 25934471)
cagtactttcattgtacaaagacataacaatcaaggcatgctctctctctcagacacacatgagcacacactgtatacgttatgaattttgactgagtgctaagtgcatatgcaatgcttgtaagtttaaaagaaatctttttaaaattgtaaaaaatggctgcaattaatgatgccattatgcagactattatttttcatttttgttgtctttgatttgtcctcttaactgccatcctcaatgtttgcatatatgtgtgttttcaatgactaaggccttatttgaaaactattcttgaaaatagttttctaacctaaaaaacacatttagcaaacttatgatagaaaaaagttttttgaaaatttggtttgaatctcaaattgttttttttttttttttttttaatattaatgtacaatgtattgagaaacaattgaaaatatggagaatactttgggaacttttacattggaagtgtagagtaccgttatgtagaataagcttagaaaactgtttttcatatttaagttcctcaatagaattttgttcttaaaaacaattcaagtgaattgttttcaataattattttaaaaaactgttttttgcaaaatgttcccgaactggccctaagtttttaactttgcttttgggagaaatcctagatcattgatgtagcattgagtgcaggatttggagaacaatttcgaataaggaaggaaggcttcgaattctagattttgtagtatttgatgagaattagtaaaaaactaataataagaaacatagttctaaaaggcgcgcctaggcttggggcggcgcgacgccaccctccggcgcctcgcctgaagagaggcgacgccccttcacaaaggtgccgcttaggcgcgcaaggcgctcgcctccagcaaggcgcgaggcggtcgcccgagtcgcctccgacggcccgaccaggtacgatctccttcgccctagcttttttttttttaatttctgggcccaaaacgacgtcgttttggagcctgttcatttaagtgaacagggaccaaaacgacgtcgttttggaccctgttcttttaaaaaaaaaaaacaggccaaaacgacgccgttttgacctgttccttccatccagcccccttttctggtctttctcaacccgagaccactgccattttttgccctagcctcttccgtgctggagaagtgaagaagaagaagaaaaagaagaagaaaaatagggggaaaataggagaaaaataaaggggaaatagtcacgtaccttctggacctcggtatttttcttttttcttcacttttctgcatttttttccattcttacctcataactctcattggtaattttttttttaaaaaataaatattatattttgagtttttgacatgaaaattttacaaaataaaaataaataaataaataaaaagcactcatgcatatttgttgttaatgtgatatttgataatgtgatatgcatttttttttcaattttttttcttaatttaattataattattttattgtggagtatagataatttgtttgcaagatggataatgagagtgaaactcaagtggactctagtgcaagtggaagaagagatccggggtggaaatatggtcgtttggttaatgaaaaagatttgaacaccatcatatgcattttttgtgagaaagtaaccaaaggaggcatctatagacacaaacaacatcttgttggtggatatagaaatgctaaaaagtgtagaaaatgtccggaacatgttagagaagaaatggaagagtatatgagttccaagaaaaatcaaaaagagcaaatgaatatggggagcgaatatgttaatgaagatttgtttggtttggaagatgaagatattggtgaggagattaatagtagaacgaatgtcaccaacatttctagtggaggtagtaaccgaggaggaagtggtggtaggacgttttcttcaaaaaaaccaagacaaaaaggtcctatggatcattttttcactcctaatgcagagatggttgttcaaaatcaaaggagtggaaagatgaatcaaactaccatcaatgatgcctacaaaaaggaagcaagagaaagagcttgcacgcttatcacaagatggatgtatgaggctgctattccatttaatgcagtcacatatccaagtttccaaccaatgattgaggctattggccaatatggtgtgggtatgaagggaccaacttttcatgaggtaagagttaccaaccttaagaaagaattgactctcacaaaagatttgatgaaagatcatatggtggaatgggggaaaaatggatgatgttcaattatgtcggatggatggaccgataggaaagagagaactttggtgaactttttggttaattgttcaaagggaaccatgttcatgcaatccattgatgcttcttcaatgattaagacgggagaaaagatgtttgagttacttgacaaatgggtagagcaagttggtgaagagaatgttattcaagttataacagataatcactcaagttatgtgatggcaggtaataaatactatttcttgaatttttatttacttttaaaatttgaattatttatcttgagaacttatgtaaatttattatctacaatttcatatagggaggttgttagaattaaagcgtccacatttgtattggacaccatgtgctgcacattgccttgacttgatgttggaagatattggaaagctaccaaacatcaagaggacattggagagggctatatcactaaatgggtatatttataatcgctcagggctactcaacatgatgaggcggtttactggacaaagggaattgcttaggcctgctaagactcggtttgcaactgttttcatcacattatcgcgattgcatgaacaaaaaaacaatttgaggaagatgtttacaagctcagattggttagatagtaaatgggcaaaagagtagaaggggaaaactatagccaacatagttctaatgccttcattttggaacactattgtgttttgcttaaaggtttcgggtcccctagttcgtgtgcttcgtttggttgatggtgaaaaaaaagctcctatgggatacatctatgaggccatgaatagagctaaggatgcaattgtgagaagttttaatggaaatgaagagaagtacaaagaaatcttcaacatcattgataagaggtgggagattcagcttcatcggcctttgcatgcagcagggtactttttgaacccggaattcttctatgataagccagaaatagagcatgatgccgacattatgagtgatttgtataaatgcatcttaaggctaacaagagaccctgctaagcaagaaaaagttgtggccaaagtgagtttgttcacaaatgcccaaggactattcgggaatgagttagctgttaggacaagaaagactagagcaccaggttagttatttagttttgtttatttaaatgattagattgtatttttgctaaaataggtgaattgtttcactaaataggtgattttgtatttgatgatgacaatttgacatggggtgatgttgctagagctgttggagctgaggaggccaggtttgatactagagctagagctagagcaagctcaagcataataccaccaacaagggggatagcttcaagttctagaactttgccttcttattcactaatagatgaagatgaagatggagacatggttgattcagcagatgaagaagatggggaaggctacaaatgtggtgatggaaatgatgatgatgatgattttgttgatttagaggaggagtgatgattgcttgttgtggacaaatttgtgatttaagtgttttttaatgatgtttttgaattgtggacaaatttcatgttttggacctttaggtttggaaactttggatttggatatgtattaggcaattagcaatatggatttggatttgtttttatgcttggagttctttatttttatgttttttgtttattaaatcgaagttttggatgatatttgatgatttatgtgtttaggacaaataaatgattgttaaatttgattatattatataaaaatatatatgtaaattagggtgcacctcactttactaaagcccgcgccttagatgcgccttgcgcctcaggctctaggactactttgcgccttggtgcgccttgagccttttaaaactatgataagaaaagcataagtaatcttcatctagcttttataaaagtactcttccttccatcattgtattgcagcttgttatgaattgtgatacacttaagagatgatacgaattgcaatacatatctattttaataagacagtgtatcatatatcatgtacaatatgatatgagctataatgatgcaatgatacatacacttcgaactatttttcattaagaaaaatcaaattcaaacatattttttcttaaaagaattattatattaattatttaaaatgtatgataaggttataaattgattataaaagggagagagaggtaaaataattctatatgaaaaggtacattcttgttgtcaaaggtcatgttggaagttaagtaaatctatttttacaatgaatatagaacttttcttgtaattgtagtttggaatccttggttgtcagcgaaagtaggattttgttgcttgggaagcaatttgagggagaatttgatgttggatgagttaaaagaaaagggatggattttgatgaataaatgtaatcttcataaaattggggaggaatcaactgaccatttccttcaatatgctaaaatgaggattttgtggcacattttattctcactgtttgaagtcaagtgggtgttgccttctatggttggagaaactttatcaagtcagtagggtacctttgtggggaacaagtgtgagaaagtatgaagggttgccccttcatacttattttggaccatttggggagggaggaactatagaacatttgtcaatgtggaacagatgagtcaagctctcaaaatctctttcataggctgtctatatctttggctttgagtaaggaagttttcagatgtaggatctattatatctattttagattttgttgattggttgagcactttttgataggagggaggtgccttttgttactcttctacttatttttgttttggaacatttgtatactccttatttgtccataaaaaaagggattagtttaataagggctaagatatggtttgtatgtagaagatatatgggcattgcaaggaaatttttatgatcaatgaaaattttctaccgaagccgcatgccatcccatgtcaaccaaaattttgacaatgctaagtgataatgatgtgggacactttatctcttcttgagaattgaatgattaaatatctagatgctcatgtattttttggcaaaaatgtcttatgagccactgtttggatattgatgatcaaaccatctttaatgatttagaggtccattagcctttagcgaatagatgctacctttgccaaatgcatgaagaatctatagaccacattttgctccattgtgccaagataaggactctttgggcgatgtttttatctctttttggggtgcagtgggtgttgccagccactgtcaaggtgacgcttctgggctgggacgggtcttttgtgggaaaaaagataaaggaagtttggagagtaggccctttgtgtattttttggacggtttggaagacaaggaacaaaatagcgtttgaggaagaagttctgtcaatccaaagacttgagagttcttttgtttatttcctttggtcagagacgaaattgttcataaaagatggtccttcaactttagttgattttattgattgggtgggaactcgttgagggtggggttccttttgcacctccgttcttggtagctgatttgttccagctggggagcggggggtgttttcttcttctttgtatactttcagccactgtcttggcgggttttttaatacagtttttctctcttatcaaaaaaaaaaaaaaaaaagatttagaggtccactaatgtttgatgaatatctgaatagtggtttcagccagaatttgttttccttttatgcatggtggcttcttggataataaaggtagtccattaattggtaaacattcaaatcatggaatatttcttttttattccaatggggaggaggtggaacttgatcatatctgggaaggcgtggtacgtgaatcaatttgaagatggataagcggataaaaataggattgaacttgacaaagcttttagcagatatatgtttctaaaacattttttgtatgtatctaattaactaggaccaagtaatgagtatgagttccttatgggtgagttaaggctaatatgtgatctcttgattatttgaagagctagatccaaacttgaacatgagattttaccaaactggtaaatctgatgcaagagcagttgttgttaaggttactgttttagcagtgatcataaaatactgtgccatttcttgtggcatgatactgtcgaatgctgtttatgctgctcatctaggtctaataaggttctttgtcctttgttgtcttttctgtgtgttatgaatgtacttgaacaagatttgtaagcaccaagatgatatgtatgtaggtgcaagggtttttcgttcttataaatagagttatgaaagcattagaaggtactttcgatgatcaaggaaatttgcctttgccttttaagttcttttaaaaactcttcttttgcttggaatagcaacctaaagttgattgtgtctttcaactgaaattgaattaggggttccagattttcctcttcctttgctcccaactgcattaaacattggcttgtccatatccattaactttcatttttaatccacctctcttccaaatggagaaagcttaaggaagcactagttgtgcaagaccaaaaaatgcactcacacttttttaaaaaagatgtacatcaagaatattcatgagttacactgacacacacacacacgcaaaggaacactcattattcaattctgttcttcaattgatggtttaaccttggattccattgggagcctcttataagttatcagcagtttaggatgtggtaggttccacaaaaggcttcccatgtggaagcttcaatacctatctaaggatgaaagacttatgttgattatttttttgatagacgccaatcaaatagcagggggcgcactcttaagtacacaggaggtatgcaaagagtgccaaaacaataagcaaaaccacctcaaaaaaaaaaaaaaaaaaggcactttttgtttatttatgaccacagctatttttttatactttaaacttattcattattaatcaacatcctatacatgttgctcatgccctgactgaacttggtttcatacaggcaattgcatccatgagtctaaagcttgttctgctagtttcttggcttgacataatcatactgattccaaatatatttttcttctatgacatctgagttgaggaccattatcttttgctgcaggtca

SEQ ID NO: 12689 - DNA, 24268 bp, Vitis vinifera
  Intron number 1 from transcript GSVIVT01033067001 (locus G SVIVG01033067001) derived from phytozome v7.0 (chr-ID chr1 4; pos 25510196 to 25534463)
agaggcaggctttacgaattctgtagtggcaataggtactcactcctatatatatatatatatatcactgacttgtgcttttctcttagaagatgacttttgttcaaattaacctctgttttacgccatctgtgtttgagatttcggtctcttgcttggagatgttttctcccagctttgctcttctcctacatggcgtttccttacaatgatcttcaaagatcacagtgattcgtcaatctttcgtcctgacaaaacgtgaaccgcttgctcatggatatgttaaagagtatacaactctaacctagtttaagcacaggtcccttgatgtcagttatgacctacaatggagatgatcctgtgctgccggtcctatgattagctaattgtatccacaagttttttatgagaagctggcttttagcttctcttatagctctctaggctcagatgtgtagattagacttttcagactctgtagtacatacttatctgttaaaactctttgggctcaaatatggtacgcatgaattgagtgtgcatttatgtcatcgtccttctcgatatattatgtaccttctcctttatctgcagtttgatttttctttctcttgaatgtagtattattgttttttattttagtttgctatttttttttttttttttttttgtggtaagttacttaggatgttagatacttagattgaattaaaattataatatgatatatttttaaatacaacaaatatcaagaactattgctctaaacacacacgaaatataaatgataatggtggtcctgattcttgtggcacgtgttctgtgatggtcaggaaaggataaaatattaaatttaaatttaatttttttttaaaatgtatatatttggtttataaaactaataataataataataataatggtggtggtcccaaatctatcttgtgacacatctcatgtcatgtcatggttagagtcttagagaaagatgaaaacttaaatttaaaagttaactaaattatttgtattcttgaaatcacaacaaaattcacctccttatccatgattctctttgatagattttaaaaaccaaaagagagagagaaaaaaaaaagtgataaaagggggaaaaaaaaaaaaaaaggaaaaaaatgtagaaaagttcccaataagaaaattttcataaaaacgaaaaaaaaaaagaaaaaaaaaaggaaaaaaagtaagaaaaagtcaaaatcaagactagttgttcttgattaattcaatcaagagtagagatgacaatctttaaaacaaaatcaatgagatctaattaaaacaaaatcaatatagagtagagattgtaatcttaaaaacaaaatcaatgagatttgattaaaacaaaatcaatatagaggagtgtgctcaaattattttctttgttattttcttgtattttaatatcatcaaacatgtatttgtgtgtacaattttttggcatattggatgagactcttctacctctcatgtccttcgaccaaagttcctaatttcaccatacaccaagttaacggcttcaaagaaccaagttgcatacttgtagaaagggaatggtaaaattatcgctacctcatcatcacaaaatatttctattagtccaatgaccctattgcaaagcaaatgcatttactttgcctccaaactaacatacattggtgcatgctcatccgttaatacctatagaataacacagcaaatgtcaaccaatcatcactctagcttttctaagggcaagaaaacaaatttttctctagtttctctaggagcaaggaaacaaatttctcctaacataggaaaatgtccattatcgtcaaatgttttaaggggtaaatctccttggtatttctaatgcaaacttgagcataatgtcataaacttagatatttcctaagtttatgtacaacacttggacaacttaagatatttgaagttactaagtcaatattccccgaacttagctcactagactaagcaatgatacttgacttaaaaaagagacaaataaaggaagcaatatttgaagagtttagatcaatagaagtttttaattacttaaagacactttacaatgcttagaagttttcaagtttttggtgaataatgaaagtaacacttgaagaatttgaaagaattaaagctttgattattaaaataccctttacaatgcttagaaactctcaagtgtttggtggataaaggaaataacacttgaaaattttggaagagtagaagctttgattattcaaagacattttacattatttagaagctcttgtgccttagccaaatggagccattacctatgaattaataagtgtcaaggaactctctagaacacttgaaggtttctcacaaatctagaattctttaaaacctactacatggaagctatgtacaagagttattaaacattctctagaattctctacacaacttcattatctctcattcccttataaagatatgcagatgattctaagtctccctagaagctccatattcctttataagactaagtgagagaacatttgagtaaggtgtgacatttttcttacccaatgctacacacatcctcattgtttcttctactcagaatctctcaatttgctcctaagcctaaatgatttcttcgctttttagtagtttgttccacttaattgagtagtccattgcaggaggtatcccatgtctcttgatgactaggtttgcaatgatgtttttgctttcttatcctctgaggtttaccttgctttttggtagtctcttcgacttaactaagtattccattgctagaggtaccttatatctcttgttaacttggtttgtgatgatgtattatggttccctatagtatgaggttacaacgactataaacaccctatttgatatgccctttttaatatcttgtagcttagatcatccatgttttcatggtataacttcaagtaacctatatggaagacaaaatggatcttcaaccttggaggtagcttgactcgataaagacaccttgccaactttcctaggtatagggaagtggccttcatatctcctgacaagtcccttgtgcactagccttagggacttgatttgttgaggaaatagtttgataagcactaactctctaacttgatacttagtgtgttatgtcttcttatcaacccactttttcattctcttggcaaacttatccaagtctgagcgagctatatcaacttgctctatcaccccttagcaaatttgaaaactataaatctccttcccatgtagcctatcattagtatgtgaggcaccaaactcaaatgaattcttgttagtggcttcacttcttcgtaaaatataagagaattggcatacaatcattaacttagtccaatccctttggttggcactcacaaactgcctcaagtattgttctagcaaaatgctcactttttttctttgtctatctattggtgggtgaaaacttggagagaagtgaaactctaaacccatcatcttaaagagctttgtccacaactttgtagtgaaatataggtcacaatcattgataatgtgttttgtcaatccttaatatttgactacctgcttcaggaataaccttgttgtctccttagtggtatattctataggagctactatgaaagtggcatacattaagaacttgtctactaccaccataatagatctatatccctttgacttaggcaatctaatgatgaagtccatagtagcactttcccatgagcactttggatgtgtagtggctttaatagccctctaggaaaatgttgttacacctttttttgttggtacttaagacaagttctaacataggcctcaaccttatcctacatataaggccaataacataacgactctagggtgtccaacccaattggtaccatgatactccttagttaaattcgttctttagttaccccacgtaggcacctagagtaattttcttttcgcatttagtaggtcatcctccacccaaaattgtttagtctttcttttatagttttaggtgattattcttaaccatggattgaaaaatcggctactaattattggccgagagaaattttggcaaaaaatcaaagattctggcgattggttaatgaccgaattttcggtgaaaaatcgaaagtaaagaatatgcgcgtgtggaggtagagtgtcgacaaaaaatcgttgattttttcaataaatcggcggtttattaaaaaaaaatgccagtttttttaaaatctgtgtttttttttaaattatttttttctaatttattttttattttaattttatataaaccttttatttaatattatcctttgttttaattttttatttatatttatctcatttatcctatttttaaaaattactatcacttcactttttattttttttatatttattcttttaattttatttatttttaaatgtttttattttaaaatataaaaaatataaatttattaaaaaattgttaaaatataaaaaaagtggtgaagttctaatattttataaattaaaattaatttaataaactaaattattaatacaatttttaataattttagttatttaattaaatattataatattaatagaaaaaagttgtcaccacaaattcgtaagaaaattttagaaattaaatcttaaataaaatattttatataaattgatttaattttttatttaaaatataataaaacatgttttaataaaaatattttaatttttttaaaataaatgaatataaatatattaaaggaattcaagctaatttttctaaaaaattttgataaatattatcattgatcatatctatgttattaacttacaaaataattttaatatatgtattcttgcttattttatcatttttttttaatgttttttcaaatatttttgtgaattttgaacaatttatatcttattgatatatccgcgtttaccaatattttcatcattcctcttaaccaatgtgtcatgttgtaaacctttatttataagtttcatcattaactctccttaaggcttactactcattgatgctagctctgctttatggcttaaggcttcaaccacatgattagcaattcatggcttgtactccaatgtccaactatgcaaaaaattcttgccaccttgcttgtttaggtcttaatttcttctatgtttggtcaatcttcactatgaaatgtgaccctaacaagtagtgcctccaactgcacaatcaatgaactatagtcgtcatttccttcttttgcattatataacaccttttttgtgtcattaagcttgcgactcttaaaggctatgatatgtttgtcttacatctatgtgcacttcaaatactttgctatggttgagtagtgtcaacaacagttcctctatcacaacattcttcaaatcttcaaaggtttgttgacatttattatcctaatcccacacctcattttttttttactagattgatgaataaaggtatcctcgttaagtagcccttaatgaatcatggagagtaatttactaagccaaggaaaccttaattgaggtacttatgtaggcgagttccactcccggatggcttttatcttgttttcatctatcattagtttgtcatcctttattttatgtctaaagaagcacacctctttcttagcaaatgaacatttttgatttatttttatttattattattattattatttttttacataaagctcattctgccttaagactttaaaaaccttctttaagtgctttgcaagttcttctagggtgcggttgtaggcaacaatgttgtctaggtacactaccacaatcttatccaagtatggatggaagatctcgttcatcaatgtgtagagcgtagttagtgcatagattagcttgaagggcatcactaagaacttataagaattatattgagttatgcatgttgtcttcgactcattcccttaacaatccttacttggtagtagcctaatctcaaggctagttttgtgaaatcccttgttctattaagttcattaaaacaataagtaaaattggatatttgttctttacttagggatcctcatatttcttttggaagaatattgacacactataaggagatttagaccattggatgaagaaaactcctttaattgtctccttagctcctttagctcaagtgatgtcatcctataaggttgcatggcaaagggcctagctcctagctctaacttaatcttatgattcccctctttacttagtgggagtttcttggtagctttagtgtcatcacatcgttaaaatctttaaggactcccttaatctccttaagcatggattcccttatggtattttccgttttattcctaagtgtagctaagtaggtcacctgcttattctttaaccccgtttttacttgcatggttgacaataatgggtgttaggcatatctttggtgactatagggattacgcagggctttcttttctttttagatggccatgagtataaaaatgatagtggcctggacttttcttaggaagtctacctaaacgccatgttaaagtcatttgttagtgacgttgtgaagtcgatcttgcgttcttatatgccaatgcatacaaccactcgatgcgtttaatcttataatggctttacaataaagttgtctgcctttagtcatcctccttattagatgcttagagctatagtctctttgtctcatctaaagagataaaacttatgagtgatacatgtgtccaccatgatcttggtgggcttctcattcacatgggcctttacttacatcaaccatttgttatgaggtatcataggcatcaattttgccttgagggcatttaagagttgtatttaccttccttatgcatccctctctttcttcttctcactgatcatgacattaggggccttcctcttagggcaatctagcgctcaatgcaatccatcacatggaagcaattggccttgagcacaaactcattttgtttgtctttgcccttgccttctttatcgttagaagtcttgttttacccttatttgacaacagtgcaaccattcgaccctctttgttttcctttcctttagcatggttaccctttaagggctttgacttagaaaaaccactaaggactccaataatgttaaggttgtgctatggttaccatagtgcctaaactcgtgcttagtccaaatttgtaggttatctatgaagtccaataataaccctttctctgttatgttagggatctcaagcatgagtgtagaggattcattgacatactcatggattgagctcacgtgcttgagacactttatgtgttttgttgttagataagccacatctttggggtagaattatctattgatatttttctcaaattcatctcatatgtcgatgttgcaagtgtttttctctacatcggcaaacctctagcgtcatcatagagtaccaatatcagtgaggagagggtcatagtctacaccttagtcacctcatcaatcaataatattgcctcaaaatactatttcgtgttccatacgaagttatctaacctcttagcatctcggttgccattaaagacatatatggctttggtggctttggcatctacacccttagtgcttcatgagtggccattgttaagtatgaataatgttgctcctagggaaaattgactattgaaataaatgtcatcatgcaccttactttagttgttataaagaaatagtttatggatgttcttttgataaagtgttacttgttacttaggagaaaaaaaatgtgatttaagtaattgaaaaagctcattttgggatttgtggtgctcaccaatctggtcctaaactctactttggaacaaaatgatgggttattactaaccaaccattgttaaagatttcatgaattatgctaagaaaaatcaagcatgttagtgccatgcaaactttatacaccaaattcctatgccactccaccttataattgctttttggatacttgatgcatgggaccttgatgtagtcaggtccacacccctaaatcttttgtaggacattcacacatattagcaacaatagattgcttcacaaagtaggtaaacgcaataccattcaaagaagtaaaaaatgaaactatgtggaactttattagaaacaatatcatctatcgatatggactgtcatgatacatcaaaacgaatagtttgtagtgtttctctaatagcttgatgaacaatctttgtgagaagtttgacttgaaaaacataattcttcaatgtattaagctcttggcagaaacattcaataagaccctttataatctattaaagaagatcattagtaagtcaaataaggactagcataagagagttagtggaacacttttggcatattgaacaacatattattaaacacccacacaaggaatctcatactcttttgtgtttggagtataagtattgttaccttcggtgtgtcaaattttttcattaagaattgcaatacaaaaaggctaacaaatgaagagaatgtgtgattacatcttcaagagttagaagcattaaatgagagtgacttgaagctcaacaacatataaaatgctaccaagctcgattctcttaagcatttaacaaaaaagttcatccttgggcattccaaattgatgatttagttctcattatgtgtagatccatcattgctattcccactcaaatgtcaatatttagaattctcgaccgtttagagcttttaacaaaaagtccatcctcgatcattccaatttggtcatttagttcttagtatatgtagatccattcactattcacaagactggcaataaatttacatccaaatgggatggattatttgtgatccaagaattatacacaaatggtgcctaaaaattattgttgaagatggattaatagttaacctatcatttacaaattcataaagcattattatgtttgagctttatcatgttattggcttgtaagaacttaaactatgtatggcatatttgaaaagaaaaaatatgcaagactaaaaattaattttggcaaaagttttttttattaaaaaaaaaaagtgagctaaggtatgacttgattatttctttatgaacataaatctaagtatcaatatcagtcaacacaggagtacatgcaatggtgacttgcacttccttcaaacaagaaatctctttttgcttacaaataagttgctcatcactggcttgaatgaaatcttttcatttgtgaatttaactattctaattcatgtttgagtatttcttgtcttttctcaatagtagttaagtaaactctcaaaggttgatttcattttatttcttcacccttggtaatgtaaacatgaatgagttgggagttaacagtagctaagtagtgttgttggacgactaaagttatttttaaggaataaacatgtcttattgagtcataacaattgacataaatcataagtttttcaactcttttctacaatgatgaatggtctgctccaatctttgagatgatagtaaaaacctccttaaattttcctttcaataatggaaggtcttcatatattcttaaatattcctttttaatatcttctttaatattctattgttaaaatgatttgttttacattaaatgaattattgacatcgcattaagtaatttggcgtggtgagtcattggcaataatagaatgttgcgttgtaatcaaatctacaatagctacaagggttaacccattttgtgttattttttccaaatattgtaccttgatctctcatttaaataaaaatagtgtgaggagtaacaaaatccccgtccttttgtacgatggggttcaaggagattgtttctcaatcacaacattattgtcaacaagttgatcttagtgcatagtcctatcacatcttttgaaggtaagtcattactcttttgttgaaataaagaaatcattttgttaacactaatagaataaagattaaaaaaaaaaacaatctttaacttcaagttgcagtaattgagccaaaatcaccacatcttaaaaaaaaagatattcatgtcaaagtggataggagttggtctcatcacaatgcacaaaatgacacttggtctgacactcactaacatcttgtgagttttcatctagtgcattaagagaggataaacattatagagcataaacatccctttctctacgtgtgtggtagaattagcttaacgattaccacctaagcatgtaaaggaaatccttgaggtaacgtcgatgcaatcatcatggaaaacctcattgaaattttcttgagtactttttttcataggaatatctaactttggaatttgtgctatactttctaatctttaaggattgctattgaacaaggttaggatgttgttgaatagatatttcttgagcacttttttaaaaataaatcgttatgactatttcttaagcactttttcaaatcatgcaatttgaaccactaataagcataagctttgtaatcaagaatttctcatgactatgatagtaaagtatagtgaatatagagttagtttgtagtctagtgcatgacccccaatatttatacacttttaacaaagtaccgtgactagggattttcttgaacatcccaagtatatcatgagggaagccaaactgcttaccaaagtgatcagaactatatagttggatcatttgataataacctagtcttaagtttaaataactcaagtgaatatttattaaaaaggaagacatttgaccaaccaaagaaagactactcattcttgattttatggtactaaagggtttaatatcatatccttgcaatatattatcaaatcttgtgcttgaattatcaaaatatttagcaacaaatgccccaacacaactagtcattcatggaaaatggtcccatgtcagagaaaggaagttggtattgaagtaatgactctatcaaccgtacaaataatggatagggaagatacatgcactatactcaggatgtgaggagttcataatctcattcaatcttgttgaagagcaggatatacgttataagcctaaattctacaagtttaagcttttaggaaaattggttgttcaacatggtatttgaaccttgtttggtgggagttctagtgttcaaacctcaccaccatatgtttatctacctaatttattaagcccatgcataatcctaaaataaagactacaagtgagaggttattgaaaaacatgatatacattgtgggcttaaatcctataaatttaagcttttaaaaaaattggtaattcaactaaccttttataaatgttgaacacaaggactgcaaggcaaaatgaatgccctttagccatttgactagccaccttgaaaaccttaggacgaatcgaagtaataatctttataagaagaacaaacttgcaattaacatgcatggaaagcaactaaatatctctcatccatgtctttcttagctatgtcaatattatcaactacttcccagtcccaccaagtacaagtacatggtggagtaggtttaataatatttctagaaggattataagtgtcctttggtcattgtaccttgtttctagtacttttctttgatggtttctcatatatttttgtgtctttataccaaaagtcaagccatgaagtaatcttcactagcttgtcttttgtttgtgaaaaaattaataataaaccaaaaaaaaatgtcaacaacttgatggaagtgaagactctcttctatcgttagacaactcttcaacactaagaaccactttatcataaaacatctcatgaatgggtaataattttgtataagtcccaaagaaggataaaaatctcacctatggtgttggtagttggaaaccaatgctcacaaaaattattgatgacaaactcttgaatttataaaaaaatttacaatccttagttggtcttatgagaccttatatatgtgtgtgtttcaaattttttttttttaaagtttgtaaatttaatatatatatatatatatataggtttgcatctaagaaagcaaggtataaaagtctaaacaatagaaaattgaaaaaactttgcttttaacaaaacaaaaaaaaaatgtctttatatatagagagagagagaaatagaggaattgttattgaacacttctaaaagttggactgtgttatgattggtgatttaaaaaaaatcatttattagatgaaaaattaaatgggatttctttcaagaaattaaaattataatcctattttgataggatttggaatctatatgtatgaaagattactatgaaagattttctaccaaaaaccatgtcattcttttctcattcaagtaacgagtcttcataaccattatccccatgaagaagagcattaaaaaaccttaagctttaaaaaatgtgacattcatggtaacaattttttttattttattttatcaaaacagcgatacccttattgtgttggaaaatatccaagaaaaacacatttcatagctcgtgagttcaacttactatgatgatgattatgcacatgttcaaaggcaacacaaatgaaaattttaagaggtaaatcaaagattaaacatgacattggaaaacactctttaaacatttggtatcttaaaattcaaagttcttgagggcattctcttgatctaagaagtgatagtaagaataactttcccccacaagtatttatgtgttttagttgtaaacattaaagacctagctacttccaagagatgtttatttttcctttctaccgctccattttgttgtggagtgtcaatacaagatctttgatgtataatcctcttttctaagaaatatgtgcctaaaattttgttgaaatactcatttccattatcacttctaaacacttgtttttttttttttttcttgaaaccgagtttctatcatagtgtaaaaaaattttaaaattttttcaccattggatttttctttgagtaaataaaccaaataaacatgtgtattatcgtcaattagtgttatgaaccattttttttctagaaattgttatatggaccctaaacatcaccaaaaacaagagtgaagggtttaaaagacttgtaaggttgtatagggaatgatgcatgatgatgttttgtaatttgatagatatcacactgaaaacaaaatggatttttatttttgaataaattttgaaataaatacttcaaatactgaaagttaatatgacccaatctaaaatggcacaacattatttcatttcttctagattcagaaaatgattcaaggctagttatccaagttctatcaacttgtccacacaagttgtttccattttcaaagtagtagagtccatcactttctttagcattaccaataatacaacattttaagtcgtgagtgagcttgctagtaaatgacatattacaaaaaagatttggaacatgaaggacattataaagaataagagattttgcgatcagttgcaccaaaatctatgatccatagacaactagaagtagcaaatacattaaatctagcagtttaacaatagttacctttttggactaaagaacgggggaaagacacattatttgagaatcgtgtggattgaaaaagtttattattgaaagaaaacatctccacagctcctcccaagctattgtgctctttggctcctacttgaaacacctttggatcacaatttatttgactgaacaatttcaacttccaattttatggttttccatgtaagtcctaacacatttctctagtgtgttaaggcttatggcagtgatcacaccaaatcttgtcatttttttagttttgtcgtggttatccaagttgagcagattgattgtttcttgtcactagggcggaaacttcagtgtaggttgattattttctcccatcatcacctttcctcaaccctcttctctccttactttagcaaacatttcacgaagagatgatagtggttttttgccaagaattttacctttgacctcattcagatttttttttagtcctacaaagaacacacactgtcattctccatccttttcgtataccttatgttgtctttgcacagtcccatttttcatcctagcacaaggctagttcctatcatagtgctttcatcacattataatactttgttatctcgttatctcattgttttgaatgtcacgactttgtttttagttcaaaaatttgggatctattttttagctctaaatatgtctttaaaacatcttcctaaacttctttttgtagtaataggcctttctaattgttggctccatggaattgacaagccatgcaatcattaacaagttctcaaacctccaagtcttcagtgttggatcatcgtctattggttttattatcttgccagtcagatggcctaactttcccttgccatcaatcataagcttgattgattgcacccatttgattgcacccattttaggtaatttttactattcagcttgtgaacgattaatttaagagatggattttcaattccattaagggttacagtagaaactagaggtgcacctatactaacaacacctaaggatgttgttgtcctttctccagtcatggttgttctcactatcactatttcccaaatagtgacctacgctttgataccatacgcgtagaatagaagggaaaaatagtttgtgaaagaattaagttcgaaaaaattataaggaaaaaaaataaataggctaagtatggagcttaaccatgtaactaactaccaagaatctaggaactaaaaagcacaactttaggaccttactatcaaaatacctagatatttgagattggacagtaattagttcagatttattggaaacaaataacaaaaagtataacaacaaactcctaataatttgacacaatgtcttcaatttacacattttattcttatctaaactttccccaaaattgggaaaaacttccatatagatttcttcatcaatttcaatatggagaaaggcattctttacatcaacttgtagtaaatcccaatcaaaatgagttgccaaagacaataaaatcctcactatattcatcattgctaccaatgcaaaagttccttgatagtccacttcatatcaaggaatcctcactatattcatcattgcgaccaaccttactttatcttgttcaagggatctatcagtgtagaaaaaaattgaatttcttattcatatcttgaaagtatacaaccaatgaaatatatatacaataatggaaaagaaagaataaagaaaaaaagaaataataagaaagaattcctacaaatcaaggattagatacataaatatatacccaactatatatatatatatatatatacacacacaattgtacacacatgggaaaggttctttttcaaggattctcttccttacttcattaagctccaagtttaatcctaccaaaaattcaaaaatgcattctttttccaacaacctcttgaactaggaagcatctcctgcattctcccattcatctcataatactgatctaactcttgctagagacccttaagaatactatagtatttcgtgatacctcaagctctttgcttcgtttcatgaattcaagttttaatctcaaatacttgagttgaattgcctaaatatgagcatgtctcattaattgcatcctgcattgcttttgctattgataagaacagatatgtttgtccaatttctggatccattaagttaacatgtcagactatcaccattgagttttatcccatgtttgaaatgcaacctcatattccttttctggtggttgtgtagctccagtgagataatcaatttttcttttgcctcggataaacatttttatggattgagaccattgtaagtagttctgttagtttagtttatgagacgtaacccaaaggaaaggattgtcataggcaacaacttaaaatgcacgtggtggtcgctcaatgtctgacttggatgaggcttcatcacttctaccaaacatgattttgaacaaaatcatagttgtaaaacctgcatctaggctccaggcagcacgacaccatgctccaacacctcgcttgactccaagtgttgcttttgcatggaggtggtgattaggtgcacaaggtgcttgtgtccggctaggcacgaatttccaaacaggtgtttcttctcccgcatttttttccttcttcttctttgacgactgagttgttaaagaatcccgtttgggctaattaagaaaatattctgatgaaatatttctaataggtgcacaagaatacattatataggcaaattacaacagaatagataaggaaataatcgataggaaaaatatctttacagctatacatatatttacaactaggaaatatctttacaattgtacaaatattcataactagcacctaggatctcccgagatttccaacacttcccttcaagttggcttgaaaatgtcttccatggccagtctgctcactaacttatcaaattacttctttgatagtcccttagtgagtatatcaattacttgttcattagtaggaatgtagggcatgcaaatgagccattcctccaatttctccttaataaaatgcttttcaacttcaacatgctttgtcctatcatgtaggacaagattgtaagcaattgcaattactgccttattatcgcaaaacactttcataggaagactactagttaccttaagttcttcaagtagtgttttgattcaaaggatctcacatacaccatgagaaactactctgaattccgcttctgcactactcctagcaactacattatgctttttactctttcatgtaaccaagttttctctcacaaaagtgcaatacccagaagtagatctcctatccgttaaactctcggcccaatcaacatctatgtaaacttcaactcttaaataacccttgtctttaaataaaagaccctttgttggagttccttttaggtatctaaggatcctataaacaacatcgaagtgttcctatcctagtgagtgcttggactgactaaccatgttcactacaaatgctatatttggacatgtgtgggagaaataaattaatgtctaccaaatgttgaaattagtctctatcaacaacatccttgaccttgtctggttgcaattttaagttaagtcaataggaatcttggtagctttagaacccaataagcatgtcgtcttaagtaaatccaatacgtacttcctctgggaaacaaaaattccattctttgatttgcaaattccataccaacaaaatactttaaggttcttaagtctttgatctcaaaatcccgagcaagcaaccctttcaatctctcaatctccaagctatcatcattagttaatatagtatcgtccacataaatgattaagatagtaatcttaccttcacaagaatgtttaaagaacaccgtatgatctacttgactctgagtataacagtgacttttcaatgctttcctaaagcactcgaaccaagctttgggtgactacttgagtccatagaaggattttccaacttacaaacactttgtctaccttttttctcttcaaaccccaacggatggtccataaaaacctcttcttctagattctcgttcaaaaaagcatttttcacatttagttgatgcgaaggctagtttgacttgactataagagaaaatagaattggaatttagttgatatttgccattggtgtgaaagtttcttagtagtctatcccaaatgtctgagtgaagccctttgccgctaaacgtgccttatatctttccacactaccatcagctttgcatttgattgtaaacacccacttatggcccacagtcttctttccctctggcagttctacaatttcccatgttccatttcttttaagggcattaatttcttctaaaaatgttgtcatccaatctgaatgacttaagagcttcctgaacattccttgacataaacaaattaataattttaaaagtaaaggccctatggttttcatacaatttatggtaagataaaaaattagctatagtgtgtttggtacaagttctaattcctttcctaagagtgataggaacattgagatcggtgaattgaataggattataagaggaatctaatatgcttggaccttaaggaatttgtggggttgatgattgaccttccaggatagccggattctctccagtattttgatgaaattttcttattatataagcacgtattacagtaggattattattatttttgagtgtttctccccctatttgcaactcactatcctttgacatagttagactaggctctcctattttttctttatcaaaaaatttagtctcaacaataaaaagagtatcattaagagaaatctttggcgttggagaataaatatgccaaaactgatcttcattttctatctctccctaaagaaaagttttgttaaaaaaatgggtattttcaacaaaatgaacatccatagtgttatgaaatttccttgtaattggattgaaacatttgtaaccctttttattcgaggcataaccaacaaaaacacattttcagccctagggtctaacttattccttagatgactaggtatgtaaacataagcaatacaacgaaacactttaaaggataattctatggccaatcgatttatagggaataattttcacaattactgcaagggtgtattagatttcaaaatatgactgggcattctattgatcagttaacaaaaagttaaaattgcttcaccccacaaatattttggtatatgcatgaaaaacttgagagacctagccacttctaacaagtgacagtttttatgtttagctatacctttttgtttgggtgtgtccctacaagtggattgatggtgaatgcccttttccttcataaaagttcccaaataatcattgaaatatttaataccattattagtttttaaaatattgatttttatttggaattgtatcaacaaaagcatagaaatctttgaagatttattcaacatccgatttatttttcatcaagtaagcccaacacaatcaagtgtgatcatctatgaatgtcacaaaccatctttttccattcaaattatgaattttagaaggcccccacacatcactacggattaaatgaaaaggttttgatagagaatatgcctttattttacaagaagtctaatgattttttgataaaacgcaagcttcacaatgtagcaaattacaatcaactcctctaaataatcttagaaataaatgttttaaataagaaaaactataatgtcctagtctaagatgccaaaacattattctatcataaacaaaagtagaactaactctaccaccaaagctctgcacttatttatttttgaagaccttttcatcaaaataatagagaccatcttgcatcctagcactgccaatcatcttccccgtgtttcggtcttgaaattcacaatgagaattaaaaaaaaagggacaacaattaaaatctttagacaatttactcatagacaacaaattgcaagtaagtttaggaatatgtagaactcattgaaatacaatgttttttaaatagaaaatgagcttttacttgcaatggatgaaagactactatctacaatttggacctttttattgtcaagacgagggacataagtttgaaaccaattagagataccggtagtatgataaaatgcacctgaatcaattatccatggtacagatgaacaaaatgtaacagacaaaacactacctatttgtgccaatgaactaataggagtagtagtcagtggattggacttcaacagttgaagaagttgctctatttgttccctactaagagaagacatctcgacaatattggtagtagcaatattatgttaggactataaaaaatttaaccactaatatcaaaaacctaatctctcttaaatatttgaatgaatatgaagtagctatacaagaagcctttgacgaactttttgctacaaaagccttaattaaaaaagaaattataaaatattatattataatttatatgttagttcatctaattatttaaaactaatgaaccctcatctacaaacccaaaaggtaaaatagttaaaaattttagaatttttaatataacattaatattcaaattaataaaatttaatttctttaaaattattaaaaacatattaattacgtaatatcaattaaattatatcatatgtatgcttcataatatagcattgctaataaaaaataaaattaaactatgcatatataaaaataaattttatgaaaacatatcttaattagccttgatttagagttaatccaacacttcaacaacaaattcccaaaattaaaaagttttgaaatagatcatagagaaaaaaaacttggagtaatacaagatcaagaaactttcaattgacttgtatgtaaatggaatgaaatttgggcatttaaataattttttttggtcaaactagtcattgatggtcaaataaccgttataaattaattttagctgttagatcaaaatttggttgacatttggtcattagatcttgatctagccattgggaacatttcctagctgttagatcaagtcaaaattcattttccaccattggatcacaaatttgatcgttggatagttttacaaaaacataggtggaattttagccattgaatcaccagcccttgaatctagttgttggataaaaaatttggaagaagagataaggaacaacgatttttcctcgattttttttcaaaaaaatcacttatatgttagtgaaatttcgctgatttttttaccgattttctacgacgacagtgaacccaacaaaaacatcgccaaatttatcggtttgatcgatatatcgtagatatttcaacaattttttctgatttatccattggtcgagctttgaatccaagagttttattctacaatgtgtgatttttaagatcagatggcactcacgaaacccacatctcttcagagcaatgttgagtatctagctcatcaagagaggcagtgtcttattcagttcttcatgacttttcgtgatgattttgaggggcttcggggaagtattctacatcatcatcctaatccttctgttgacatggtggtaagtgagcttctagttgaagagacatgtctcaagactcgtgcaggaaaagggcctttccccaacatctagctcattagttctagttcctagaaaaccattctcaagcaaccagactaaattaccttcataggttagttttgatgagtacaacttctgtaagtaggaatgacattgaaaggcttagtgtcctaaactattgcataaagcataaacatctcagtagccttctcttacatagcagcagtgaagaccacctcctcctacatagcagtagtggcaaccagccccaccttcacaacaatggtgtcttggaggacaaccttaacaacaagcttataggtcatcatagcctaatattgtagcacttatacctaaagttgcatcatcctcaaatcccaacatggtgatcattctagagttgttttaaaagttccttaacacatagtcattgccacaatcgtatgtcgtgtctactccatctttgttaggtctgccctcccctaacacttcaactaaatcctcttttttattggtcttagactctagtgcctcacatcatatgtcaccttcttcatcatcttttgtatatgtgtcattcttcttcctatatgtcaatcatgactgttgatggtactcccatgcctttagcaggtgttggtttcatatgcacaccgcatttgtctctctcatatgtttattgcattcttaaacttactatgaatctcacatctatgagtcaactttgtggttttggttattttgttcaattttcttctacttcttgtcatgtgcaagatcctcaatcccagaggctaattaggacaggttgtaggcaggggggcttatatgtcatggatgagttatgacttccatgagttccagatgtagctattttgggtgctaacttgtcgtctttacatttagcttcatctttctctagtttttatttgtggcactttagacttggccatgttttagcccttcatttagaatatttaatttctaaaggatctttgggcaatttgcaaactcatgatatttatgattatagtggttgtaaactggcaaggttttttgctttaccctttaatcaatgtgtttcctcatcatttacttgattcattctaatgtgtggggacctttccctgttgccacaaaatgggggtctagatattatgtctcttttattgatgatcacactcgatattgttgggtttatctgatgacgcgtcggtttgattttatacatgtttatactaattttcactcatttgttaaaactcaacactttgttgttatcaagtgttttcgttgtgatttgggtgaagaatatgcatccatagtcttttctaaattacttatctcttatggtactgtgcactaatcctcttgtactgacactcctcaacaaaatggggtcactgaacgaaaacaaacatatattgttgagactgctcgctcccttctcttgtctgctagtgtcctaagtgcattttggagcaaagttgttctcactattgtgcatttgatcaaataaaatacccttttctcatacatcaggtccctctccctatgtatggtcaccctcctgactactcatctttacgagtttttggttgcacttgtttcgtttttcgtcctaatgtagagcataactagctatcttcacgcttaaccatttgtgtctttcttggctatggtgagggttgaaaggattgtcgttgttatgatcctattactcaaaagttatatatttctcgtcatgtcgttttccttgagcatactcttttctaatctattcctaccaagtatcataccttgtcaaagtttgatattatctacatggaccctttcttgatgatcctcttaaccctataccccttactagctcactcatatcacatgatatcccccattttgtcactcacttaccccttcttatacaattttttccttatcattattctcgcaagactcgagcaattacgaatgatgcaactcgtggtattttttatgctccaccctccacagatgatgttttcatgccctcctccttcgattttctcagcatttcttgtgattgcagatcctcctctatcttgatatccaaagcaaattcgtaagttcacctagttaccaaattttgcttgttcttattattctccttcatttactttatttttagcatctcttcacaatttttgtgagcctacctcctatacaaagattgttcttgatcccaattggcagcaagttatggctgaggaactttctactttacattggacagacacttgtgatttggtgccacttccgcttggtaagagctctattggttctcatttgggtttgtaaaatcaaaacaaagttagatggttcaattgagcactacaaagctaagttagttgcaaagggcttcgcttagaaatatggtatggactatgaggagacttttgcactagttggattatggaagaaacattgataagttgtatgttgtatgtggagaaggctcttctaatgtggatatacttgaaagagaaattatttggctttaaaatggatgagaacaagtccattaaagattgtctagatgagtttaataaattggtgtacaatgttcaatttgatcaaggatattttgagttcgaggtggagccttcgacctgacataagaataagagtcttttttattttcttttcgtttcttttcttttttaattccattagtatgcttagaagagtctaacaaaacattaggtggtagaatcctaattgttcacatggcaaacattgacagtacacaaacaccacaatcaatatataagcttaactaatatgataatagttagattttcttattatttgcatatgttccttaatgatacatcttgagaaagatttattgtttgtatatgttctttatgatacagcttgagaaacattatcgagtcttacctacagataa

SEQ ID NO: 12690 - DNA, 8312 bp, Vitis vinifera
  Intron number 11 from transcript GSVIVT01022631001 (locus GSVIVG01022631001) derived from phytozome v7.0 (chr-ID chr 2; pos 13793196 to 13801507 reverse strand)
gaggtaaatattatgcttagtacttcaattaatatgtttgaactttaactaccattacagtatggcatgttttttttctcttctgttctcttctttatctacttgtgtcttaaacttttttggacatttgtttgttggttactattgaatttggaagagaaactgaatgatactctattgaaaaattttggtttacatcgagaacttaaatagacaaagcaatcccatcctgcaaaatatcatctaataatctttctaattcaaactagagataaaagcaaatttaaacacactaggactcatctaaactaaacaatccataataagaggattcaatcaagccttatcttctggttttattttaaattcaaactccaaaaaatctaggacttatctaaactaaatagtccaaaataataggactcagtcaagccttatcttctgattttatttttaaattcaaactcctaaaaatcaaacctacggtttcaacactcctcctcaaactgaggaatggatattgatcattcccagtttgcttataagagaatcgaaatgttgtcttggtagagcttttgtaagaatgtttgtagtttgaagtttggtaggcgggtactgcaataaaaactccccattctcaactttctccttgatgaaatatcggtctatttccacatgtttggttctgtcatgatgaaccagattatgggagatgttgatggctgcttgattatcacaaaacattttcattggaaacttagttgaaatcttcaactcctccatcacatgttttagccatagtccttcacatacaccaagtgcaatagcccgaaactcagcttacgcactacttcgagccattacaaactgcttcttacttctccaagtaaccaaattactccatacgtaggtacaatagcttgaagtggaccttctatccttcatggaacctgcccaatctgcgtcagaatatacttcgattcttcgtttggtacttttaccaaaaaataacccctttccaggtgtcattttcaagtatcggagaattttgtgaactgcactaagatgttctttagtgggagcttgcatgaattgactaaccacactaacaggaaaggctatgtttggcctagtatgggataaaaagatcaacttcccaacaagtctttggtattgacctttgttaaccggagggctttcttcttcatcactaagcttgccattctgctccataggtgtgtccgctggtctacatccaagcataccggtttcctttcaagatcaaggacatatttccattgagaaactgatattccacttgaagttcgagccacctccatgccaaggaagtacctaagagctcccaagtccttgatttcgaattcttgagagagggtgtttttcagatttatcatttttgcttcatcatcacctgtaagaattatgtcgtctacatagacgataagaacaactattttcccatctgatgaatgtttgaaaaacattgtatgatctgattgcccttggttgtacccaactttcttaataggtgaagtgaaaccgtcaaattaggccctaagtgattgcgttaagccatacaaagatttctttaacttgcacactcggttctttttttcagcgtctttgaatcctggtggaatatccatgtagacttcttcattgagaccaccatttaggaatgcgttttttacgtctagctgataaagaggccaatcattgttgactgcaatggagtgtagaacttgaacagtgttaagttttgcaactggagcaaaagtttcttgataatccactccatacgtttgcataaatcccttagccaccaatcctgccttatatatgtcaatgttcccatcaactttatatttcacattgaaaatccacttgcatcccacagtagattttcctaaaggcaatttggttaattcccaggttccatttttttcaagagctttaatctcctcatgcacagctgctttccaatttggatgttgtaatgcctcatgaatgtccctgggtatatcaactttagagagattagcagtaaatgctcaaaactgtggagataatctttcataggaaacaaaatcagcaatgggatgtgtagtacacgatctaacccctttccaaaatgcaataggaacatccaaatcatataatacaactagattagtatcagttattgtgttacttgaattctggtcatgaggatccggattaggttcagttaaccggccatcagctgagggcatgggagtttgtatatccttggcaacttttcatctggaataaacccaaagctctgaggtcaaatttgctggaataagccaggctggagagcggacatagaggggctgcatctccatcgtaggtgaaaatttggaagtgcccttctttgaggaagaaatccattctgccctgttggagctgaatggtgacaaagctcctggcccagatggcttcacagtggccttttggcaagcatgttaggattttatgaaggaggaaatcttggagttgttcaaggagttttatgatcaaagatcctttgccaaaagcctgaacaccactttcctggtcctcattccaaaaaaagggggtgatgaggatttgggggatttccggcccattagcctcctagggggtctgtacaagttgttggctaaggtactggctattaggctgaagaaggttttaggaaaggtggtttccgaggatcaaaacgagtttgtgaagggtagacagattttggatgcctcgcttatagctaatgaggtggttgacttttggcaaaaacgaaaagagaaagggctgatttgtaaattggacattgaaaaagcatatgacaacataaattggagttttttaatgaaggttttgcataagatgggctttgggtctcggtggatggagtggatttggcaatgcatctcaactaccaagttctctgttctcgtcaatggggtgcctgcaggcttcttttcaagcatcaagggggtgcgtcaaggagaccctctttctccttacctttttgtgttgggaatggaagtgctaagtgcacttttaagaagggctgcggatggggggttcatttaaggctgtaagcttcgggggggaggaaggatggagttaaatgtgtcccatttactcattgttgatgatacaatcatattctgtgaagcaaggaaagagaatctaactttcttgagttggactttggcttggtttgaggctgcttccggtttaaggatcaatctggccaaaaacgaattaattccagttagagaggtggaagagattgaggaaatggcagtggagctagggtgtagggtggggtctttgcccactgtttatttggggctgcctttaggagcctatcacaagactctttctatgtgggatggggtggaagagagaatgaggagaagactaaccttgtggaaaagacaatatatttttaaaggcgggagaatcatccttattaagagcatactggccagcatgccgatttaccaattgtccctttttcgaatgcccaagattgttgcaaaaaggatggaaaaattacaaagagacttcctttggggagggggaagcttggaaaggaaagtccacttaatcaattggaaggtggtgtgcgctcaaaaggagaagggtggtctaggtttaaggaagattatccttctgaacaaggccttgctgggaaaatgggtttagagatttgccactgaaaaggataatctttggaagaaggtgttgttggtgaagtatggccaggagggttttgggtggaggactaatgaggtttgtgggacatatggagtgagggtttggaaggagattctgaaggaggcttgctggtgttgggataatttccagtttaaagtgggtaaagggactaaaattaagttctggattgatcattggtgtggcaatgcagcgctgtcccaaatcttccccctgttatttgctttagcggtccataggaatgcaacagttaatgaagtgtgggactctagctttggtcaaggaggttggaacctcagattttgtagagactttaatgattgggagttggatttgataggggagttgctgattttgttgagggattgcaggatatcttcagaagaggattcggtgttttggaaaggtgggggaagtggtatctttggggttaaggacacttatattctgatggtcgctcccaatgacttcactttcccgaagaagaacatttgggtggataaggctccaaccaaagctgctttttttgcttgggaggccacttggaggaagatttttaccctggatagtcttaaaaaacggggatggcagctccccaatcgttgttttttgtgtggttgtgaagaagaaactgtaaatcatattcttttacactgtacagtggtcagggtcctctgggagatcattctcgccttgtttggggttccgtgggtgttcccaaaaacagtggacccttttgtggggaaaaaaaggaaaaagatttggaattccatcccgttgtgtattttttggacggtttggaatgagaggaatatgttagcttttagggggggggggggttctttagctatttagaagctcaaaaattcttttgtttgtaatctgtagagttgcgctcgggtgtacattggtgaggagtccttgtctctcttaggctttttggagtggctagcgtccacttaagggctggtgaggttgtctgttttttgtgttttttggcttaggctactgtgtatactccctgtatgccttgtggctttttgccacttcttaatctattgcttgcttacttatcaaaaaaaaaaatagtggtttcagggctggacttacttactgttacaggggtagttgaggtggcatattcgaaaattggggctgggctggaagagcaatatcaactagaatagcaatatcccaaaattgatctgagctggaattccttaaaatcaccccctgaagctgagttttgggaaaataggcttgattctcaaggaatgttacatccatggaacatagaacctttttgtgataggagagtaacatttataacctttttgggttgaagaatattccaagaaaagacatttgggggctcttggatctagtttcgttttgttttgagcatgagtgttgataaaaacgctgtaaccaaaaatttttggtggaagggatgacactagccgaatgttagggtagcaattttttaggacttcaatgggagtttggtactgtaatactctagtgggcattctgtttatcaagtatgatgcaataagaacggcttccccccaaaaatatttaggaacatttgtcgagaacataagggatcaagcaacttccaacaaatcatgattttttctttctgaaattttattttgttgtggtgtagccatgcatgagctttgatgaataatgccatgttcaagaagatagggtccaagaattgaattaaagtattcagtaccattgtcagtcttttgcttcaaaattttcttttaacaaatacacccagcatattcgtgtatgatcgtcaataaatgaaatgaaccacttagagcctattacgttgctaatattggaaggtccccataaatcattatgtatgagcgaagaaggatgagattttttataaggttgtgaaacataagaatttcaacaatgtttagacaattgatagaactcacaatgaaatgactctaagtttttatttttgaataacgatggaagcaactttttcaaatatggaaagcttgggtggcttagcctaaagtgccaaaacattatttcatggtcattggaatttgtaaaagatgaaagaacattgcagcttgccttctgagtttgcccttttgcagctttatttccaaagatatataaaccctcatgctcccaggcacaaccaatcatcttccccgtctccatttcttgaaattcacaatgattaggaaagaatttagtaacacagttcagatctttagtgactttgcttatagagagcaggttacatgtaagcttaggaacatgaagaacagagagcaatctaaagctattcggaagaatgacactccctttactgaccacccatgagtaagagccatcaactattttaattttataactcttagaacaatgttgataagagtgaaaaagagttatatcaccggtcatgtgatcggatgtgctagagtcgataatccatgagtttgactttgaaaaagcattcaaggctttggaacatatacctttctgggcaatggaacttgatcctatagtggaggtactcgaaggatcacgtgtgaggagtttctgaagtagctccatctattctcaacttaaaggcgttttgttggctgagttattggattgtggtggttcatcattggtggcacaataaccttgaggttcattttcctgagttctgttacttttccaattggacggcttcctatgaattttccaacaggtttctcgagtgtgaccaacttgattacaatgatcacaccatggcccattggatctcctttgtgaatcaaagtgttgagaattcggtcccttggtggccaaggctgatccgtcattgctcgaaaaggactctgatgagttgtgatccttcatcatgaccttctttcaactctcttcttgtcggacctcagaacacacctctctcagtgatgggagttgcttagtgctaagaatccttcctcagacttcatcaagatttttgttgagtcccgccaagaatgggaagatcctttctttttccacagttttttgatatttgatgttgtcactagtgcaatcccattccaattctttgtacacgtccaatttttgccaatatagggagagaatgctgaagtattgggtcccactgaggtccccttgccgtaattctagaagctgacttttgatttcgaacacctctgttgcatttccgttgtttgaaaatgtctccttggttgcatcccagatttcttttgttgtcttgtagaataggaacgtctagcctacgtctgtctccatggaattagtaagccaagacataatcatattgttctcagaaaactaggttttgtaagatgcatcattcttcataggggttgttttcgcgcctgtgatgtagtcatctttgcctctcccacatatatacatcattaccgattaagcccattggagataattcttgccatttaatttgtggacagtaatgtggtgaatggaattttcagaaccaccattaccatcagaattgacaagagaagaattggagatgacatttgaagaccttgctagacattcgccagtcattgtagttttcaccatgtttatgttcagatcttgggatttgataccatattgaatttggaagagaaattgaatgatactctattgaaaaaaatttggtttacatcgagaacttaaatagacgaagcaatcccatcttgcagaatatcatccgatattctctctttcaaactagagataaaaacaaatttaaatacattaggacttatctaaactaaacaatttagaataataggattcaatcaagccttatcttctggtttcattttaaattcaaactcctaaaaatctaggacttatctaaactaaacagtccaaaataataggactcagtcaagccttatcttctgattttatttttaaattcgaactcctaaaaatcaaacctacggtttcaacagttactttctttattgccttctgctttcagtcatacatcttctatccaatgtttaaagaaaaaaaatatttcatgaaatgggagacatgttcttacaaagggagacatgttatggtggctaaatcagtgtaattggaatatgaattaggtggttcatggaatgggataattgtttcatgcagctaaatcatttccataaaagatcttttagtataatttctggatgtattactttaagttgaatgccaatatcagttatttctttatttatctcattgaaggatatatgtttactcaatttatcaatatttaacccaataaagtataagcccaaaaaaatatcgtggattgaaattctgcttatgaaatggatttagtttgaaattttatctattgtttttttaagccctttgtaggtcatcatataagtatgtacaacatttatttttaaaaatttcattgggcatccttgaaattttctctgtaacataatatcaccacatatgtgaaattcaattcaactaaaaagactaaccgcttctaaggaatttttagggga

SEQ ID NO: 12691 - DNA, 5268 bp, Vitis vinifera
  Intron number 1 from transcript GSVIVT01011280001 (locus G SVIVG01011280001) derived from phytozome v7.0 (chr-ID chr1 3; pos 10487816 to 10493083)
ggtacttttcttaacctggaatagaaatatcaaattgagttttacgaataagtaaatagaattggtggtggctcattattttctaatacaagatttcacttcgctttactcctctgatgtgtacattcactggttcttgctgttatggatgtacattgtgtatgaaatgtgcattttaaactgcattggacttgcatgcaatttctaaatatctatgttgaacagggacaatcatgggctggcatataactgcaaggtctgttgcattgtaacttctagcttttttggcataattgtaattttttttctttcctatcattgttaaaaatttataggcatgcatttttcagaaataatctatagcatagtttacagaaagggtcttaaaataatcagcaagagggtttgtaatggacaaaaccttaaagttctactcacagttgaaaacaaatgggggatactagtcaaatgaaatcctataaacaaccaataataactaaattttgtattaattcctttctgaacttgattatatatttacattttcaagctgtgtttcttttcaaacctgagaagctcaatgtgatctatctaatggtaaaaataagacctgctttgcaatttaacttaattgacttgaagcttgatgagggttttttcctcgttgatttgccttgctttacttaggttaacagtatggcaggtagtaacccttatagtagaacagactttatggtttttcctgtggagtggtggcaactgtgagttctttctgtggaagcaccacaaatgcttgcatcagatcatccatagtatatatttagttaatcttaatgattttctctcagtttatggggaagtcttatggttgtccaagaagtgattgatgtccatgttctcttttgattacctaatctagacagatgttgcatttatgattactaatattctaggcttctacaaaagccctgaaatgctagtagcatggattgcgatgaacttgggatgtacctaagatgtaatttgatggttccttttctaccatcaggctgagttaagaagttgggtccacagtggttatgttgatcatgggtgtgctctatttgatcatttgtctatggaactctctctggtatggggttattttattccaaaaatcaacattggtggtccttgaggcttggctcaagtggaaaagggtaaggggttggggtgggaatgtgggagtttccagatttgagccttaatagggacaaaatgttcagtatcccaaaaaaaaaaaaaaaaaaaaaaaacacaaaaattactggttccttttctcttacaagatcaacgttagtactcttactagggtcaagttgctgaatatgattcatgttcctaggatgggataccagcattgcactggtgttagtaattgtatgcgtttcttttttcctgaatgttatggtatctatttgattcttgccattcaatccctgttttaaacctttacttttgacttatttgagggcttctcctgcactttgtctgatctggattcaagctgaatagtaggatgctgtataatgactgaagactattctgtgaagactgaagctacctatttgggcattaaagaatggaggcttagctaatttgaattggaaaaggaaatgattctgcttaagtaaagagaaacaggagaaaaaaattattttcttatttcttctaaggtcttgatacaaggttatatattgaacaaagcttttgactccagaacctaaacaaggaaacaaattaatcctagcaaaatgttagaaatgatattggacaactaaactgtattacatggtccatatcctaatcccaattcttccaacactccccttcaagtttttgcaaagatgtgcattcctagcttgtcaatcatttgttgaaatgcttaacgtgggattcctttagtgaaaacatcagccagctgattcatagtacatatatatggtgtgcacacttgaccactatccaacttttcctttataaaatgtctgtcaacctccacatgcttggttcggttgtgatagacttggttgtgagctatgttgatggcaagatccctagatatgatcttaatccaaagaatttcacaagtaccttgtgtcatagctcgaaattctgcttcagcacttgaacaaggtagtactaattgtttcttacttctcctagtgataagattacctcctaagaaagtaccatatccaatagttgattgtctatccacagtggatccgacctaatctacatctgtgtaggcttccaacttcaactttttacccttcttaaataagacacccttgctaagagctaccttcatatatctcaaaatccatgatgtacaacttctaagttgggtttaagtggagcatgcatgaattgacttaccatgcttacggcatatgtaatgtttggtcttgtgtatgacaagtaaattagttttgccactatttgttggtagttgtctcagtcaattggttggcctttaaatttctctcctaatctatgattttgttcaataggtgtaagcatacatgtctccttaagtaaatcttgtatatacttccattgagaaatcaataatccttggtttgatctagccacctcaatttcaaggtgagaaaataaaggctaaatcttaatagagagaacacccaagagggggggtgaattggagtttaaaaaattctttttcaaacacaataaatttaagcataagaagcacaaatataaatagataaggttagataaagcaaactcaaattttatagtgattcgatacctccttgcctacatccactctcctcaagcttctaatcacttttactcttggattccagctccaatgggctcttacacaatctcttcaagcctttactcacttgaaggttttaacactcaaataataagtttgaatctctcaatctagctcaacaatggcttaaatacaactcaagactacgatgaatcacaaaggtgtactaaagaatatgcaaatggagatttaatgcaccaagagaagaatgaaagcttttaaggcaagaacaagtaggtaaacaaataaatgcaggtgttctcttgttcataaatgaagtggagctctcagtttataggtttctaatctcgggagccaaaatgccaaaaagcaacctcgaccggttgagttgggggtcgaccggttcactagccgtttgagcatttaatgcttgacaggtggtcgttaccctcaattggacctcgatcggacatcgattgggaaggcatatcccttgaccaggaatgaaaggctaccagaagagaaaaaaggttgtttgcatctcttagtcagaccttgaccaggaaagagtaacttgtcgaccagtatcctagccggttgagtcagttggccagtgtctcgaccaattcaccatttttagcctgaaaacctatctttttctaatctttttgcttctaacacttagacaaggtctttaagtaaattaatatatcaattttgaaatgtttacctaaggttcttttgataaaacttggatttagatggaaatgttactttaatgcataaaccgagttttttaaagatgcatgaaaagatatgaaatttttgagattttccatgcaatttccagcacatttctctagtatgtcttggcttatggcaataatcacaccataatttatccttgtccatcatcctcttgccttctcccttatattttccagtgatagaagggggtttagaggttgccaaaggttaattttcaagtatagtattgctagaatttccaaccatcagttccttacaactctcctccccttgaacatgggcaaacgctacgtccatggatggaaatggttctctgcctgatacttgaccactggcctgatcaaactctggattaagacctaccgaaaattggaatactctctcccttttcattatttcttttcatttctttgtattagtggctaattccatctccaggttctggtataaatctagttttaggccacaatcctttgagagcattgtagtactctgtaacagttgaggacccttgcttggtgttaaaaatatgtcgtttcacctcaattatttgagaagaaacacctaccttggagtatgtttttgacactgcttcccaaatgtcttcagcagtagttaggaacaaataggtcttactgatttcaggttgcattgagtggggcaaccatgacatcaccatggaatcctctgcatcccaaacttcatattccaggccatcctctgctggtggttttgcagtccccatcacatacttcacctttcccttgctcttcaaggatatcttcactgatcatgaccgctccatgaagtttctccccttcaacttggaagtggcgatttgaagggttggattttcattgttgatggataatgtattgattttcattgtctcttgtatatccttttggacagttttttgtttcagctataagagggtgagtgtatctttcttgtatttcatgggctgctattttagggcctctttttaatacaattactcttcttacttatcaaaaaaaaaataaaaaatgacttagatgtttcagacatgaaggataaaggtagattaattaacagtgtgaaataggttttaaaaaaaaaaaaaaacccttcacaaacagttttgaaagtgacagcaacaaaggctgttagggtgagatgtgatggcaatgaaggtcaccagaagaataattaaaaaaaaaaccttgcagaaaccctcgatgggctctgataccatgctgaagttagagagaaacaggagagaaaaaaattattttcttatttcttctaaggtcttgatagaagactatatattgaacagagctttggacactagaatctaaacaagaaaacaaactaatcctagcaaaattttaggatctacatgaaattctactactatacaatacttgactatgaacctattttacatggtcaacaacctaatcccaattcttataatactgtgaattttagtttcaatgctaatcaatcataccatcaagttattttctattcactcacccaacacctagatataccatatcaaacttcctccttattctttgctttctatatttctatttgtggttattattgttttcactacatgcatgtcacaaactctgcactagtttaagttcatttccttttgattgattttgtgggaaagttcagtagagcatcggaag

SEQ ID NO: 12692 - DNA, 1638 bp, Vitis vinifera
  Intron number 16 from transcript GSVIVT01012875001 (locus GSVIVG01012875001) derived from phytozome v7.0 (chr-ID chr 11; pos 6444465 to 6446102)
atcaggcaagccccccaaattcaaaacgtcagaaggtattacagtttgaaacttctctgtctttccttttcatcttctctctttcaaatgcgtcttaacttatcatatcttcagaatttaggaggaaatgatgctgtgtcattagaaattagaattgagatattcaaatgagacacatcagtgggttggatcatgatctcaatccttgataagacgctgcattctatttcctctggtgatctcatgcattctatttcctccagtggtctcatgcaataattgttagatctgattctctgaatttgcaaccatatggtaaattatatgtttgtatatagcattttcagtgttttgtaggacttcaatttaatttcatcatgccaaagtcatccacatcaggatcctggactggatttatgggggtctcgtagctcaattgagaactttcaaattctaaatagtggcaaagatgattgaacatgacatggtcatattagaaaatttcctggaatgctggttaagttcaaagtatgagaaaatgtaagaaaacagataagaatacttatatttttttgcaaaataagctactgaaacaaaaggccaacctaaaagctgcactaaaattgcttttggaagtgattcttatagggtgagaagcatttcctaatgctaggaaacactttctttactaaaattaggcattcaacaaagttttaaaaatcacttttgaacacaagaagtgattttttgaactagcacttggtgttttttccaaagtcactttttcgttatgcatccaattgctaaaaacactactatattcaaacattaactgattcttgatgaaaatgtttctgaaagaagtgctaccaacaaaagtgctacagattaaaagtccttttaccagaatcactcctaaatgagtcattagcgtctttaaaagaagcatgaaacagtcctcaaaatggatattcaaactcatggatgttttttgaatactttcaaatatgcagagctataaacagatttaaatgtggtcttcttatagatttattgggttacatttcattggagttggtagacctacctcagttggacttccgactgatttggtataggcattatttaagataatttgaatggttgaaccagcaaagctaaaggtgaccacataatctctttacagttttgatgcccaagacaacaaaaaaaaaaaaaaacaaataaataaaaatagaaggaacattagatatatcttcatgtgagtttgcttaggaaaggtggacacgaaggcgttgcaggtgagaatgggattagtggagattctaaaaactgctgcaaatcctatgcaatgtgatattgtaacaatatggaagtcaaagctcatcatgcatgcatctttagttcaggtggccctaccaaccatatggtggactctggaagatctttcatgcttaaaattaattaataggaagataaattagcacattcttttggttatttaatagaatggggggaaatcattcctattttgattacaaaaattatcactctgaatcgatttgcttatgtttgcatgttctccatgcttaacgtttattttgagggcaaagtgtttgatttgtgtttcttgcacag

SEQ ID NO: 12693 - DNA, 3834 bp, Vitis vinifera
  Intron number 2 from transcript GSVIVT01021082001 (locus G SVIVG01021082001) derived from phytozome v7.0 (chr-ID chr5 ; pos 13901581 to 13905414)
aaggtaattttcatcattttctaatgcaattctattttgagttaaactatttgttaagtttgatacgcattttttgtacaattggatcccattttatccattagcttccgtatggttggccattaaacgaaaactttaactcagattttcatcaaactaacctaatatactgtttggcttaggctcttagctgtggaatatttatttattctttaatgtaagtttgtagatcttgtttatggaattactaaaggaggatgaatagctatttaatctttttaagtccaaatttttatttgttaatttctgtttaagaattatagaagaacaagagaaatcaatcaaacaagacacaacaatttatgtggaaaatcacctacaaagtctctcaaagactttggggatgtgaataccatgtggtcagagactggagagatataatccactaaatatgaagaagtacacagatttacctagaagttgctactccctagggcttacatctaagaacctacatctaatctcatatcctcaaggtagcaccaccatactccttagtggactccttaatgtcttgagaggatgcacatctctatcatgaactcgagaaaagaatcatgaactttttgaaagtttcaggttaaacatgaagagtaatgatttaaagcttaggcgcataggttccttagagaattctcctaataggcatatagtagaactgtagaataaacatatattatagaaaacctagtggacttggaatcaatttgaaacctcactgtctcaaatgtccttggcaattccttaccattgtcttggaattttaactttcgccgcaatctaacggatttagaagttgatcttctttagagattaatgtcctcccttaattctgtgcttttttccctttcttcatcagactcaagagcgtggtctttgtcttcgtgaggctcgttttcagtgaaattttttttctgtgccttgtcaaaagtttcaaatcctttaatgttccttccggccaagtttttatggagctcaaaagtcccttcaaaggttaaggcccccgcttggttagtagcacatgggaaggtaaacactaatgacaagttgcaattgagaagaccctacaaagccctctgtcctcaatggtgcattctttgcaaaggaaatggagagtcgattgaccacctttttcttcattgtcccgttaccattggactttggcacaggttgttcaatctagtaggtttgatttgggtccctccaaggagccttgaggacatgttggttatttcttttaaaggcttggggaactcattaagaggcaagacactttggcaaattgcttgccttattttgatttggatggtgtggcaagaaagaaacaataggatctttgaggataaagggagaacggaagagatggtttgggatttgatccggttttattcttctctatgggcttcttgtactgaagcttttagaggagttcctctaagcattctacaactcaattggattggggtttgcatttcaagagtttgaagattgatggggtttcttttgtttttagagttctattgttgggagtttttccttggtatttgtgtaggaaggacctctcatccttcccttggtttttttctctttctgttgtcttttttttctctcctgtatttgttcttttattaatataatcttcttcgtttctgataaaaaaaaaaaatcatattttactaaaaaacaatttagaaacttaagaattttgaaaacatttagaaaaatttcatattttaagtttaaaaagatttggaaagattttcttttaaaattcttaatttaaattcctttccaaacttttgaagagatttgggaatattctcttttctaaattctcaattattattttttccaaattaattttattatttggaaagatttttctttttaaattctcaatttaaaattctttccaaattaattttattcctaattttcatgtgtccattctatgtcttttacgttattattctcacttagccatacttatctgtttaatcctaggttgatcttggggcaaccttaaatcttccaaagagtgtatgtaaataacaagaaagtacatagagttctaaactaggatagatggaacaatatcaatttaatctaaatagcctaatgctctaacaatcttcccctttgacaaatttgtgacaaaatcatgattacataaaccccctaatactcttaaatggaatttacaaattgctcaatgtcactcatataaaccacacatcctataaactaattttgaatatttgcaacttgtttgggaaattcttgaagtctagagctgtgattctacacatacacacttaaacaacaatactcgtgaaaagcaatggacttgaagcttcttgagagtttagggttaagtgcgaagaatgacttaaagcttaggcccatgagctcttgaaagaactcttccaatggacatacattagagaaaacctagtggactcataatcaatttgaaatattttatcaaaaaacaattttgaaacttaagaactttagattctggattttattcctaatttccataagtacactatgccttttatgtcattattctcacttaaactcaactatactcacctgtttaatcttaggttgattgtgttgcaaccttgaatcttcaaaagagtgtaaatcattggaaagtatgtagagtctaaactacgatggatgaaacaaaattgccaacttaatctaaatagcctaatgcactaacacttgacgttcttcatgactcagtggaaggttagggattgcttttgcggtcttgtcttgttcaataatgtaagaaaattaaaaattgatggatataatttaatataattggggtggacgccgatgaatattgtgttctaaatagcattggattagatatggactcagcttgttttctcatgtaatttcatttgaaatttccaattgtaaatccttgttttagtcttttaacatcatatgtggtgatggtaccatttcacttaattccttctttgtggaggttgctgcgtcattggattttaccgaaaataatatgagctgattcaatttctgaagaacgccaaacttggccttagtttttggctgttctccaatgactgaaggccttccctttttgagtttaatattggaaaatgcaatgcaaaatgtcaatttggtgggaaattggaatgatgcagactgcccttcacagttccaaaagtgaaacaagactagagtgggactgcgattttaaaacatgactgctcaatcattttatgagtcattatggagttaatcacaagcccaaagcagtggaatgatgaattctgcaatttagacaaaaatagaccattttggaatgagaaaatggatactgttgcctcttggttgctttgatattagcatattctactgaaagggaagcacagcttgattctaaaaactaaatggccaacaaaacatgtttgcatgtaccagattggctaatgcttcctggttgatgtgatattccatgtattgatgggaatcttgattattggtatgctggtcgggccagtgaaaattgaagtatgagccacaaagatgaacagaaactccttttcacatcaagttcagataaagggggcttttcaatctggtcacgttatggcttggtttatttgattttgaatgcattgcctgctttatttatttatttttgataagtgagtgcatagttttctgaatctacttttcattttcacaggtagattcagtgttgctccctgaagttggtgcagc

SEQ ID NO: 12694 - DNA, 13921 bp, Vitis vinifera
  Intron number 4 from transcript GSVIVT01003936001 (locus G SVIVG01003936001) derived from phytozome v7.0 (chr-ID chr8 ; pos 8125896 to 8139816 reverse strand)
agttgattgaggaagtccaggaatttgactcaaaagtaaactattaccacctgtacagtttgctgtttagtatatgcttgtattttctttttaattgtgattaaaaatcttttcttttcttttctttcatcatttttttctttcaaacgccttctttttaattgaaaataattttaatgttggcctttcctggttagcatgtacatacaagaagacataatgcctttaattgattttgtagattaggtcagaaccgacatagctttttttgtgttctctttctttatggaaaagccttttggttcccattgtatgtcttgtgtaccttgatgtgcagttttctttgtcaatatctataaaatcttttagcttataaaataaatgtctgcgtttcctggctatgatggtttatgtttttttttttttttttttgataagcaagcacagacttcattcaaagaaggcaaaaaagccccatagtatacaggacgtatacaaggcagctaaggccttataagcaaaaagaccaaaaactcaccaccccttatctggaggctaaccactccatgaatcctataagggaatgcggctcctcacccatatacaatttagcccaaccccaaatgttacataaaaaagaatatttaaacctctgaattgctaactctctccccctaaaagctagtctattcatttccttccaaaccgtccaaaaaataaataacggaatggaattccaaagctttttcctttttttccccacaaaagcaccccccaactatataaaacctcctttacagttttaggaaaaacccactgaaccctaactaatcccaaaactaaatcccacaacactctggccattgtacaatgaataaggatgtggttcacattttccgcttcacaagcacacaaaaaacagcggttgggaagctgccatcctcttttctgaagcttattaagagtcaatatcttctcccaagtggcttcccacgcaaaaaacataattttagttggaactctctccacccaaatttttttttttgggaagacgacctccagaggcctatccaaccggctgtacgcttccttcacactaaactgcccacttcccccttccttccaaaaaaccgaatcttcctcccaagtaatccttaatcccctcaactcctggagcaaattgcctaccatctccacctcccaatcattaaaatccctaataaatctcaaatttcagcccccttctccaaaattctggttccacatttcttcaactgtcgcgtttctatgagctgccaagatgtagaggtgcgagaacctttgggacaacactatatccctacaccaagtgtcagtccagaacctaattttattaccttttcccactttgaatgccaagttttctcagcaccagccaacttcctttaaaatctccttccaaacccccaccccaaacgcacccacaacctttttggtcctccaaccgtagtcctcttggccatactttgccaccagcatttgcttccatagaaccttcttatcacaagcgaatctccaaatccatttgccaagtaaagctttattcacaagggttagcttccttattccaagcccccctttctccttatccccacacaccatctcccaattgacaagatgagctttcctctccaagttcccctcctcccccccaaaaaaaaatctctttgcagtttttctaatctccttgccatagaaatgggcattcgaaagaggaacatctgatacactgacatgcttgccattgtgctcttaattagagtgattctcccgccctttgagatatattgacttttccaaagggcaaatctccttctcactttctcttctaccccatcccacctagagacagccttatttgacacccccagaggcagccccaagtacactacaggcagcttccccaccctacaccctaactccacagccaactcatccacctcttccacctcccctattggaatgatctcacttttagccaaattgattcttaaccctgaagcggtttcaaaccaaaacagaatccaactcaaattcgttaagtgctccttctttgcctcacaaaaaacgattgtgtcatcagcaaagagcaaatgagcaacttggacagcccgccctctaccgcgctgaattttacaccctgaaataaatcccccttccatagcccttctgattagaacgctcaacacttccatccccatgacaaaaagagagggggacagggggtccccttgatgcaacccttttgagctagagaagaaaccagctggggctccgttcaccatgactgagaatttagcagtggagatacaccaccacatccacctcagccactttgagccaaaccccattttttccataaccttcaacaggaactgccaattaatactatcataggccttctcaatatctagcttacagattaacccattctcaccccttttattccatgcgtcaatcacttcatttactataagagaggcatctagaatctgtcttttcgtggcaaacgcgttctgataagggaagaccacttttcctatcactttcttaagcctgttggccaacaccttagccaacagcttatagagcccccctaaaaggctgatgggtctaaagtcccctagttcctcggcccctcctttctttggtaacaacaccagaaaggtattgttgagactcttgaggaaaacattctggtcataaaactccttgaacatctctaaaatttcctcctttacaaattcccaacaactttgccagaataacaaagtgaaaccgtcagggcttggggctttatccccattcatatccatcaaagccgcctggacctcaccctcaatgaaggggagctccaacatctccgctttttgcaaacagatttgattaaattgaaggcttccaatgtttgccctccactctgaactttctgaaaactgctgttgaaaggcattcattaccccttaatttctcgctcctctattagccttaccccatttattttaattctgtccatgtagttggctcttctatgagcaaaagccattcggtggaaatatcccgtgtttctatcccctgcctttaaccataattcccgtgacgcctgtctccaatgtgtttcttccagatctacccacttggcatatccctccttggcttccttcttacaagctaattcctccactgtcaaacttctctcaccttccaccctatcccaatactccacttgttggagcgctgcctccttgttacattccagattcccgaacacctccctattccaaactttaagcttctacttcaactccttcagttttgcagacaatctaaagctggtgctaccactgacctctatccccctccaccaattacagattaaatctttgaacccctcgactttgaaccatatgttttcgaatctgaaaggggcagaccctcttctaaggcaacccccctcaagtaacactcggaaatgatccgaggtcggcctaggcaaccttcgttgtctcaccctactaaactagtcaagctagcaaggagttaccagaaatctatctagcctagcccttgattggctattcagacccccactccacgtgaaagctctcccttgtagttgtaagaccacgaggcctagcttgtctacgacttgcgcaaacctcctcatagctgaggttattctcccttacctgctcctttcactttgagagaggatgatgttgaagtcacccccaaggcaccaaggcccctcccaaattcctctaaccgccccaatttctttccacaaacactccctctcaactctggtaaacgggccataaacacccgtgaatacccaaatcaccccattatccacttttctgaatctgcaggataacgaaaattgcccctcctcctactccaacaaatccagaactcttttatcccaacaaatcaaaatacctccagccgaaccacaagcatccaaggccttccaatctaagaatcttccagaccctaaactactcaccaccctgtcagacataacttgaacttttgtctcctgaatgcagaacaaatccaccttctgcttcctgattaccgatttaattactttccttttcgtgctttcgtgcgctcccctcacattccaactcaacagcttgaggttcattggacaaccactgactgcacccctttgccctgaagaggacatttccttctaccatccccctcatagttgactaagcattccaatctctttaactccctttcaaatctcgatttttccagtagtcctttgctgtggatcttttccctccttttcctgattttgaccaagaaacttaatatgtccttttccagtcattcagtcgaaaatcccaggaattggttgaaccttactaggctactttcttgccgattcagggccccttccccccttccttcttggaactcatattgggatgaccccccctccaaatcccttgccattgagataggaccattaaactcaaccaactcccagtagtcattgccattctcactaggcctagcagcgtcttgacaatttgacacacttccattctggcacgtctcccttaacaccccagaaagatcaaagaactccccctctggagtccgaccaagcgaaaacaaagaagaatgaaaaggagtccccgagtcccttaaaccccctaagattgaaagagacccatacctcgagacttcttccactagggcactgtctgtcaacaagaagtggaagtctacttgctggactctctcaacttccttttcccgcacacttagaaactccagctcaaaattggcttctccacaaggcccaggttgggctaagatccccaccgggcctttattaaactgaacctctaccgggccttttctcctcgtgactgaaggcccaccaggctgcaccccaggatccttaaagtggctcaataacggcccgctgctctttctttagaccatattaggcccaaatcgtggcctaaactcctcctctgagaccttctcctttcctttagaacctttcgacccaaccgcaggcccaaccccaccaactccagccccttttgaaattactccttcagagaagatttgcggactaggcctctcagccctcctcaagcccagattgttctcagtaagcccaaccaagggcggtccatcttccgtcccacccactaagggccggatcatctacccgaattggatccggcccacagatgaaaccttacccgtcccatccatttgcccttccatcccgttagctgttcgtgatagcgcctcgagccctgcgctaccccacttttccactcgccggccagtgcgtgcgcctccgtcgcccttgacctctcctctgccacgatctattgagccccggtgaccctccggcttttgtctaatcgatggcagcacctcccaccaaagaggaaggttataataaatcccttcgactccaattactaatgaacttggcaactcacctctctttgttttcaccaagatcctagcccaccggaggttttccattttttccgtcgaaggatccatggctacaaagccaccgcactcatcccccacccttcgcagaatggtcgggacccagagcgataatggcaagcccttaaccctcacccaaacttcttctcttatttccccttcttccaaacacccgagacttggactccaaagctccagttcaacctgaatcctacccaccgaccttttcctggcggcaataactttcctggcttctaccgcaagttcgaactctaagagggcctgaccctcttccatccaagccaaaccaagcttccctttcagcccccaaacgctcgccatcagccaccccaacctcgccagatcctctcctcctgctaccctagggttccatttttcgactaagcagtgctccaatctattcacattcctgctaattttctctccctctacctccattctgaccaaaagacgatccctattcccccatctcttccccatttcagcttgcattctttcagggatctactcttcctttttttcctcccttctgtcaatcctcgcgatcaaatcccgtacaacctctaccatagctgaccatccctcccttccccctctgcctctcgggatacaaatgttgtatcttttctcctccgcatctacaacccctaatcggataaagctccccgccttgttgacttcgcgcaccatggagtaacttctccccttttccttccaacccttctcccatttgtcgtctttcccatccttaacgcactggtccaacccttccagaaaaatcccagcgcttgccggccccaatctaacccatgaaaaaacccctcttttgctttccacaatgaagagtagggttttacctcttctcttctccaactctacttcaaagacctttgattccaccccgaaactctttccttgccgtttcctccgtttctccgtttggttatctccctcgtcgccatcgccctcaccctcgctctcgcactctctcgctctctctcttaacagcatgacccttttccaattctaatacagttattacatatgatggtttatgtttttttattgcattttcatgtgtatggctagtgtggttttactatggaaaaaaatcagtgcaaaaagttgttccccatgccttattttcagcattgaaatgaattgcatgagaatggtgtgcatattctaaaatatcacaatggacacaccttattagttgcaaatttcttagaatatattttgtttttcaaataagatgtgtagaatatggaactatatgcaatgaaatactcgaataaatgtgtaataatcaatgatattttccatggattcattatttttatttcttgtttttttctggtttgtagccatatactttagtttgaagagtattgcctagttgttctcaactagttctttctcaaagttcttagttagtttcttctctaatgccatatcttctttcaccaatttcattccttgtattctggcaaatttcatttgaaaaatccaaagctccactaaaagtaaaggctaagaaagccttacaaagcttttagtctgaagtggcgtgtcatctgcaaggcaatagagaatttatcaatcatgtatttttagagtggtgggatggaaattgatcaaaactcaaaaatgttggtaaaaactccaataaataataaagaagtaataatatgcattaaaattgttttatcgaagagaacaatgtatttatgctataatttatgatattagacgataatttcatacgtgctgctaagaaatatgtattttcagagtgtgcatttaatattaatctggagtaaatatttgatcccattaaatgtcaacagtttttacaaaatatgttgtaatggttccttttgatactaaaatgaagaccaatgtggtgccatgacactggagaatgaaggaatcatatcttgatggagataattttgatatcatgacatatagtttgcataatgttgattgtaattacgaacatgtcatgcataggtctcttgagtcttgcccatcacctcttcatggatggaaacttggagttcacttatgcacttgtttgaaatcctccttgcatctgatctggaacatcatatggcatttatgtagaaggatagttaaatatatgatagtcatgagatgttgaactctaacccattacataatttgggtaaggttggccataactcattacatgaggaggataaacgttaacctcatttgatgagtcactatgtcgagtctatatactcatgggctcaaagctgccagaaaagaagttctcatcaaatgctgccatcctttgttgtctcctccctttagatgactttttgaaatagctaccatgcttggactaactcttctagagccatggtcttcttcttacatgcagcatgtgaaattggttgcactagtaaatgtgctcaatagatattgacatttagattgttgtccaacatcctctcgatcatttccatcctcatcatcatctccatcattagcttcccctcctctttaggaatcataattagaaccagaagtactcatggcgtttgaggttttagtagaggaagttagagggaagatactcatgtcaatcaaaatctctttttttggagtctcttgggtttttccgcattcggttaaggaaactctaataggttggagaggttccattatgggtaagaagaggaaggtgacgtggcttttgggaccattatgcttgttttgggtcatttggaaggctagaaattcaattgcttttgaggacggggtgctatctatacaaaagctgaaaatttcctttgtgtatttgctatggtcggaaaccaaagtgtggataaaagatggtccttcgaccttattagattttatagattgggtgtgcatgtattaaagaagagggttttttgtgctttcatagaggggtgggttcttttgtaagggggtgagtcgttttttctatactgtaactatttgagtcgcttctttagcgtctctttatcaatacatatattacttactgatcaaaaaaaaaaaaacactaacataaggaagttgtgtggatggttgcatcgcttactaaaatgaatctgtcgtgtgttgctttgactttcactatgaacttcttcaaacaacactctttcaacatcaaaacttgaatcacgaacatgtgaggcaattttgtgggtcgggatttctgttgttatcatctaagtgtgcgggtctgattcactagaacatctgattgtactcttcttattttttcttagttgaattgtctagcatatcaatgaattatttttttttgcaactttatcattttctacgtccatatctcataactttaggttcatgttctaataacaaaaaactaattattgaagcttagagtaggcgagatgatcccgttattttgtgtgggttagggcaaatatgctctaatttctcttgtaggttgaagatgatgtagtttgtgataggattagaatagccaaattccttaatataggttattgttcttctacatgaatcgccactattcaactacaaacaaataaatgtcatgaatacatacattagtacaagaatgataatcaaagtattttgattttagcattctattttttctattgacaaaagtactcatccaaatccatttctatccttgttgcgattgcaactcgatcatcgaatcctttcttgacatctcaaaaaaatggaaactacacattcaatatgataatatcaaacatttagctaatttgaaagtaaaatgacaaaggaaattgtaatttgaatgagtttgtaatgtaacactatcaaagttccctcatttccaaatcgaggaagggctttagtagcagggtgggtttaatgtggtaaatatgtcatggatgacttgaagtagtaggggatctctattaaccccatctttgagttggaattttgggttgaggaagtatgctacaaaagttaaatacaattaggactcttaggagaaagttaatatgtgattatgttcgaaactcacaaaagattgagatggatggtagttaataatttagtagtaaatagaattacttgttgaatgaagtggatgacttggtgttttatcccaactttcattgataatgtttaacatctaagatgtagaccttaaatggttgatgttagttttcatcacacaaactaactcatacataaagggcattgtgcgaaaaacttctaaatccacgatttgaagaactatgtatagtagctcataaattgctacttggtcccaataaccatggttgagcattctttgtttaacttcttttttgattgtcatacggtttagtttgtgttttgcctattgataactcatgaacaatttctttaaatccaccttctattttaattgtttgattataaacaacctccttaaggttaatcctacataaatgtcatcctaattaggcaacctaggtttttaggtgaatgagcaacccatgtcccttgaaagatcaatgcacttgaaaatccgagagtccaatttttggagccttaacttgtcccaagacactcaagagaacaatggctgaatcctcttccattcgaagattactacaaccaaaatcaactacctcattcaaacctactatcaaattaggacatcaaccttaacaaccaaccaatccatgtgtctttggagaattctctgttaagttatcaattgactcaaatgcttactctgttaggtaataggccaacaatgtatattaagtttgcttgagataaggtttgtataagattatagctaaggtcttattagggcacttaaatagagttctccatgaaaccatctacatttcctaaggagcctttgttgaggggagacaaattttggatggtgttttgattgccaatgaagtggtaaacgagaaaaggtatttaggggaggaagggctagtattcaaaataaattttgaaaaggcctacgatgtgaaccaaggttttttagatcatttgctaaagagaaaaggtttcaatacaaaatggagatcttgaatgaggggttgcttgtcgttgacgagttttgctatcatagtaaatggaaatgccaaaggttaggtgaaggcaactagaggtttaagacaaagagatcctttttctcctttcatttccaccattgtagtggatatcctaagtaggatgatgattaaagcaaaggaaagtagtttattaaagggtttcatagtgggtagtgataagattagagtctcttttacaatttgcaaatgataccattttctttgctgaagccttttcggaaattctgctaaacctcaagctaatccttttagtttttgggcaaatatcaaggcttaagatcaatttggagatgaacactctttttctattaaaataataagccaggatctagtatctaggttgactttgatgcttgactgtaaagtttcaagatgacctttatcttatttgggtctttctttaggaggggatttgaaagcaagtggattttgggatctagtggttgatagaatctcgaggagactagatgggtggaaaaaggcctttttgtctttgcgtcgggggggataattctaatctagtcatgcttatctcacatccctggctatttcttatctcttttcaagattccaacatcagtaaccttaaagattaagaaagtgcaaagggattttatttggtcaagattgaggagagtaaaaatgatcatcttatcaattggacattgtgtgttggccaaagaagtaaggaggtttaaggattggagactttacgagaaatcgtggtcttttagggaaatggctttggaggttctatagggataattatgacctttgacattgggttattttgagcatttatggaacacattctaatggatgggatgccaacattttggttagatggtcacataggtgcccttggaaggttattgcacaagttttttaaggcttttcttcatatacttgctttgtggtgggtgatttggagagaattcatttctaggaagatttgtggtggggaaataaaccattgtgttctcaattttaaggtctttatagagttatcatagttaaaaatctcaccatatcagacctgccagggtaggccatttggttaggacgaacactaggaagtgtggtcccaataagtggcacatggtcctgggttcgaatcccgccactaatgataccctaaatttatctggcgttggttgtttcgaggtgattagcaccccgaggtttgggtccgcatggggagtcctaagggcctgaccatggaaggttccttggttttcaaaaaaaaaaatctcaccatattagtcctccttggtaattccttttcaccttcttggaaccttaacttctatcgtaatcttattgccatggaaattgaaaaccttgaaagattcatgtcatcactctcttctgtgcacttgtctccttttgccgcatattcaagagcttggtctttgtcttcttcaagttcattctcagtaaaaaaaagttttcttcgccttgttggagttattatccaatcccattctttgcagccaaatttttattgaaatcaaaagccccttcaaaggtttaggcttttgcttggttaatagtgcacaagaaggtaaacaccaatgacatgctatagttgagaagaccttataagctttgttagtttctgttggtgcattttatgcatgggaagtggggaatgaatcaactatctttttctacattgccccattaacatttgggctttgacataagattttcggtctagccaagatggattgggttccacctaggagtatatgtgatatgatgaccatctcatttagatgtttggggagttccatcaaaggcaaggccctttggcaaattgtatgcctcactatgctttgaattgtgtgacaagaggaaaatactaggatctttgagaaaaaggggagaatggaagagatgatatgagatctacttcatttttattcctccttgtgggcctcttgtattatcaccttaaaggtgttacacttaaagttattcaatttggttagcttttgaagagggaggggggaggataacattgagaggaattgagcccggttttgaggagatttgtatatcctttaagtagcctatgcctttgtgtatagttctccttgtgtagtggaggtttttaagtcttattttgattagtattatgtattttgtgggggaggacctctcatccttcccttgtaccttttttataattaatatatcttttgtttctgattgaaaaaaaaataaaaattgcaatctgaatttttttatgaccccaccaatcatcattgatcccatattgcctattgggcaaacatagaggaattgagtccggttttgaggggatttgtatatcctttaagtagcctatgcctttgtgtatagttctccttgtgtagtggaggtgtttagtcttattttgattagtatcatgtattttgtgggggaggacctctcatccttcccttgtaccttttctataattaataaatcttttgtttctgattgaaaaaaaaaaaaaaaattgcaatctgaatttttttcatgaccccaccaatcatcattgatcccatattgcctattgggcaaacatagaaaattatgattcagactaccatttggggggttgtccaaacatctgtgctgatctgtgttgtttattctctatgttgatttgtcctgcatgtgtaatttcagagctatgttgttgagttgactgttattgttcacaattttgtaaattttcaatgctctctgttaaatgcaggttcatagtattggctgaatcaactgtgaataaattatatagatccttaaacttctttgtgattactgtgcagattgtccagatggactatttcatcagtgttatcaacgctaaataaaatttccagaattttggtctactctttatgtgcactaactatccatcccactttttattttgtgaatgagtggagtctttctcatctctacaacaccatactaactaatcaaattgcttgttaactggtgtatatggtatctattagtggtgcttcctgtcctgttaatgtacagaaacaaacaatggattggatttggaatagaatgaaaaaattttaatttggataatttgttattcgatgatgaatctctctttttttaatttattttttatttataaatagatcttttcctgataagcagcctttttgacaagttccattcatttatattcaggttcaggttttgaatttgatctctactcttattgg

SEQ ID NO: 12695 - DNA, 1295 bp, Vitis vinifera
  Intron number 1 from transcript GSVIVT01030627001 (locus G SVIVG01030627001) derived from phytozome v7.0 (chr-ID chr1 2; pos 7284960 to 7286254 reverse strand)
ccattagccagtgctcaaaaccctttaatttcttggtaagtttcctctgatctgatctgggtttcgtagatccattcatttatctctctctttcgatcacttgtttaatttttggtatttttctctttcaattgtctgtaatagatttctttctgcattcctttcacaatgccactgggttgtttatcctttgtgtatacatttgtgttgtaggactttttttttttttggtagatcccctctttttatggagttggtcattgatgggtgtttttggttttgaggattttgatggggtttgagattttgggtctttagtattaatctagggtctaaaacaatattatagagatttcttcaagcaaaggcgaaatcttcattatttttcactggaaaggagatggtgtgataatatttctttaggatttatgtgggaaatatgcggtaggatgcaattaatggttgcagtaagtctaccatgggagttaaactgtaaacgcaaatgagtttgcaagtgaagaattgagaatgttttaaggaataacaagagggagagaaaccacaaggttggccatataatgttgtttgatgatttgggctcgagtgaaagtatccttcacgtgggcatttaattttgcttgttgacttgtaagaaaattctaatcatagtgccaaactgaataaacctttaaggatacaaattgggtttggctgtgcaaatctctcctggtgatatactcaacatggcctgtagagacaaatttgaaacagcccttcttggttgctgcctgggttggtgtagaatgggaatggttgacctggatttgttgggtcatcttattagtgtttttgtgcatttagttgagaaaatgagaaccaattgaaggttagtttgatcattggttgatgtctcaggcaatccaatctatgtcaacaaaccaggtcatccatggaactgttcagggctggttgatggattgaattagactgtgtggtccagcaagataaaaagttacgaagaaaatttgtgatagcatctctgataaagagaatatttatgcagtatcaaaacattataaactgcaaagatgatgtaatataagtaatcttgataaaaggaatacactactttgctaatacaattaagtagaataaaggatctaaacaatgtatcttgctccattttgtttttcaatatcaaggcaaatacagttgctctgaggtacctttttatattctctgtaatttctcttgttgcaggttataagtattggcttaattggctaattgattta

SEQ ID NO: 12696 - DNA, 6585 bp, Vitis vinifera
  Intron number 1 from transcript GSVIVT01008691001 (locus G SVIVG01008691001) derived from phytozome v7.0 (chr-ID chr1 8; pos 1239521 to 1246105 reverse strand)
tggtaaccatccttttcaattctctttgaatctcccaaaaccctaattttttttttttggggttcatctgcttggtatattggattgttcgatcacgcggttagaataaagccgcggtggatctgatatttaattgttgattcgcgctgtttgtcattccggatctgtgtcgtttgatataatatgtaatgttgttgattgatgattattatttgtctaaggaatgattggaagaaagagtgagattttagcatcggagaacacttacatgagtttgtgatcttcattgggagggttgaaatacaagtttgtgctttagcatctaggttttttggaattgaagcataaattgcggtacattcccacctaggtgtctgatgataggatatgcccaaattctttctaatctataaccattcaattgaatttctgcattcattttagaaattcatgaattatagttgaatttatactgaccaatatacgttgagtagcgtgataggaaacttccttattattcttcatttccaatttccaatggcatcaaacagtagcataatagggcagcattctctagtttcatgaaagaaataagtttctacagtatcttgatatttacatatctattttcagaggttatttagtgccatggtttgaaactcagctggtttctccacttcagggttaatgggaatgcaaattgggatacatgtgttattcttctgatctttattctgttcaattttaagtattcaattgaatttcttcttgcaaagatatctttgtgaaggctttttgaagtttgtgttggaagcaaagttattgtttgtgagggtctgaccagagcctgaaacaaggagtttggtccctggaactacttcaatgaaaatcttgcttccatttgcttacacttttgtttctaatttttttgttttcaaatcagatttctttttttttcaaaaaaaaagaaacatcgagtaatgtatttttacttttgttttcaaaacttaataagaaaattttaaaaattgaaggtgtgaaatttttgctattctcaaactttttaaacatattttagaaatgagtgaagcatgtctcattagtcttgatagaaagagctagaaggatagatcattgcacccttcttcacttccattgcagctgaagctcgccaattttgtgtgctttctagtaaccatgatctcaaatacacacacaagatattctgcaacatgcatgaacctaaattcttttcttggaacaccagcatctaagctttttctaagagcaatgaaccattggatgccttatttggatcaattcaaatgtctgcaatggctttttggggcctaattgctttacattttcttctttctttaatgcctactttcaaacagagagccttgagcaggagaagcaaattcacaggtagctgatgttttggattgggtagcaataagtttattgttagcagtcttgttaggatgctctctctctttcctatgttcattgatattttttttgataagtaagcacataatatattgaaaagaggccaaaaagccacacgcatacagggagtatacaatctagctaaagcctcaaaaacacagagaaaaacaagaaacaacaaaaaacccaccagcccttatgtggcggctatccactccagggatcctataagagacaacgacctctctccactatacattctcgcccatccccataaaatacagacaaaagaattttttaatttctggatatctaacaccccccccctaaaagcaagcctatttctttccttccaaagggtccaaaagatgtacaacggtataaacttccatatctttttcctttttttccctacaaaagggcccctccagcttaataggacctcctttacagtttctggaaagacccacttaacaccaaccaaagcacatatcatatcccacaggactcttgccactatacaatgtatgagtatgtgatttacagtttcctcttcacatccacacaagaaacaccgattagggagatgtcaccctcttttctggagcctatcaagcgtaagcaccttgccccaagtagcttcccaagcaaaaaacaagatttttgtttgaactttatccacccaaatgttgttcttcggaaagttgttggccacagaatttaccaccaagttataggcttctttaactttaaactttccgtttctcccccctttccaaaaaacagcatcctcttctaaagtaggattgaaccccctcaatgtatgaagcaaattccctaccaaatccagctcccaatcattaaagcccctcacgaatcttacatcccaatcaccttggcccacattctggtcccacatatctgctactgtaccattcctatgagcagccatcccatagaggtgaggaaacctttgggacagcactgtacatctgcaccaaagatcattccaaaatctgattctggtgccattccccataataaaagccaaattctcccaacaccaatctttttccttcataatttccttccaaacccctactccaaaagtcccattagcctttttggtcatccaaccaaatccctcttgcccatatttcgccacaagcacttgtttccacaaattttccttttcacaagcaaacctccaaatccatttccccaacaaagatttatttaatgggattaatttccttaagccaagcccccccttttccttctccgtacacacaacctcccaattaacaaggtgcactttcctttctaagtttcctcctccccaaagaaaatccctttgcaatttctctaatcttcgcgcaaccaacttgggcatacggaagagagacatttgatacaaaggtatgctagccatcgtgctcttaatgagaataagtctcccacctttggaaatatattgccgtttccaatgcgctagtcttcttctcatcttctcctccaccccatcccacacggctgtactcttgttaggagcccccaatggcagccccaaatacacagaaggcatagagcccaccttgcagcccaattccgctgccatctcctccatctcttccacctcgccaactgggattatttcacttttctccaaattaatccttaaccctgacgcggcttcaaaccagaacagaatccaacttagataagttagatactccttcctagcttcacaaaaaactatagtatcatccgcaaagagcaggtgggaaacatgcactggctgccttcctcctcctcgaatcctacaccctgacaaaaaacccccttcaacagccctcctgatcagattgctcaacacctccattcccatcacaaagaggtagggagagaggggatctccttgcctcaaccccttagaacttggaaaaaaaccggccgacactccattcaccaacaccgaaaatttggctgtggaaatacaactccacatccatcccagccaccttgaaccgaaccccatctttctcatgactttcatcaaaaactgccaatttaggctgtcgtaggctttctctatgtccagcttacaaatgagacctctctcaccccttttttgccaagcatcaattacttcatttgcaattaaggaggcatcaaggatctgcctccccataacaaaagcattttgatcagtagatactactctccctatcacttttttgagtctattggctaaaaccttggccaatagtttgtacagcccccccaagagactgattggtctgaattccccaagatcctctgcccccccccttcttgggtatcagaaccagaaacgtgctgttcatgctcctgatgaaggcactttgctcatagaactctttaaacatcgccaaaacctcctctttaactatagcccaacatctttgccaaaatgccatagtgaagccatccggtcctggggctttgtccccattcatctccatcagggcactatgaatttcctcctcaaaaaaagggtgctccaagttctctgcctcttgctgatttagttgctctaaatgcagcccttctatgtctgccttccaatttgaattttccgtaagtaactgttgaaaagccttaaccaccccttctctcacatccttctcctcagtcagccacaccccacctatcttaattctgtccatatgattgaatctacaatgagcagccaccatacgatggaagtatcctgtattgttatccccttcccttaaccataactctctggagtgctgcctccaatgagtttcctccaaagatacccacttagcataactgtcctttgcttccttttttgatactgtttcttcctctgatagccttctctcacattccaccctgtcccagtggtccactagctgcagggcagcagctttattgtcttccactctcccaaacacttcccttcctatgttcattgatattgaatcaatcaaacacacatctaacacttttccacttttggaaaatcctgtgttatataatcaaatcttgatttttcatatatagatgtaactagtgtatctccgtctcaaatcatgaacagttgctcctagagcggccaaataaagcttagtcgatcctattactacaaaaccaacttgaacaattagaacatgacctgattttgggtgtggtccatttttgaaggtggtgatgtttgtgatggaatgagagataaggttgggctaaatttgaatgtgcttttgtggaatgtgatgattgatgggcatgttagcgttggggacttttagattgctaggaagttgtttgatgaaatgccacaaagcagtgtggtgtcgtcgaatctggtgacagataggcacactcaagttggtgcctcaaggaggtgttaaaaacattccatgatacgcagatggagggcttttggccaaattatataattttttttccaccaatttcttggcttggagtactcaatttggctaagtggatacatttttatgttgttaaaaactggatggagatcgatgattcccttggttcagcattaattgatatttaatctaattgggagcatttggaaagtgcttttggtgttttagtaagcgactacccacatgttttgtttaactaatatcaatgattttttttttttttttggataggtgtttaactaacatcaatgatgaactatatgattttatggaatgattttttaatatttttggtttctttattttaaatagaaaataacaattaacactgccaatcttgtttcctatttataaaaattgaaaaaaaaaaatgtttttagaaacagtagaaatgaaaatatttccagacaacaccttgcattgttggttatgatttccatgttaacagcatggtgcctcttacgggaatgcctttttcgtacatggaatttgacttggaacctcctactgccaccctaatctcttacccacctaaatcatgcctcaaagtggtagaaataatgtgttctaaatttatttagtttttttagaaaaaggcttactaaagaaaaaagaatatggtcctcaattctgacatcttggacagcttgatggaaagaagagcaaatatgatggttagtctatgatggggtaaagaggtcactgttttttcatggaaaataagttagcaaaagaggtgccatctatttctctctttatgtttggttgatttcttggaaaactggaaactgcagtctgcaataaatgcatatgaagtgagatgtaccaatggttgtgaatgtattgcttctgtatattgtttggaatttgggagaagatgtaatgatttagtctaaaagaagccattggtttctttctaggggtttctctacccttcctgagtttaagcaatttttgaattgattttgtagtcacctttacctatgcagtttgttttgccttctatgagatcataggctcggtttccttcttttgatcagattttgacagcagtaatatacttggtggaaggtttttcatccttcttttgtacttatgaattttgttgaaatgaaatgaattgtttgtttctgataacacacacacacacacacacacacaaagaaggaaagaaaaataaatgaagaagaagccatacttggtctccttaagtatgtcggcattcaagtccaggatgttagatggggatctcttttgaacttggctattcaataatggctgtcaaatcaagtcagctactagttttgcagaatggaatttgtctgctctgggtttattagagggagaagggatactggaattagtttggcatgctcttagtgattgaggcaggaaatgggaaccataaggatgagaatggactcaatagaactactgttttatagacaacgattggtctgcttcggggagtaactgtgacattaagatagatctcaggcttaatgagaggattttgaatgttgaacccaggcctttcctatccggtagtggatgaatgttctactttgtttcaatgcttccagccatgcaacatttgtaaatatagatatcaagtggctggttgacttattgtaagttgtttgttgaaatttgatgtttcaggttttgggtc

SEQ ID NO: 12697 - DNA, 1234 bp, Vitis vinifera
  Intron number 4 from transcript GSVIVT01005681001 (locus G SVIVG01005681001) derived from phytozome v7.0 (chr-ID chrU n; pos 21220943 to 21222176)
cggccttgacaatcctgcagatattgatcttgtcagtttctgaacctttcttttctttttgcatgtggttgatgctgctcatactgaagctacaaaagggaacttatgaggctgtgatatttttcttgtcttcttattgtgtctctgtttggtgacaatgctggtatttgaattttagctctcaattaaagcatctcctttttctatgtaatcctcttgttagcataccatgttcaattgaaagaggtatatatagacacacactaatacgataagtgcataaatgcttgcaataaatccgaaaagaaggaaaaaaaaccaaagtcagtccacaaccaacagtcagaaattaatatgtgatgtcatataaacaacaattgtataattctaagaacctattctgtttatctcaaacgtctaagctcttggtggacaaataaaaggctaagaaacaagctcaagataagcattcctcctgaacatgcaaatcaagtttcacactaaatcaaatgccagcatggttgatctacatgcaaaaatagcaaaactgtcttttgttatttatgggttaataactagtgcacaaaaggcaggcaatctaaccatgtaaatgatcctccaaagatcccaatggcataaagtcatagacaagcagacgttggtccccatcagcgcaataaccaatcaagttaacaaggtttgggtgatgtaagcatgagaacctccaccaagaattctctatttccttgaaggccatttcggtcaagttgtttcacatcaactacctgcaaatacaataattcattggaccaaaaatcattaatgaccagataagacacagtgaccagtgtctaccggtcgagtccacaggacaaccggttgaaggtaaccggtcgaccggtttctctataataaattatggtgagataagcatagcattggttatggttttgcaactaatcaagatatatatacaaacagatgtacaaagtatctcgtcgtagtttattatttattaactagcaataactctagttatgtaatttatcagcatcttgtttacattttttcaaggcagtagctcaagtaaaatgcacataacaaaaaatatcatgagtagttgggtattagtttttgtttaagatatttggattccagaaaggaaaaaaaaatctatatatggagtcaaagcaatagtacaacaaatccacatataataatttcatagaagaaa

SEQ ID NO: 12698 - DNA, 16917 bp, Vitis vinifera
  Intron number 15 from transcript GSVIVT01020355001 (locus GSVIVG01020355001) derived from phytozome v7.0 (chr-ID chr 19; pos 20725685 to 20742601 reverse strand)
acatctaccaaggtccataccctattcaagtgaaggttattttcatactgtttcttactgcaaatgaattatcctttttattagtgtattaactttcctgtactaaagaaatgtctcttgtttcccattgtcaatacttaaaaagcagtcactttttatgttgccactcaaaaagcctctttaataaagtttaccagaagttcacatggtttgtagctgttctttttatactttgtatggctagttaggacactgcatttgcatacaataccaaagttcctaaaatagggtgataattcttatattatttaggatagtttgcaactttaaagtattgtgagtgtcacttgttgtaaagaatggtatatttttttttttttagctttcttttagataatgattgtcatgtactatttcacaatgcaatgtcactataggttttattgttaacttccagtggtagattaataatggcaataaggagaaatgaacataattcaattctcacgttgagtatcacttgttgtaaagaatgttatatcaccactgcaatagtgacgtgataaaagactgttaacagtttccggctgcaccatgacttcattcaaacttttgcaattattgtctgcggggatgaacatatgtgggggcatgacaaaaataaaaatcttatttgaaaactgttcttgaaaacattttttgttcttaaaaacagttttcttttctttaaaacaaaataccattttctaattttttttataggttttaaaaacagttttctaacttggaaaacacatttggcaaacttctaatagaaaacagttttttgataatttattctgaaaataagttattttttagaaaaaaatttaattgctatttgttattttttgtacagtgttaaaagtaacaattaaaaatatggataatactttaaaaacttttccattgtatgtaagtgtgtagtaccttcatgaaaaataagttgagaaaattgtttttcatattagaggtttcaaacaaaattttgttcttgaaaataattgagaaccttttttaagaagagttttcaaaaatattcccaaaagaaacctaaaatatttaagaacttaaattttgatgtcttcaaaatttgtatatggccccttcaaaagtttgagaatcagtcattttcttgttactaactcgagaaactttcatttgtaattaggggcggcaatgaatcatgttggatttgtatcatgttggggtaaaatatactaaaaatttacatgacttgagaacaatccattaatccacatggataacacgataatatgacccatgtaatccctttaataaatgggttggatcgcgttataaacaaattgacatagataaccattgacatgattctaacccattaaaatcattcacatggattataacctattttatctatttaacaattttaaatctataaaatattattttaaaatatttttggtttttttaagttttaattttaaattttttaagtcttattaatttctttatttaattttgtatttgtaatatgtttataagagagaagataaactacactttcaattaagacttgtttataattttgtaattgtcttaattataaaaattttattttaattggtttagttagtttagtgcttatttggatacatgttcaacttttttttttttttaaataaaaaaaatgatagcaactctcatataaaatgtaaaaaaaactgtctgagacttatcttaataatgacttctaaaaactatttaaaaagaataaggtattatatatgagttgctatcattttctattttgaaaaacagaaaacaagaaatgtattcaaacaataccttagttatttaaaatttttaaatcatatgatatttataattattagtaaagaatttataaattttataatctattataaaaataataaatttacatgggttaaaagagtcataaatgggtttggttcataattgtgtcatcattttggaatgattaaatgaatgggttaaacgggttagataggtcgaaaaatcaaacttgaacacaacctttctattgaatggttatatcctttgatactgttatgacacagatacaattatgtttgatgaaaacctgaaaaaattcatgtcattttttgagttatgttctaggttgtttcgaacatgtcatcccctatttgtaatctttgtagttaagatgtactatcataattgctcccatgttaaaacgccttgttgaatataatgtatttatagtgtataatctttccttgttaatataggtcacatgtatggtagttaggactcctagccttctatatatatatttctcaattgtaagtagattttacataaatgagaattaaggtttttcttctttctctctctctcaacatggtatcagagccaagggagaaaacctaattctttccagtttcccgtgtcatcaactccgggaaaccttccggtgaccgtgtttcattccggtcaccttccccatctcccaatactttctggttagtcggatcatcgtcagaaaacactcaccgccggcaaacttttccggagaacttttctggcgaacttttccggcgatgtctttttccgacaccgaccataccagaaggagcgcctggaggagatctccaacttttgtgaaggcaccggaaccaaaagatcatccacgtgccggccacacgcaatttttcgtccggtgactgaatctcatgcgccagcgcgtgagggcgcgtgaggactttcccggccacacgcctcttcctccagcctcgcctgatgctgactagcctttcttcatccctggttctgccattcgagccctgcacgtacctcttttggggttttttgcctctgccgaccctccaaacagtttttccggcgagcttcggctactttttctccatcctaatccctgcacgtgcctaaggaagtgttcttctacctttccggtggtgccacgccatgatctgaagccgtctctctttccagtggtgccacaccgcgatctacagccgtattagggctctcttcgatccaaatatacttcattctctagataagtagatatggctactaaaacttccattttttcctctgttatatctggatctcctatgattacttcggagaaattggttggcagtgacaattatctttcctggtctgcctctgttgaactttggtttatgggtcaaggatatgaggatcacttgattacacaggaggcagatatcgctaaggttgaccgcgtacagtggaggaagatagatgcacagttatgtagtgtattatggcaatcggttgatcccaagattcttcttcatcttcgggcctacaaaacttgttttaaattttggactcaggccaaaggattatttttttttataggaaacgacaacggaatatattgataaaaagaaggtacaattagaaggatgagaaatcctcccaccaaagaaaaataagactacaagtaatcaaatataagaaatacaacgagagaataagcaaacggtctatttacacaccgctaaccaatcaagttgtaacacgttaagaggtatccccttaaaaaccttagaacaaaaagcccatagagaagccaaaaaacgaatagaatcccaaagataccctgaattccttgctttatcctaaaaaatccttgcatttctttcccgccacaccacccacattaacgcgatgcacgcatcttgccataaaacaacccctctcttagaagatccgaaaccattaaaattagtaaaaaaacatgtcagagatgctccttggggaaacccaatccatctttgctaactgaaataatctgtgccacaaccccttggtcaaagagcaatggaggaaaaggtgatctactgtttctccaatgcttcatgcacaacgtacatatgtcgggactaagtgctttgtggggtcttctcaattgtagcaagtcattagtattaaccttcttgtgcgccaccaaccagacaaaggacttgactttgaaagggacttgagaattccagacaaacttagtagggaacactggaggcgactcggaatattgggataaggccagaaagaaagatttgaccgtgaaaagacctgaaggagataaggaccaggatctcttatctggaatcgaaggagatatgtgtagacgatcaagagaccgcataaggctttctaaatcttctatctcagaatcagtaagatttcggcgaaaattgaaattccaagagaaaggacgggaatatctgagaattgatgaaataggagcatttttatctgtgactacgctaagtaatcttggatattggattcccaaaggttgatccccccaccacaagtcatcccaaaaccgaattctatccccgtcccctaccacaaaccgagtaaacttggaaaactcttggaagactagtgcaatggccttccaaggacaacgatgagaccatctaacaatattgttgacatcccaaccattggagtgtgatccataaatgcttaagataacctgatgccacagagctgaaccctccctaggatatctccacaaccacttccctaagagagcgacattcctcatagaaatctttccaaaacccaaaccccctctcgacttcggcttgcacacaacgtcccaattaaccaaatggtctcttttgccttcccttacgcctgaccataaaaattctctttacattctctcaatttttgctgccactgaggcgggaatcttaaatagggagagaaagtaacatggcatatgggtgagacaagattgaatgagggttatcctacctccaaaagataaatacgccttctgccacccatctaatcttcttgatatcctctcaatcacaggatcccaaaagccactcgccttaggattccctcccagaggaaggcctaggtaaagtataggccacccagaagctttgtagtcaagcatctcggccagcctagaaaggcgattctgttcaagattaatgccatagatgttgcttttgtcaagattaactttcaaaccggaaatatgcccaaacactagcagaacattcttaagcgtcatcatatcctcttctcgagtactggaaaagaaaatggtatcatctgcaaattgtaaatgggatacccttgttctgttcctacccaccctgaagccctccaagacgtttctctcctcagctttcaataacatcctactcaatacatctggcactatagtgaacaaaaaaggtgataaagggttgccttgtcttaaacctctagatgccttaacccaccctttcgcattaccgttcactaggactgcataagaaaccgaggacaagcaacctctcatccatttcctccatctaagactaaaccctttcatctccaacacatgatccaaaaaatcccaactcacatggtcataggccttttcaaagtcaattttgaatacaactccttcctcccctgttcttcttttctcatccactatctcgttggctatgagaactgcatccaaaatttgtctcccttgcacgaaggctccttgagtggaatgaatggtctcgtgaagtacccctcttagacgccctgctaacactttggctattatcttgtagagactagtgatcaagctaataggtctaaagtctgagattctccttgacatgcttttcttgggtaacaaaactataaaggaagcgttggtgctctaattgataaatccgctcctatggaattctgcaaacactctcactagatcctcctttatcacttcccaacaatcttgaaacattgcaatggtaaagccatccggcccaggagccttatccctatccatctgaaaaatgaccttataaatctcttcttcagtaaagggggattccaacctagacgcactcttaccagaaataggggaccaatctaagccttccactctccacgattctccagaaggactcgcgtaaagcttttcgaaataccttaagatctccttttttatactctctggattattcaacattaggccactttcattctccaactccttgataaatttcctatttcgcttgccattggccaccttatgaaaaaattttgagttgcaatccccttcttttacccatttcaccctagctttttgtctccaatgtatttcttctctcaaaatcaactcctctagctccccttttcttaaagctctttggactaaaagttcatgggatagtcccccttcttgctccaaggaatcaaagttagctaaaacagataatatatcttttttctttttacttagctctccaaaagaagtcttattccactctttcaatttggctttaacgaactgtaatttcctcatgaacttgtgcccttcccacccatttccttgaaactctctccaccatcttccaaaattctccttaaaactaggatgttgcaaccacatattctcaaacttgaatggcgttggtccccacttgaatggattggtttccaaaacaatcggccaatgatccgaagtccatcttggcagtactccttgaagactttgacgaaatacttgttcccactcatttgagtacaagaagcgatctaatctcttgcatactggattctcttgcatgtttgaccaagtatatgatgcgctccttaaaggtgaatctatcaattcgcaatctcttatgaagtcatcaaaatccttcatgcttggggttaatctagaacctcccaatttctctgaacttctccttataacattaaagtcgccgcccacacaccaacgcggatgagagagcctaacaatgtctgaaagctccacccaaaaatccttcctgagagttgagttgtttgggccataaactgcagatagccacaaagattcgcgtccgtccatcgcgaacttgattgagaccgaaaaagagcctaacactacctcctccctatgcaactttttagagtcccatatgatcaaaatcccacctgaagccccgctcgccggaagggctgcccaatccttatttctggctgaccaaacactacccacgaaccttctgtcatactcctcctttttagtttcttgaatcatcactacatccggcttttctgatctcagaaaatccttaaccacccttctctttttcttataacccaaacccttggtattccaactgattatcttcatgtgaaactctctgaccctaatcccgaaccaaatccaattggtctcacaatcctgtagagcatctgctcttcctcctggaatataccttgatatccagagactttaaaacctcacgtacttttgccattttcctaggggatagggattatacacgaatgatatccagcgtctttataaggtggcttctgctattgtccatataagccaacaggacttggatctatcgacttatattggccagattgcctctcttaaggaggagttcttgactatgatgcctcttactcctgatgttggggctcaacaaacacagcttgataagttcttcatggtccttactcttattggcctccgtccggatcttgagcctgtccgcgatcaaattcttggtagttcatcagttccgtccttggataatgtgtttgctcgcctccttcgtatctcgtccactcagactttgccatctgatagcatttcagattcttctgtgttagtttctcacaatacctctcgaggtggacgcagtggtaaccgaggtagaggccaacgtcctcattgcacctattgcaataaactttgccacactcgcaatcgttgctatcagttacatggatggcctcctcgcactgcccatgtgacccagtcctctgattctcagctgcctcagcctccgagctccttcgcatctcaagcatctcaggcttctgttgcctctgttgcccagcctggtaatgcttctgcctgccttacccacacatcttctcttggaccctggattctagattctggagcttctgatcacctatctggtaataaagatcttttctcctctattactactacctctgctttacctactgttaccttagctaatggttctcaaactgtagctaaaggtattggtttggcccttcctctgccttctctacctctcacttctgtcctttatactcctgaatgtccttttaatcttatttccatcagcaaaatcactcgtactcttaattgctctattaccttttctgataaatttgtgaccttgcaggaccggagtacggggaagacgtttggcataggacgtgagtctcaaggcctctatcacctcacctcggattcatctcctgcagtttgcatttccattgatgctcctctcctcattcatagttgtttgggccctgctagtctctctaagttctagaagatggtccctcatttttccactttgtcgttgctttcgtgtgagtcatgtcagcttgggaaacatactcgtgtctcgttcccaaagcgcttgaataatcgggcaaagtctccttttgagcttgtccacactgatgtttggggtccttgtcggattgcgtctactttaggatttcagtattttgtcactttcattgatgactattctcgatgtacttggttatttttaatgaaaaatcgagctgagttattctctattttctagatattttatgctgaaatccaaacccagttcaatatttctattcgtgtgttacgcagtgacaatgccagggaatatttttcagccccatttacttcgtttatgtctcatcatgggattcttcatcagtcttcttgtgctcatactcctcaacaaaatggggtagctgaacgcaagaatcgacatcttgttgagacaactcgtactatcctcctccatagtaatgttccttttcgtttttggggggacgttgttcttaccgcttgttatttgattaatcgtatgccctcctctgttttacacgatcagattcctcactcccttctcttccctgaccaaccactttatttccttcctcctcgtgtctttggttgtacttgctttgtttatattctcactcctggacaggacaagctttccgccaaagccatgaagtgcctcttcttgggatattccagacttcagaagggttatcgttgttattcccttgagactcatcaatactttatctccgctgatgtcaccttctttgaggactcaccattcttttccaccacttctgagtctcttcctgtttttgaagtcttgcccattcccattgtctccccacctaatgttatgcctcctcgaccacttcaggtttatcatcgtcgccctcgtgtcgttgctcctctcccttttgctgaggcacctgctgactcacttcctatcccttcagcttcacctgccccggctctgccttctcctaatgacttacccattgttgttgggaaaggtactcgctctagtcgtaatcctcatcctatttacaattttttgagttatcatcgattatcttcaccctattctgcttttgtttctgctatatcctctgtttctcttccaaagagcacccatgaagctctttcccatccaggctggcgacaggcaatggtggatgaaatgactgctctgcactctaatggcacttgggatcttgttgttttaccctctggtaaatctaccgttggctgtcgttgggtctacgcagttaaggttggtcctgatggtcaggttgatcgccttaaggcccgcttagttgctaaaggctatactcaggtttaaggttctgattatggtgacacattctcccctgttgccaagattgcttctgttcgtctgcttctctccatggctgctatgtgttcttggcctctttatcagttggatattaaaaatgtcttccttcatggtgatcttgccgaggaagtttatatagaacaacctcctggttttgttgctcagggggagtctggtttagtgtgcaggttacgccgttctctatatggcctgaaacaatctcctcgagcatggtttgaccgttttagttctgttgttcaagagtttggcatgctttgcagtacagcaaaccattcatttttctatcatcataactccttggggcagtgtatttatctggttgtttatgtggacgacatcgtcattacaggcagtgatcaggatggtattcagaaactaaaacaacatctttttacccacttttagaccaaagacttggggaaacttaagtatttcttgggaattgagatagctcaatccagttctggtgtggtcctttcccaaaggaagtatgctttaaacatcctggaagaaatcggtatgttagactgtaaaccggtagacacacctatggatccaaatgtcaaacttgtaccaggacagggagagcctttaggagacccttggagatatcgacggctcgtaggtaaattgaactatctcaccattactcgtccagacatttcttttcctgtgagtgttgttagtcaattcctacagtcaccatgtgatagccattgggatgccgtaatccgcattcttcgatatatcaaaagtacaccaggccaaggtgtgttgtacgagaacagaggtcatactcaggttgttggttacacagatgcaaattgggctggctcactcacagatagacgttccacttcagggtactgtgtttttattggaggtaatctaatatcttggaagagtaagaaacaagatgtagtggccagatctagcgctgaagccgagtatcgagctatgactttggcaacatgtgaactcatatggttgagacatcttcttcgagagttgagatttggaaatgatgaacagatgaaactcatttgtgataaccaggccgcattacatattgcatccaatccagtctttcatgaaaggaccgagcatattgaagttgactgtcatttcattagagagaagatcgcatcaggatgtgttgctacaagttttgttaattcaaatgatcaactagcagacatcttcactaaatctctcagagatcctaggattaaatatatttgtaacaagcttggtgcatatgacgtatatgctccagcttgagggggagtgttgaatataatgtatttatagtgtataatctttccttgttaatataggtcacatgtatgatagttaggactcctagccttgtatatatatatttctcaattgtaagtagactttacataaatgagaattaaggtttttcttctttctctctctctcaacacaccttaatagcttctaaaaaaaaaaaaaaaaaaaaagagggagaccataaaccctaaatgcctttgacacatggagaagaaaaaataatctgaggaagattcaaaaaggcaaatactctttttggtttcaaacacaccagatactctctcttctaatgaccccttccttttcaacacctttatttttttccaagtgttttaattcttattgaaatatccaaatttatttattcttttaagaaataaaagcacttggtttagtataaagattctgagtgatgaaatgataggattactagatcttttttgcattggaattctattaaagaaaatttgttgttattaaaatgtttgaaaagtgagtttataacttggcaagaataaaatagtattggtgttttgagattgctcatagactgaaattttgataattttaaaaattaagaaattttgagaagaaaatttctataatttcagatttctctatttttttttctttttttaagatcaaagtccttataatttcatttttctgttacgcttagatgctttaaaatatttggaatttagaattttgatctatatgatttggcattattaccatgtggttgattatttagtttcagatatcatgtggggcatgtgtgtgatttttattttttatttttaaattgaacttttggtgttaagaatttgaaaggatgcattacatgacaacgaattgtaagtttgtaactaagcacttgattagttactttgaggtatgatgcagtgtatgagatggctaagctgtttttaagccattatttgcaaccttggatgcttgaaatctacctagaattaaaatggatggcccaaaagtcaattgtgcaaggtggtgccaccacgtagagttgtttgttttaagtcttttatttaaatcaaacccaggatttgaacatcttgataggtgggatctatttattttagggaaaaacttatagttaattattattagcattcataattagtctttgccagacccacaaaatggtttccccaccatagcattttacttatcctggctactttctattttttatctttattttcctttatattggttgttagattagataaaatatagtttaaatgaactatatcattgaagtaagcttttactatctctctccaacttccaacgtcaggaggtattggagttggttaattaggatttttaagttttctatcgtgctttctagaagtgcgaagaacaactggtatggattgtatgattaatttaaaatggattacatatgttgtcctgtagagaatttttttttttaatttttatttatcagaaacgaagaaaaatatattaaaaaaagaaaagatacaagagaaagaagacatataagagaaagagaagaaacaagagaagggtgagaggtccttcccacaaaaacaaaaattgaacgaaagagaaaacactcaactttagaaaactaaatacaaagaaaaaccccaacactctcaaacttttgaaacgcaaaccgcagtccagttgagttgtaaagcactaagaggaactccgctaaaagctacagtataagtggcccaaagagaggaatagaaaagaagcaagtcccataacatctctttcgttcttcccttatcttaaaaaatcctattgtttctctcttgtcacaccatccataacaaagtaaggcaagcgatttttgaaagtgtcttgcctcttaatgaattccccaaacctttaaaagcaataaccatcatgtccacaatactccttggagggacccaagccaaccttactagattgaacagcttgtgccagagtctaatggtaacaggacaatgaagaaaaaggtggtcgatcgattctccatttcctttgcaaagaatgcactattgaggacagagggatttgtagggtcttctcaattgcaacttgtcattggtgtttgccttcccatgtactactaaccaagcaagggccttaacctttgagggggcttttgaactccacaaaaacttggccagaaggaacaagataggatttgagacttttgacaaggccaagaaaaaagatttcactgaaaacaagcctgatgatgacaaagaccaagctcttgaatctgccaaagaaggagagaaaaacactgaactaagggaggacgtgattctctgaagtagatcaatttctgtattagtaagattacgacgaaaattaaaattccaagacagtggaaatgaattgccaaggacatttgagacagtgaggtttttcacataaataactctataaagaccagcaaattgagagcacacagtttggttactccaccaaagatcttcccaaaaccggattctctccccattccccaccactagacggacaaaatgggagaaatcctagaaaacttgagcaagagccttccaaggacatctgtgtgaccatctaaccaccatgttggcgtcccatccattaggatgtgtccgataaatacttgcaataaccttatgccaaagaccattcctttctctagggaacctccaaagccattttcctaagagagcaatatttctcaaagaagtcttcccgaaaccccaacctcccaactcttttggcctacaaacaacatcctatttggtaagatgatctttcttcccttcccccgccttagaccaaagaaaatccctttgcagcttctcaatctttgaggctattgatactgggattttgaagagagagaggaagtagctagggatgtaagacagacttgactgaattaaagtaatcctccctcccaaagacaaaaaggccttttcccaaccatccagcctcctcgaaattttatcttgaagaattcaaaggacagaaagatttctttgagattttaattgcaaccttgaacttaatgtacgttatcatctaaatttgcaaaatatttctgcattttaaattatgcttaggataaatagaaatagaaaaattcatggttatacattctaattcatagatcaattcatctttggttgtctcttctagtttgtgttcgcaatttacacacaagatatttgatcctactttttcagttctgcttgtagatatcaatatcatgtttggctagatgcatgacttttttctcacttatatatcatacttagctaggtgaaaaggttgaaattattacatcggctctttttatctctcctttgttgtataaaaaaggcaagggagtgatcctgcttttgtctagaattttggtgtgggcaagaaggcgccctatggaaataaaaattctaaggttgaggtagttaagagatcctaactaattttaggaagatgccatgcccaagaaaattaaaattcccaacttatgtgctccctggtcaggatcatcttataatgaaatgcctattacctatttaaaatatccacaaaacaaagtctccattaggggtagtactaccccttttgacttcgaagctcttggtcttgtttttgtttttccttgctttatgataggtatccaccaatattttttttttgataggaaacaacaaagaaatatattgatagaaataagaagtacaaaagaatgatgaggaatcctcccaccaaagaaaaactaaacaacaagaagctaaaatgtaaaaacaacgaatcgatctctcttggctagaccatcccgttggagctacacactgctagccaatctagttgtaacacattaaggggaatgcccttaaaaaccatggaacaaaaagcccaaagagaagcaagaaagtgaatgaaatcccatagattctctaaattcctaacttaatcctcaaatatcctagcctttctttcccgccacacaacccaaattaaagcaatgcacgtggtttgccacaaaactatccctcccttggatattccaaaacctttataattgatgaaaatcatgtcggaaatgcttcttgggggaacctaatccatcttggctaactgaaataatttgtgtcacaactccgtcgtcaaagaataatgtaggaaaagatgatatgctgattctccatgcttcatacacaacttacaaatgtcaggactaacaactttatagagtcttctcaattgtagtaagtcactagtatttaccttcttgtatgccactaactagacaaatgacttgactttaaaagagacttgggaattccatacaaacttagtagggaaacttggagataaatcggaaaggtgggacaaggttagaaaaaaagacttgactgtaaataaccctgaagaagataaagaccaggatctcacatctgaaaccgatagggataaatgcaaacaataaagtgaacgcatgagactttctaaatcttctatctcagaatcggaaaggttatgacgtaaattaaagttccaagagaaggagcgagcagaaccgagaattgaagatataggaatatttttatccgtgactactctaaatggtcttggatattggaatcccaaaggttggtccccctaccacaagtcttcccaaaaaagaattctttccccatctcctaccacaaaccgagtatacttggaaaaatcctgaaagacttgtgcaatagtcttcgaaggacaacgatgtgaccatctgactgtagtgttgacatcccaaccattagaatgtgtcccataaatgcttagaataacctgatgccatagagttgaagtcaggtatccaccaatatgcttatcctcttttgcaaggtttgaaggctttgccatccttcttcttgtgattccattaataatttttatacatgtatcactgtgcatgttgaacatataaataactgtcagatttcacttgggactcttactcgtatccttgatatttatgatgtaaggaaacaaacaataacagataaaagaaaaagttcaacactgatgaataaaatgacattaaatatatgtgcacttgtatgcataataaaatagtatgaacttagttttctgaacactctaagataggatcccttctatttttaattgcttgattccttaccctgtaggatgccatatatttaatttatggtcacttctttgtctaattttcttcattcatttgcagtttatgttttcagtgcctttacttggtcaagaataaattttgaactgagtctgtttttctcttcctagttatgcatgctttgtctttagcttttattttactttcattgcacctttttaaacttatgtattcttttcacatttttcctttctgggaattgtcactggtataattattgacttcagaaatgagatttagagtataataattggggcattttcctttagttagaggctttgacgatttatttttatttttatttttgtaccagcatagttcttgtgcttctgctttaattttgtggtggctctccttgcaagttcctttactctgtaacatgttccttgtcaaaaaaaattgaggaaaagaaaataagttgtagacataaattctcacttttgttaactataagaataggacagaaattacatattatatgctttgagcattgtatgtaacatttttcactatttctaaattgtaggccgcgaaagaagactctcaactacatcttttcgt

SEQ ID NO: 12699 - DNA, 20644 bp, Vitis vinifera
  Intron number 2 from transcript GSVIVT01011680001 (locus G SVIVG01011680001) derived from phytozome v7.0 (chr-ID chr1 ; pos 5171917 to 5192560)
caccaaaaacctgaggattcaaatcgggaacctccgtaagttttgtgtacttaagttgtttctcaattgtgtattgatttttaattgttagggtttatgatttgatttgggtacgttggagggatgatgatagtttttgcgttttttagaatatatataagcaagctgataattagtgaattagtgtctaattgatttgaagtaatggtggtttaattgcctggaatctctaatggtgttagcctctgttgggctcaaattataggctatgatatgaaagccataaagaaattgtcgcataataatggggaggaacactagacatgataagaattccagaagagagggaagagattgaatccattatttaataatgaattaggtgttcaaagcctttttcacttatcaactcttaattctacttgcattttatggttaccactaggctacatatgaagttttggccttttttgtccccttgaaataaagttcaagattaccgcacttaaactaattttctggctcccccttgacctcaagaattaaaagcaatgtaaatcatgctctaagagagtatttattccagtccttatgataaaggtcattgcttgtggaggaggtacctaatgtggaggattaggcttctttgcttggttgtgggtggcaagtttcgaatcacttatttgggtctttcttgaagagccttgtggaaatgctattacctttacaatggtgttaaattcatgctgttaaatagtctagctagcattttttttactttatgtctctcttcattattccaaggatgacatgtttgagactagaggaaagccaaaagggatttttcctttaagagggtgctccacttgagaaaatttttagagaatttgtcaactatctgtttggataaaaagaaaaggaactttggtattagagctttatcttctctcagaataaggctttgcttggaaatgacattgtaggctttttttttttttttttgataggtaaataagagcttgtattagaaacgcctagaagcggtgagaacaatacatacaaagtatacaaacatcgtccaagaaactaggcaaaaagaaagacaaaaaacctttcccctaactagacaaacaaccactctataaaatcaatcatggacaaaagtgtgatcctctaaaatcaatgacatcttaggcttgtaacttaaaggaataactcttatgtaggaaggtgaggtaggaggtgggttgtggagatcaattagaagagtttagagtgagtttcatgataaaaccagattaactattgataatgttgagagttaagttttggcacatggcattgtggcttaaatttaagtgtttattttccctccttatttccatgtctgtacatttgagcagcattggctggagagaagtggtaatacacttgctttgtaatagatttttatgtttgggagttggatagtataaggtgcttaaaaaggtggctctaagagagggtagggtcttaggtaggtgatgataaactggtgtggggatgtgccaaggatagaagttctctataaagtctttttattattctttatagttagaatgcggtgtagtctttcttgtaaagcaagtttaaggttagtgtgaggtgttattttgacttttgattagtttagaaggagaggatgattttaagcaaattgacatcgcttgtttaggagcaaagaaatgtcaactacttacattctcgtctactatgacaaagttagggttttgtgggattcgttgttctctcttttttgtatcttgtcagttcttaccgctttctaatttggtaagagagatcttattaggatggtgcaagtgttttgcatggaagaattgtaggaaggttaagaggactgctttgttatgattgctttagagtatttggtaagaatgcaactgtgtatcttttaatagtggagcatctatcaatttttttttttgatattggagcacttagattacttgtttgaagactcctttgtttagcctttttccctttgacccagaagtccttaaatgttggttcttggcccttgctagatttcatttattagattagattgtctaagtgggctggggttttgacttttctttttcttttcacttttttgacacctttggtatactccccttatacttaggtgtgtccttgcttcttattagacaattatttcaataaacttcttctttgcctatcaaaaagaaaaacaaattcctcgaataataattttttaaaacatatcaccatgtggaggcaacatgatattggtgcactaccattctttggcaaaagaattgtttttgttgacatgtgaattttcttttatatgaaatgatgattgttgttaaaaacttataatacatgatataatccacaatatgatactttttttttaatggaaaccaagtcatatcacctgtttgtatcttatcttgagtacattttataatacacatatggtatataatatgatatgcaacacaaagctaagatgatacatacatctttaactatttttcatagttgttaagaaaaatcaaattcaatttttttctttaaaaaatattatattaattgtttaaaatgggctttatagttagaaattgatcataaaaggaaaaaaaaaaaaaatagaagtaaaatactcttacaagagacaactacttataacttgttgagggtagacatgaaatgctaaaagttaaagtaaatttgttttttgtaatgaatggatgttatttgagatattcggatgttaatattgaagatgatgatgattggctaatagaaacttttacttaatatattaatttttttatgtgtatatattttttttcaacggggagggaatggtaacaaacatggaaagctagaactttggagatgacacataagaacatacatatcaacgttatataagtatatatgcctcgttagatttggaactaaaaatcgtagctaaaaatcaaaaaatatattttgtggattttgtgatgaacctatgtacatagtttgttgaattgaatttttcaaaactctggtgttcaatattcttatactatgaaccatctttcatgaaattggttatatattactataaacttcatgctttcaatatatatctccatattttatttatttattattctttgtatcaaaaaatttactacacacatcatggaaaaatagcaaaagtttatgatatgatttatgagttaacaactatgaaaataacattttattagataaactatatgcaagaggaaggatgaattatccattaagctaaataaaatataaagaaaaactaacaagaactaaataaagcgtgaatgacatacaccacaatccagtcatggataaactaaggaaaatatgggaggagggtggcgggagaagggaacattgataaaatcaactcaaaagaaggggatggatgatactgaataaatgctatttgtgcaaagaagaagaagaagaataagttgatgacattctctttcactgctcgaaaattgtcactttttgtgatacccaatgtttttagaactagaccaattagcatattggaaaagttactggttcacggtttagtggtcagaccggtggttgaaccatgattgaaccagtgacgtcataaatatataatttatattttattaaaatttaaaataatttaaaaaattgtaaatataaataaaattaaaaatcaataatatttattttttcatcttttatataaatatattaatattttaaagtttattaaataaaacatatataatattacatattgaaaattgaagtgtattatgtcattaattatatatatcttattatcttataagttttaaaaaatagtagatatttgagatgattttattatgttttttacaactcttggcacaaaccaatgagttgcaggttggtgcaaccatgcttaccttaaacctttggtctaaggttcaattccaagggttgtaagctatgcatatataaatgatgattgttttttaaatcagttaggtggtgtttgtttttttacttaattctaaatagaaccttaatacttaatagtattaaatattaggttgtttgtttttgtaatattttatttctattaagtattaaaaagtaaaaaaaatcattgtgttattttttctatttagaaaaagccacatattttggctttttctatttagtaaaaagtttataataagtcatgaaaaagtaaaaaaacaaacaacctaaattctaaaactaaatggttttcagcaaaaagccaaaaaaacaaacaccaccttagacttgtcttgtcccacattggaaaggcaagagcataaaaatgcctttaaaaccctcatttagctgcctgaatcacaactagccattgggccatggagggttgggtcctgaaaggtgcgtgatccattggtaaatgaagcttgtttttgcccagaacaaatttaaaaacccaaagagttagttgaatcgaaccaccttagttttgtccggcttggtagttcaactactggtttgttcggttcaatgccggtccaaagcccattccggttcaaaagctcaattgaaccggaccaaggtttggtcgacagttcggccggttgaactagtcggtttggttcggtttttgaaacattggtaatacttgatttatgttttttttggaatagagtggatgatgcactccttagtgagagatgccattttgagcaggcatggaccttttgctagaaagaagaggaaaaaggcttggagagttgcccctttgtgcttattctagatagtttggggggagacaaataggagagttgataacatcgaaaaagtaggccaagtaatcaaataatcctttatgtataatttttttggagtgtgttagagtgtatataggagattgctccttatccataatggacttgttgagtggttaaactctaagtaacgcatgagcggtgtttcttgtgtatcccattgtcttattttgtccttttagtgcccgtgtgtacacatatatgcttttatgcgctcttttattaggcgctgttaatataattgatctctgcttataaaaaaaacattgataaaatcctctgccctaaaggctccattttgttcattcattagttgcctagttgactgaccttggcttttaagaaaaggataacctaaggttccaaagaggtaaaaagtcatagaaatccatccatcctataaacaatgcctcgtattcggtcttgatgggcaacaatgagaggaactttgttcagtcttgatttatagtcataatgggactaatttttttttattttatagatttccatgtataatggaggagtttgagtcatattctgatcaaaatttttattttgtggggaggatctctcatttttctcttgatctatttatcttgtattcaattgaaagaggaagcacaaaaaatagtgccctcaaagtatgcagggagtatacaaaagcagtccaaaagctcgaaacccctacttagagcctagccaatccaaaaaactaacaagagaagaagagctcaaaactatagacaccctaacccaagaccaaagattacatacaaaagaatatttcagtctatgaagcgaaaacttctcattcccaaaagctaacaagttcctttccttccagactgatcgaaaaatacagaagggggtcatttgccaagccttttaatgagttttcccctcaaaagctccaggccacccaagaagagtttccttcactgaacacgatagaacccaagccataccaaatagggagaaaatgagactccatagaacccgcgtctttacacaatgaagtaaaaggtgatccaccatctctacttcagagaggcatagaaaacacctgttagccatagagtaccccctcctctgaacttgcttcaaagttaatattttaccccaagaagcctcccaagcaaagaaggctaccttaggaggtatattcaccctccaaatactattacaagggaacaaatgagagtctccaggctccaaaatagaatatgacaacttgattgagaaaacaccattctttgaagttgtccaaaccactctatcttcgtcttccctctgcaccctaaaagcttggatcttgagcataaaatgctccaccatctcaatctcccaatcattaaacgcccttgagaaaagaggggtccaaccctccccatcactgtccgggttccaaacatctgacacccaagcatctttagacagggagatggaaaataaagagggcaatgattcacaaagaggcttatctccacaccacttatctttccaaaattttactctctgaccactgcccacttggtaggctagtctactattcagaaacaaccacttatttctgattgctttccaaagcccaacaccatacctcccacttacggcctgagtgcaccaatcccccccttccacaccatatttccgactgataacttgcttccaaaaagcctctctttcattggcatagcgccaattccacttacttaagagaactctattcatcagagctaaatttctcacacccaacccacctttccttttttccaagcaaactaggttccacctaacaaggtgtggcctctgcataagagctcccccaccccacagaaaatccttctgaatcttctctagtctcaacctaagttttctgggcaaataaaagagagacatgaaatttataggcatgttagagagagtgcttcggagtagagtgagtctctctcattttgaaatatatggtctcttccacattgcgagttttttttgaaaccgctcttcaacaccatcccaaaacgcctctgatttgaagggggcctccaaaggcagacccaaataacaagaagggagaccacccactttacaacccaactctaaagccaaatcctctatatcatccaccctccccactgggattaactcgctcttctctaaattgattctcaaccctgaacaagcctcaaaccacataagaagccagcttagataagtcatctggtcctcagactcctcacaaaacaccaaagtatcatccgcaaataacaagtgcgagatcaaaatcccctcaccacttcgacctctcaccctccacccagataaaaaccccccattaataacccttctcaacaaacaactaaacacctccatggctatcacaaacaaataaggggagagggggtctccttgtcttagtcccctcgaactttggaaaaaaccggaaggagagctgtttattaaaacagaaaatttcacagtagaaatgcacaattctatccactttaaccatctctcttcaaagcccatttttttaagcacaaccaacaagaacttccagcttacatgatcgtaagccttctctatatttaacttacacaaccttgctgccacatttgcaatcaaaactgcatctaaaatttgtctaccctccacaaaggcattttgggactccgaaatcactttccccataaccttcttaattctatttgccaacaccttggccaacaacttgtaaaggcttctcataaggctaattgacctgaaatctttcaaatcttctgcacctctcttcttttggactaaaaccaggaaagtagcatttagagactttacaaagctgcccctctcatgaaaatctctaaaaaaacccataagctcaaccttcaccacatcccaacaaaatgtccaaaagccatcaaaaagccattcggactgggggctttgtccttgcctagatatgaaagagctgcaaagacctcttcttccgaaaaaggaatctccagccctttagcctcacttctgtttaaccccatcaaagacaacccttcaatacttggacgccacccctcttcttctaaatagagcttttgaaacgcccccaccacactattttttaaattattctcctctaaatgccaacaaccatctactttcaacttggacaaccaatttcttctactatgaacattcgccatcctatgaaaaaatctggtattattgtccccctccttcagccataattccctagacttctgcctctaggaaatttcttccctcaacacccaagacttataagactctctcgcctctgttcttgcttcacactcttctagatttaaagctgagcatttctcatttttgtcctaaaatacaacctttctgagagcttctccctttttattcttaatgagaccaaacacttctatattccaattcttcaaaatatcttttaaggctctcaattttgcgtctaaaataaaactggaggtccttgtacaatttaaactcccccaccacgtcttcatcttgtctttgaaaccctcttcctccaaccacatgttctcaaatctgaaagagggaaggtcccctagtcaaacctctgccttctagaagaattggaaagtgatcagagactggtctaggaagaactccctgcacagcctcattgaaaagactatcccagttgtttgtcataaaaaacctgtcaagcctagagtgggactggttattcaaaccgtctctccaggtaaaaggaccccccttcaaagggaaatccctcaactccaaatcctctaccacttcagagaatctcctcattgaagcggtcaacctacctcccctacttcgcttctctaaaaatcttaccatattgaagtcccctcccacacaccatgggtcaccctataaaccttttattgatccaagctcctcccaaaactcctctctctccctattgcaaactggcccatacacaccagtgaacacccacttcaatacatccacacaatttttgaaccgacacgaaattgagaattccccttcttccaaatcaaccaactcatccattctgttatcccaaaacaccagaatacctccagttgcacccctagaattgactgctctctagtttagacgtcttcccacccctaggctccgaacaagccctatagtcatttctttaattttagtttcccgcagacaaaccacatccactctttgggattttatgactgacttaatgacctttcttttatctctatcattagcccctctaatattccacggttaaatttttatctttatttgtagcccaatccggaagcccctccaaaaatacccacactagtacccaatttagtttttttttatagcttactgtccactccagcttcttgagttccctattggattttgaagatttcaaaatcgtttttctggttgccctgtcttgcctcttatgatcaatccttcccttcattctcctcaagaggtacaaaatttcctcttcatacccttccgtcggcattccgaggcaccaattgaactttgcaagacacttggagctccacccttcatcctgccccctctcttcccgataaagatcaatcttttcctccaatggactcacataatccaaaccaaccgggacaagtgctagctcagccgcactatcactgcctctcgaaccccaaagtggctctttctagccactgagagttgacaaatcttcagtccgcactactcgcaacgaaatccggtccatcgccccttccactgtcccttccgctccacttgacacccccttccttcgacaccaataaggctttgtcaggccctaaggaaagagtagaagaagaagaaacccaaagccccaaagaaaaagagagtttgggattagcgggatacctagatgcttcctctaacagtgtcgcgtcggtgagcttcagacgaccaggaagcaactcctcggcggtggcacctttgacggcaagaagctcctactccaaccccacggcccccttgtgggttctgtaggagccctaaaagaagaagaaagcttccccgataggctcaagaagggcttattaaaattgggcccatgaggccccaaagagttgtcacccaggcccacctccactagtctgatgggatttgggcctctgtcccattcccttgcaccacttgagcccatgcaaccattttctttaagagcctcccatgcccattcacagttgagaccagctcatttgctctagcctggctaccccctgcggccgttacaactctataccttctgccatactcaacttgcacttctgaccccccaagattgatcaccaatttgaaaatccctctcactaccacaagcgcatgcgccgccccccctttcatccttgtcctccagcccctctttcatatgccaggctgacctcgacactacctgagaaacccaagggggggtttcccaccatagactaaccgcccagctaaaattcccagccattacctgcaatgaacctgacatattcttcccagaggctctgaccaagatacgagcccactgcaactatgaaaagtaagttgtttcctcatcaacaactatgaaccccccacaactctctccaattctcttaaacacatctctactctaaaggtgaagtggaagtcctacaaccttcacccaaacttccttggcatggctcccgctccaaaaacaccccactttaggtccccatttagcaggagaaactctctctccttaaaacgtctgctgccccttaaaagcaccgaatcaacttcatatttattttcaaatttgaacaacacaagggctctacccaacctggaaatttttaaacctctcttaggagaccacctttcaaatgcccactccttcaaagagaacagaggaggaacagactcaaaactgtccctaaaatagccaaccaagcaacgacttagctgctcttcctacaaagcaaatcatggtcctctacatgcacctataaagaatcccttggttcccctgtcttcactctcgcgacttttgcatacacactttttcctttctcattccctttgatactacatccatcctttttagggttggaaggtcccagatcacctttgctcagagttggagtggaaactccaagggcccttaacttctgagccaacaacaaccacccccctactaagcctttttcttttagaaaaacaagacaatatttcttagcttccacgtctcttaccgaacaaagtaaaaacctaccagcttcattagaacgacacttcagtctaaactttcttcctcttttttcccaaacttttagacaccttaagttagactctcctctacaccaagcttccacaccttccaacagatagcttaagcttttttctccaaatcttatccaagaggaaaagcctttgcttctttccacaatagtccctctctgtttacctcggacctcttcaatggagatttcgaatgttttagattccactgcaaaccaacactttccactttgcgaaactcctctgcagtcattgaattcacaactttgcagcttgaaatcactatgggttaacaatatatatcaggccaaattgagatataaccctcaaacaccctgccacatgagcaaccttcttttcttgatctatttatcaatatacaatctatctttgtttctaatccaaaaagaaaaaaaaaaatgcctcatatacatggagacccccatgagataacaataattgaatctactcccatgctaatattactaaggatatatgagtcgttttagtcaaaccttctaaaaatggtaacatttccaccttgattttcaaactgaagccaactagtttggagaaaactctaactgcactattgccatgatgtttgaaaactcctttaatcctcatttggtcttgattgcctagtgcgttctagtggtgaaggaacccacaaagctctaagcaccacttttcttttaatgtccctacgctattttctccatccagtaaaatcattccattgggttttttagaaactttatggtgataagcctgtaaagagtagtgaggtcgtgtactctataacaaatccaaaggcttgcactagttctaaaagccctagtattcctttctaagcaaattgctatacaatgacatgttgcctacattcaacaacaagttgcccatagaataacctttgaaagtaataataatcatgtttgccaaattgataaggaaaggttgagaaatgtttgccaattggaagattctttgccacaaatccttagcagtaaaataaagaaggaaacatgattatttatttattttagttgatttattttattgttttattgttgtgcaagtaaacaacatagcaattggggctactgactttataaggcctcataatttatatggtaagttgtaaaaatgtcctgtgagttttctaacaacaaaaggaacctcctttaaggttttgaacttcttgttgatctattctcaactttatagataattgacatgtcttggtgttgctctccacccaatattttccggtttagggttatttttttattaggcctatgcccttaagaaaaaacctcaatagtgtgttgtgaaaaccctccatatatgactcttccccattcacttcttaggcgatatgggacactatagtccacccccctttgaggcccagtgtcctcacttacacacttctgactggagatcaaactttgataccattctgtcatagcctcactctctacccaatattgtctgattcaaggttgcagtggctcacacacgacccaatagccggtctcagttttgcttctttattgggcatatgcccttaagaaaagacctcaatagtgtggtgtgaaagccttccatatatggctcttctccattcactcctcgggcgacatgggacattacatgacacaagcaaccattcttaaaaacacaattcttgatatctaagtgtcaaaaaatcaaaagtagatttaagtatgatttattgctaaattagaggaaaattaaaagaatataaatttttttataggttactgttgtgtttcaaatttcatttagttcctattttttaggcctagattttctttgtacagttgtttcctttcttgtgtattccatgcactttttttatttttttttatttttatttttatgaataaatagcaataaattaaaaaggaaaaaggcacatcaaggaagcgccccaaagtatacgtattccatgtactctttaaatacttttgtacaccaattatccattattgaatgagagtgacaaattttcttaaatccgtgttcatggttttagagttaggttccctattggagttggctttgcaaaaatagaaaaactatttttgtcattttttctttaggcctttcattgctaggatcagagaaggaagttcttctttggcttgtcgagagttcagctaagcaaaaagggagtggataaaacgcttggagtgattgaaaaagaagtttctgtggagtcaaggccaatgcctcttcaacaacactcttttcagactatcacctatgaaattggcgataattcgacaatttttattttttttgatagataaaaaagagcttggattaggaacgcctagaagaggcgaaaacaatacacatgaagtatataatcaaatgcctaagaaactaggcaaaaagaagacaaaaaacatttcctcttacttaacaaacaaccactttataaagttaatcatagacaaggtatgatcctctaaatgcaccctagcccaattcacaaaagtatgcagaaaagaatatttgatagcttggtctaatccaataattaaaatcaccacccataagctttgtggacaaaatttccttttctactcttaattagtgaaactgttcatctaaagttgtgagaaatttggctacttgactggtgcaatcaaagcaccaaaggaggatgatttgatgttttctacatgagattaagagaatctcatgatcatgtcatggccagttaatttgatagagccagagattggctaaacatatctattcctttcaacaactgaggatttatgggatgtggtgagtgaaacatactatgacttgggaagttctgcacaagtatgtgaaataaaaaccaaaatgtgtgagactaagcaaaaaacttaagatgtaactacatgctataacattttaaatagactttgggaaaaattagatttattttatacatagttgtgaaaggcgcacctaggctccaggcaacgtgacgccaccctgtagtgccttgcccgatttcaggagcaactccttcaaggaggcgctgattaggcgcgcaaggagcttgcttcttggttaggcacgacgcccccaacaagtgcgcctttatcctctgccatcgcctttttttgttatttttctttttcttattctttttttggtcttcttctcctttcgacaatgagtcgtagagcagtagagggaaaacgacgagggttttgtttttttaatttcctgagaccaaaacaacatcgtttggtctgttcttttaaaagaatagggtctaaaacaacatcgttatgtgccttttttttttaaaggccaaaaatgacgccgtttttgcctattcttcttccagtaccaagtgtatgctggttttggacctatagaacacaaaaaaaataaaaatgccctagcctcccgaatagtgtgaagaagagaagaagacgaagaagaaggggaaaaatagaggaaaattttcgggcatttgattatgttatataaaaatatatatgtaaaataaggtggtctcacttcactaaagcccgcgccttaggtgcgccttgcgccaaaggctccaggaggaatttttttttttttgataggaaacgacataggaatatattgataaaaagaaggtacaattagaaggatgaggaatcctcccaacaaagagaacaagactacaagtaatcaaatataagaaagtacaaaaagagaaaagtagacactctagttacacgccgctaatcaatcaagttgtaatatgttaagaggaattcccttaaaaaccttagaacaaaaagcccaaaaagaggtaagaaaacaaatagaatcccaaagatactcagaattccttgctttgtcctaaaaaatccttgcatttctttcccgccacatcacccacagtaacgcgatgcacgcgttttgccataaaacaatccctctcttgaaagatccaaaaccattaaaattactagataacatgttagagatgctccttggggaaacccaatccatctttgctgattgaaataatctgtgccacaaccctatcgtcaaagagcaatgaaggaaaatgtgatctactgtttctccatgcttcatgcacaacttacatatgttagggctaagtgctttgtagggtcttctcaattgtagcaagtcattagtattaaccttcttgtgagccaccaactagacaaaggacttgactttgaaagggatttgagcattccagacaaacttggtagggaaaattggaggcggctcagaatattgggataaggccagaaagaaagatttggctgtgaaaagacctgaagaagataaggaccaagatctcttatctggaaccgaaggtgatatgagtagacgatcaaaagaccgcataaggccctttaaatcttctatctcagaatcagaaagatttcggcgaaaattgaaattccaagagaaggggcgggtatatccaagaattgatgaaataggagcatttttatccgtgactacgctaagtaatcttggatattagacacccaaaggttgttccccccaccacaagtcatcccagaactgaattctatccccattacctaccacaaaccgagtaaacttggaaaactcttggtagactagggcaatggccttccaaggacaacgataagaccatctaactatgttgttgacatcccagccattggagtgtgatccataaatgcttaaaataacctgatgccacagagctgaaccctccctaggatatctccacaaccacttccctaaaagagtgacattccttatagatatctttccaaaacccaatccccctctcgatttcggcttacacactacgtcccaattaaccaaatggtctcttttgccttcccctacgcctgaccataaaaaatctctttgcattctctcaatttttgctgccacagaggcgggaatcttaaacaaggaaagaaagtaacatggcatatgggtgagacaagattgaatgagagttattctgcctccaaaagataaatatgccttctgccacccatctaatctccttgatatcctctcaatcacaggatcccaaaagccactcgccttaggattccctcccagaggaagacccaggtaaagtataggccacccagaagccttgcaatcaagcatctcggccaacctagaaaggtgattctgctcaagattaataccatagatattgcttttgtcaagattaactttcaaatcggaaatatgcccaaacactagcaggacattcttaagggtcatcatatcctcctcccgagagctggaaaagaaaatggtatcatctgcaaattgtaagtgggaaacccttgttctgttcctacccaccctgaaaccctccaagacgtttctctcctcagctttcaataacatcctactcaatacatttgccactatagtgaacaagaacggtgataaagggtctccttgtcttaaacctctagatgccttaacccaccctttcgcattaccgttcaccaggactgcaaaagaaaccgaggacaagcaacctctcatccatttcctccatctaagaccaaaccctttcatctccaacacatgatccaaaaaatcccaactcacatgatcatagggcttttcaaagtcaattttgaatacaactccttcctcccctgatcttcttttctcatccactatctcattggctatgagaactgcatccaaaatttgtctcccttgaacgaaggctccttgagtagaatggatggtctcgtggagtacccctcttatgcgccctgctaacactttggctattatcttgtaaagactagtgatcaagctaataggtctaaagtctgagattctccttgatatgttttttttgggtaacagaactataaaggaagcattggtgctttgattaataattccgctcctatgaaattctgcaaacactttcactagatcctcctttatcacttcccaacaatcttgaaacactgcaatggtaaagccatccggccccggagccttatccctgtccatctgaaaaatagccttaaaaatctcttctttagtaaagggggattccaacctaaacgcactctcaccagatatagggctttaggaggactttgcgccttgagtcttttaaaactatgattttatgaatttgaggggcttgtgctactgatagtgcctagttcaagaaaatgttggaaaaggaatgggtgttagaattttttgcaatgcttaacaaaagaacttgacgaagtgagatgtccaatccttggcaaagagctatttcccttgactggagaggtgttctctgaaattaggagagaggcaaggaggagacatgttacgatgggaaattctgttatttctatcacaactgaaaatttaacgttgattactgctgcaactgagattgcagctgttgtagtggtccaaaaaattcataatggaagtgaagtaaaagtgaaagtgtggtgtgactattgcaacaagctgcaacacaccaaggagacctgctgaaaacttcatggtaaaatgtccaaataagaacaatatatttccttaaagaaagggatgaggaatgccagtagtagctgaaaacttaccaggaacccttttgatccttcaccattagcaaggaacaacttgagcacttgtataggttgatagatcagtcctaaccttctcaaagtacagattttccacagtttttctagtttttcaggagttggtttggaggtttgggcacagtgcagttttgttatggagatcatttgttggaatatatgaggattgggatctaggagaaaaagaagggtggttaagaatttttgcaacatgagaacctagatattgtgatgcttcaggaataaaaaagggaggtttgtgagtagtgtccagacagctaggaataaggattgagcttcttttccggctagtggggctttgggaggggttttgattatttggaattcaaagaggcttagcagtgaagaagtggtaataggctccttctttgtctcagtcaagtttttgatggaaggaattggttccctttggctctcctttgtttatggccctaaaaattctttcttaggaaggatttttggtaggagctcttggatctatataagtgctatgatcctatctataagaacttctttgtgagtttgtgagtatggatgtaaccttcattgaaaatcaatcttatttccgtagaacctctcttcaaagggagatttatgaggtggaagattgtttttgggaaagggagatcacattgcctattattcctttggttcatgagctgaagttgagcaatagtcctcaaccttccaatctgtcctttaatttgccagcacctaatcctatggttccataacatgaaaaattgaaacacgtggagaatcactcttagaaaaatctcaacttgagttttgtgtttactcaagatggcaaaaccctccaaatgtggaaagtcaatcttctcaatattgccaagagccaacttgaacgttgcaataggtaattttgatccttctagtacttcaagattgctattctaatggtgtatctggatgatataatcctaattggcaataatcttgaagagttggaaggactcaggaaatttttggcaagggagtttgtgatcaaagaccttggaccactcatatattttcttagcacggaaattgttagatccaaacatgaagtttatctcaaagaaagtacactaatggtctactcgaggaaactggttttttaggatgcaagccaacttacactcccatatatcaaaatcataagttgggggcagcaagtaatgcagtaacagtagacaatggtcaatatcggagacttgtatgaatgttgatttacttgtcacatgcacgaccaaatatttcctttcctgtgagtgttgttagccaattcatgcattgcccaagtgtggagcatctttaagcaatgtttagaatcttgaagtatcttaaagggactcttggtaaagtataggaagaatgagcatcttggagtcgtggcctacaccgatgctggttgggttggtagtttcattgaccaaggtcaacttggggctattgcaccttttttggtggcaattttgttactcgtaaaaatacagaatgtggttgcccgcagtagtgtagaagccgagttcctagctgtagcacatgggaattgtgaacttctttgggtaaaaaggcttcttgatgagctaaagattcctattgaaagacctatgaggctatattgtgataataagacagcaataaacattgcacacaacctagtgcaacatgatagaaccaagcatgtggaggtacactgtcatttgttccaataaaagaatagcagacatcctaactaagggatcatagaaatcatgttctgaaggcttaattagcaagctgggaatgtttgatgtatatgaaccaacttgagggacagtgttgaaaaatcaagagtagatttgagttcgatttgtcgctaaactagatgaaaattaaattagagaataagtcaaaggttttatagattattgctgtatttcaaatttcaaactttattcagttcctattttttaggcctatatgttctttcctttcttgtatattccatgtactcttttaaatacctctgtatatcaattattcattactgaatgaggatgacagattttctcgaacctgctttcactaagttttgtgctactgttcatgaatggcttcctggaattaagtatttttctctgaatgtatttcgtacgcaaactcagttatgtctcacaaatcacttggaatgaatattgtaactgctgatcattgagcagaacttgtcaaacagggctaactcagcaattggcagtttaaatgtctggatcagcaagcacagtctagtttaatgcagacatactatacaagaaaactaggaaggattagtaattgagaattaagaaatctggaatgtgttggaaaattaggacccaccatcatgttgatccatagctccattaaaagtatttagatgtctgtatccctgataattgtggcaagtctggcaatcttatctgtactttagtagataaaactggagtcatagcatctctctttttttgatacatatacaagttaggacttctcatccttttttgtcgttgttccatggtaatgaattatttgtttctgataaaaaaaagaaaaagaacaaagaagatatatggtcaaagcccaaacaccaactcttaccacctgaaccaaggcccacaggatatgattttgaagctgcattgttggagtctcttttgttgttgccttcattgttagtatgttgatcagctctggaaaaaaaccttgtcttcaggaacaagacacaaaagcgtgtaactgctctaaaca

SEQ ID NO: 12700 - DNA, 3552 bp, Vitis vinifera
  Intron number 2 from transcript GSVIVT01025893001 (locus G SVIVG01025893001) derived from phytozome v7.0 (chr-ID chr1 8; pos 27427281 to 27430832)
caactgggcttgctgctcctgtgttggaacctgctgtaaggctgtacacacttcttcatattttatctcttgaagtacaaaatcatctatgccactatttccaggttgctgcaaagagaagatcaataaagatacgagcactcagttgaataaagttgtttgtgagcagattgacgacagaagcagaactcagatgttaatataagagaaattgtttatgcacatttccagatcagatgataagttgaaattgcttttctgccggcattttctctcttctgccattgtgaggcaccgttaaactcaaacgacctctcatcattctctgaatctgaatcagaagaaatattggaagacattagttggagtgcaccaaattttggctagggttgtgatggcagtagcacgaaaacagaaactttaggaagagatggcagtgaaattcatttctatacagctattttgagtgaattgagtttgctgacagtgacaactgatgccagaatgcagaattccatttcagcaatctacagaagcatcctcaggcaaccctagtaattcagtctcaaaagcagcccagacactaatccagcttgaccaccttggtgcacattaccttcctcctaattttttgttttttttcttttcttctctttgtgatcttacacatcttgaatctggatttcaaaaccttttttccgtcaaaataactctggtttttctttaaaattccttatgggtttctaggcataaaatctagattttaacatactatttgctaccattttccttccaacatgcattttcatcattttcaactaattttcacggtttttttgtttttttaacaagcatgaacaaacttcataattccaaataatggaattcatataatcaactcatgcaaaattaattagggctttggcgggggcccaacattcatgatattttcttcaatatagcttatttgatattcgattgattgtgcttctctttatggtacatgagattattttacatctattattgagctaaccttgttccccattttagcgctcaactcgttgttcaggtatgctctctaccaccatacttccaaaaatatcatgaatatgcatatcattgcccttgtttggtgtcatgcttgtttgtcttgatatttattcgattgtttgatcatctttgataaaaatgtatgttgtgtatcatgtttccaaattaaccttcgatgtcttttgatggcgcttaagaagcgattcaagtacgcaccctaactctcctttattgtgatttgatcttgcttgacattctattttttgaaatcactttagtctacctaggtaccctcaattaatcaattaattgccctatttccctcaacttaattagtagagacatttgtagggtttagaggggtgctaccttttagaggtaccttctcaataggtaacctgatccccggacctatactcgggttttttttaaagacacgtttttttaaaaactatgaagttacttctttagggttttctattttgttttattttcccttttaaaaaataaaataataagtggcgattccaacttttccaaaaccaaatttttgccaataaaaatgagtctcatcattgagtgggggagcacgtgaaaaatatgggtccacaaatccattttttttatgctaaaatttaaattgtgattgttacaaaattttaaaataatactactaataataataataagaataaatcaaataataaatttatcaatctttcaagcaaaatgaaatactacatggtatagtcacaattttgatattttgctcattaaaaaaattataattataaaattaaaattaggtttagatttgattgggttataccctaaaagaaaatgaatggaaataatatgatgtaggacacatgccccaaaaaataaaagaggtcaacaaggaatagtcctagaactagcaggcgaaggagttggtaggaaatctacatatatgccagaaaaataattaatagttgttgttgtagattccaaagaaagctatagcaaagtcatgcaagcaaagcaatacatagagcagccaacttcaacttaacacccttattatcacagaaagaggtgtgatggtggctttttcacttttttttattctatcaaatattcaaactttaatctaaatattccccgggatttctttggaaggaccttgtggactacttcaggtcgtttcaaagaatgagtgtttttcctgatgtgatgtttgattctaaaaaaatttctggtaaaatacaaaagaaaaaaaataaagaagaaaattaaaaaaatatatatatataaagtcaataaattatttttatatgctaacttaaacttacgtattattttaacggttcaatataaagattaaataattttaaaataaataagtttcgaactaattttgattatatttggtttttattctatttttatattgtataaccaaatacagggaaattatttttttttcaatatttttttcttttctttgtactttctaagaaccaaatataaccaagttttcaaaaagatgctaaagcatgtgaatagagatggaatattcaacatgaaagggagaaaagaatcatgtaaattaaaaagggaagtaaactacaagaaaaagaaaatataatggatgcaatgctggcaaatgttgatgataaaaaaaggagaaatatagtcactaaacatttttatgaactaaaggaaaattattaaagaacagattgaatgtatttttattttctaagaagaaaaataatttttatcataaaaccaatttcaatacttacaagatgcagaccaacttcaaatgatttatataaatcaacatgcaatatatgttataaattagtttggaatgatatctaatgatactaattattgaaaaaataatttatcagtggtaaggatgctattggggtgagttggtatgaagcaacttaaatccaacttagcgagggatggtaaacaaagcgagttcaggacaagccaccttatcccaacttaccttgaatatcgaaatcgattcccattccaataaaaaggaaaaacaaaaaaaattatataaaaaaaaaccttaaacgggacgggatgaatgagggtagtagggatattttcaatgaaggaacatacatgattggattccgattttgaattaagatcacaggaacccaagttacaataggttcatgcttcttattttattttattttattttttaaaaagatacatattcaagtggcatggcactgaaataccaaataatgtgtttcaagtggcattttgcatgatggaatcatgatatcaaacctagatagtacttacttgctcataattggacctccctctctctttcttagcatggttgccatactcagtaaatcatgctctgtcatactttaatacttggttagtttgaagccattcccaaatagagaacctccaaataataagaaaactgattgaggggagatatcttgatatcttccagtgatttgcaat

SEQ ID NO: 12701 - DNA, 3786 bp, Vitis vinifera
  Intron number 3 from transcript GSVIVT01012510001 (locus G SVIVG01012510001) derived from phytozome v7.0 (chr-ID chr3 _random; pos 301778 to 305563)
cagcttttatacgtgattctgctggtgctggattggtgagttaatggaaaataattcttaagatggtgatttatttttgcttttgtctgtgaaaacctattaacgctcctgtaagtggtttgaggtgcccacttaactgtgcaataatctcaggttatatctttgaaatatctgttcacttgccgatcttcattattaattagatcttacctaaaaacttggctttgtttttgtcttggttccagcatatgaatttgtttgttgatttacggagcaagtcttgtggtgcttgttcatgataataggtaattgctggctttcatattggctgcctggatgattgcatggagtctggtgattcatttgctgctatatatgttgttctcttatgggttgtagcctattacaaattagttttgatgttgagagtagaggagagtaggttattggaggccttcaatgtaggtaggaatagaacaaaagtgtctcatctgtaacaaaagtgattcattttgttagtgtttgggcaaatatttggacttaaggtcaatcctgacaagagtatcctctttgacatcaacatcgatcaagctcaactcactaggttggcactgttgcttgattgcaaggcgtttgattggcctattccctatttgggtcttcccttggggagaaacctaaaggcttgtgttttttggaatccaatgattgagataatctcgcgaagattagatgggtggaaaaaggtctatttatcattaggcggaaggataactgttatccatttgtgcctctcccatattcctagctattttctatccttggtcaagattcctgctgtagtggctggaaaatttgagaaattacaaagggcttaatctcccatcctattagttgggatttagtctgtaagcataaaagttgaagggggattgaggtttgagaagatttctctaaaatcatgctctattagggaaatagttgtgaaggtttcctagggagagttttgctttatggcattaggttattctaagcatatgtgagacacatactaatagatgagatgccaacactatagtcaggtggtcacatcattgctcatggaaggctattgtataggttttttaggattttaccaggtacactcggtttgtggtgggagatggggtgaaaatccgtttttgggaagccttgtggtggggggatcaacccttggaatgtcaatttctaggactattcaaaatagtcactgttgaaaaccttcatatctcatcaattcttgggcctacgtatccctccccccttgcttgtttgcacttaaccacatctctttcagatgcaagagctttgcctttatcttttttaagtttatttacagttaagtctttctttttagtgttgatccaccattttgatccaattccttttttacctactaattttgcttggaaatctcaagtcccttttaaggtctggttctttgtttggttagtggcacacaagaaggtaaacactaatgacttgttacggttgagaagaccttacaaaggccttagtcatgatatgtgtaagttgcatatggagcatagagaatcaatagatcatctcttcttacattgtcttttgatgatgggggtgtggtacaaattatttagattagccaagatggattgggtttgctcaagtatttgtgacatgatgatcatttcatttaagggattgggaagctctaggagaggcctagtattgtgtcaaactgcttgtattgctttaatttaggttgtgtggcgggaaagaaatgttaggattttggaggacaaggcaaaaactttaaaggttttttaggattccattcatttccttgcttcttttgggcctcttacaccacaacttttaagggcatttccccttaatgtggttcaacttgattggttagcgacatgtagttctaagggtgtgggttagtaaggagagtttgctttttatatttacctcatggtttatggtttttggtactccttatgtttagcttttgtttgtgggaggattcctcatccttctgctatactacttaattcctaattcaatatatcacattgttgtttctcatcaaaagaaaataaaaataaaaataaatgacaaacctaagggtatctgtattgtgagagacaacacttaaaagatcctattgctctttgataattgtttgttcaaacattttttttcattgttatatagttagatgttaattgttctccccacccccattttttgatctaatttagctaagaaattgtctattaaaacatcattttagaacataaaaatgttattttgatggtattttttcttgtatctgattttttgatgtcaaatttttagttacttgtggattttaataggattttcttcagttttcaatattcaattttcttttcaaattcttggagggcaaagttgaggacaaactcttattatgtttgttttagtccatgtatatctgttgctcagttttcttgagctatgggtttggtccttaacattctcataattgctcttagttagttcttctctctctcttctttttatttatttatttatttttatttttgaaatttctatatcttctttcaccaacttggtgtcttttattcctacaaatttcattgtgaaatccaaagccttagcaaaagtaaagttctttgcatggaaggtcaataccaatgatttgctccaaaaaggaatgtgggagtggggaatctattgatcatgtacttttaaattgccttacaaccttagcattttggtgtaggctgcttagacttgctaatattgaatgcgtttcacctagaaggatggaggagatgctgatcatatccttttaagggttttaggggacttcctcaaggttgaactctttgatgcattggtagcctcattttgatttggactatttgatgagaaaggaatgcaatgactttgaggatgggtggatgtatgttgaagcagtttgagacttgtttttttccttaccttttttcttttggggtttcgtcagtgaagtttctgcaggcaccctttgagcttcattttgctgaattataacctagagtgcagaaccaagagattgattaaagagatgcttcttgaatagttatcacttccaatgggttttgttaaggtaaatttggataggtttttttttactagccaaaggcccttttgaagggtatgttgctaacaaaagctctaggcttgtccaatctcctagtggcaggagattctgctattgtaatgctatgggctaccaagaaagaaagaggactgtggaagttggatatttcttaggagttgggatattccttatgtcatgttcctcacttaggcaatcatgtggtggatgtgttagtgaagcattaagcaagacgtttgtttctttcgtgggagaatttttacctttatgaattatagtgaatggtgtcataatcaatttgacgtgttagatttgcctttttgaactagcatgcacgtattttcattttattagactttgtataaaggagtttgtactcgtgagaaggatttctcatccttctttttactactatttcaatacaaataattattgtttctgataaaaaattatttgtgaaactaaaattttatttttttgaattggcccttttgaggtatctcacttcattagtccaaatagttttattcattgcatattatttgttctcttgatctcatgtggtttattttctctactggttttcaggtggg

SEQ ID NO: 12702 - DNA, 6970 bp, Vitis vinifera
  Intron number 7 from transcript GSVIVT01036044001 (locus G SVIVG01036044001) derived from phytozome v7.0 (chr-ID chr4 ; pos 7800843 to 7807812)
agggaaaggtactatcataacactatctaaattatcggtcagtaaatagaaactaaacttgggcacaagagaatggaatcaacctgacattgaagggtatttatcataaaagttgaataatttcttctgttttctgtagcaaggcaataccctcctaattcatttaagtattaggaaaagtggaagcattatccatttgaaagaacacttgttggtttagaatccaattgaaagaatgttatattatccacaatagagttattcacaatatagtatacatctttatatagaagaaataatctaagaaaagaataagtataaacttcctaaaccagtgctaggaatatttgtcaacctaattactaagtttgattaagtcaaaatttcctaaattgtcttagactagtaaaagatacccctagaatcaaggttcaaattagtagctgatttccaacactccccctcaagttggttctaaaatgtccttcattcctagcttgttgatcattgagccaaaccctggattaggaactcctttagtgaagacatccactagctgcaacttggaagaaatgaatggagtgcaaatcactccactagcaatttttctctttgatgaagtgtatttatcttgatacatttattctatcatgctgcagcggattgtatgcaatgcttatggtagtcttgttatcacaatatagcttgatagggcgaccctttgattctatgtgcaaccccctcaataatttctttatccatatcaactcacatattccaagtgtcatggcttcatattcagcttccacacttgacctggccaccataggttgcttcttactcctccaaattactaagttacctccaacaagagtacaatagccaaagttgatcttctgtcaatcatagagccactataatcaacatccacatatgcttccgcgtccacatgaccattttgagaaaatagaaatccacttccaggagtagcttttagggattgctgcagtgttttttcagctgcttccatgtgagtttctaaagagtagtgcatgaactaactaatcacactttataataggctttgtaagttttttgttcaggcaggaaagacaaattaatcttcccacaattctttggtaccttttttttatccattagagcaccatctgtaactgtattgagcttgtggtttagatcaataggagtttttgtaggcttgcttccaagcattccagttcccttgagaagatctaggacatatttcctttggaataggtaaatctcttcttttgacctagccactttggttcctaaaaaataatgcagagtatctagatctataattttctttggccgacttgacctttagtttctgaacttcctcactatcatcacccattataatgacattgtctacacgaacaaaaagtatagtcaaatcggcaaattccctatggattatcttctaaagaaaagagcacgatctccttgacttagatgaaaaccaaatttgaagagtgattgagctaatctttcaaaccatgcaacaaattgctgatacttctctgtcagttttgagatacttatctctcttatactagacccaatattgtctatctagttagtgtggtaagccaatttatgcatgcaccataggaaaaacacatggaagctgcttactgaatccttaagtatttaaagtcagcattatgaaagggcattttatttagaaaaggtggaaaattggaagtagaagcttatagtgatgcaaattgggcttggactatcaccaattgaaggtccactagtggatacttcatggttgttggaggtggtcttgtcacatagaggagcaagaaacaatttgtggtgacgagatcaaatgccaaagtggaatttagatcactagctcaagggatatgcaaacttctttggataaagatcatccttttagatttgggaataaagatagtagatcatatcaagctatattgtgataacaaatatgctataagcattgcacataatcttgtccatcacgatcaaacaaagcttgtgaagattgatcaacactttattaaagaaaagattaaaaatggagagatttgcattccttatattgcttcgagggatcaacttgttgatatccttactaaagggttgccaaggtctgtatttcagttaattctaagcaagttggtaatagaaaacatttttgggccaacttgaatgggggtgttgacattttgccatattaatttcctatgacttcaaattatttttgtgttatttccttgtatgtattctacctttaattgtagtgatgtaggctatcattgaccttagaattatgctgcttaatggctaaacagcatatgtaatttcctagaatatactaacaaaagtttttatttaccaatgtaatctaaattgtttagcatcaatgaaatcaattatttacctcagtttttgatggaaaaaaaggtcatccaagtaccattcaaggccattttttaggtgagttcttgtacttcaaatttgagatttgagatgtgagatagattttagttagagccaaaagcaaagaattttcccaaatggagcctaagtaacacggacttaaatgctcacagccacaaagttaagtggtttctaaaattgttatcaattttaaactcgatttttacccttaaattattattatttttaatatcgatccttcttacaataattttaccgtggactaaaatttccttttcttggaagattaattttactaacaaataatttgttaacagttcttttccctttttcattatagatttttaaattttcaattgcgtttaaatcttcattattatatgggaaaatcatgtaaccatatagtacctaaaaaaatggaattcagaacacatacaagttagggaaaataatcctacccacatgcactctaatagtaacattaccataattctaaggcgcacacacacacacacacacacacacacacacacacacacacacatattagctttgacacaacaagtcaagtggcttacgacatgcttgtcgaatatttttttttttcttttttgttctttttgttttctccttcatattaccttctagttatgcttcaccttttttcttttttcaatatgttggctatacgttctctcataaaaccttttcaactttatattttttcaccctttcatttgtttatatttattgattttaattatttatggacactttaaacacacaataataatatgcaataaataattaatgagaacaagtttaatgtaaacataaatacataaatgaacaaattttgaggtttaggacataagattttctatattcgtgctaactaaaatatttatttattttataaatcttatcacataagaattaaataaaaatatctttgtcatatgattttattatttatattatttaaatttttaaaattttatgtgaaaatcagagttaatgattatgattttagttttttttgtatgattctaactaaactatggttctaactttttgcttggttaaaatatttaatttttttatttatataaaataaaaacttgaccatggttctaatttttttcttggttaagatttttaatttttaatttttataaaataatatatatacatatatatatatatatatatattttttttttcataaaaagatatatttaatatttatattaattttctcttaaatttattaaaattaaaatttatatagactaaagttgcatacctttttgtgtcagacaaaaatagtgcaccctcctaaaacactaagttagtgcatcttaaagtagttaggaatttaagttgtgtatcttaaaagttacacacttgataggtgtgtaatttcggcctgcaaaaattttaattcctattaaaaagaagagaaaattaatataaaatattaaatacaattatgcatgaaaaatatattttattttatataaatagaaaattaaaacatttaaccaagcaaaaggttagaatcatgatcaagttagaaccgtaagcaaaaagctaaaaccatgattattgagtctgatttttacatgaaatttttaaatttttaaataatataaacaataaaataatatgataaatatatttttatttaatttatatgtgataagatttataaaataaataaatattttatttagtatgaatatataaaatcttatatcttaaatctctaaattttttcattatgttttatgtagatatcaaatttgttttcattaattatttattatatattattattttgtgattaaaatattcataaataattaaaatcaataaatatgaaaagatgaaagagtaaaaaaaatgaaattaagaaggttataggagagaacatattaagaaaaaaaaaatgaggcgtcacttgaggtaatatgggggaggagtgaaaaaagaaaaaagaaaaaagaaaaaaaagttgacaagcatgatgtgagccaattgatttatcatgtcaaagttaaaaaaaaaaaataaaaaattcattggttggtggtagaagaggtggatagtcttggaattgtggtaatgttactgttggagtgcatgcagatgagattattttcccaacctgtacttgttctgaaacctaaaaatgttaaagttctcaaaaattctatttttttaggtggtttatggttatatgattttctcttattatattaatatatatgttagtaatgatgatgatgcattattattatatgttatatgaacacatgttttattggcaaacttcacttgttctaaagtattcatatgttagatgttagaagttttgatttaaaattttatgtgtgtgaatagaaacttatagtttgctaaaattgaaacaataagtccttgtgttttaaaggatttccttacaatatatagctatattactatatgatattgttagttttactgatcttgttagttttatgctaaatgtaatatgatatttaactatactcatgccaaaacctttttagtgttttaattgtctttgtttgatctgtggtagagttgggaggttggtgttttaatggagggagggcaggctatggtttggtttgtggaaagcaataagaagaggatggaagggcattccatgccaaaaccaggctagaggtgggccgtgggagaaaacttttaagttttggcaatttggcgtggtgactctcctttgagggaggctttcccttctcagtattccattgcagcttctaacaatgctttcccttcaagtgcgtaggatctcaagaaccaatgtttcttatggtagttaaaagatagggaagtagaaagtgttaaagggtttcttaggaggctttataaggaagggggacttgaagaagatgaggataggttgatttggaaaggttccaaggatggatgggtagttctcttttagatccttctatcatgctatggagacaggtgctggagaggctttccccttgaaggaggtttgtagctctgtgtcaccttccaagatagacttgtttgcttgagaagcagcttaagggaaggattctgacattagatcgacttaagaaaaggaggtgttctcttgcaattagttgctgcaagcgtaagggagaagaataatcggctaatcgcatccttagccagtgtggaatagcaagtggactgtggtatcttttgtttattctttccaaaatatcttggattctcttcaattcagtgggggagactctctagggctgacatggtagttttagtggggaggaagaggaaagtttggatgacagcccccctatgtcagtttggatcatatgggaagaatgtaatggtagatactttggtggtgtggtgtactcagattatttgattaagaatactctcaaatgcaccattctctaatggtcctgacctctttttgatggttcttcatgttgacaaacttttcttgacagtatttttttgttggacctcatttattggttagggtctagatagtagattgtcattgaggatgttttatttatttatttttctctcaccattttggcgccttctgcataccccacttgtactcaatatgggccccttttttcttgggtgtatttttatcaagacaatgcttatttgcctattaaaaagcaataaaaatataaaatgaagactcacacatttattatggatgcttctctctctttatcttatttatttattttttaaagtcaataaattgtttttacatgcttcttcaaattcatttcacttatttttcttgattatagagagattaaataattttaagatgcataaatttctaactaattttaattatatttgattttattttgtattttttataataaaatcgaacatgagataaccaatttccttagcattttttttcccttagtacttttccggcaatcaaacatagccttagagaatttaaatataggtaacagttttcttagcttattagtgtgcacttatgtacagtataaaagttctccaagtattcttcatattttcaattatttctcaaaacactctacaacaggtatatgaaaatacttcaagttagttccaaaacaacctatttttattgaaaaaacaattaaaaagttgtgttaataaaaaataaataaataaataatttttttgttatttaggatagaaaactgttttcaagaagagtttataaacagatccttagtttctcttaccaagtggtaacgcttgcctctctattctgactgtacatcaatcatgataatatctttgtcatgtaaaggagaaagagatcagtgatgtatgacagttgaagttttaccttttttcgtttaatttgttctcatgaaaatgttggttttcttatttttgtgtagagagctgctgagacggagctattgaccaaatttcc

SEQ ID NO: 12703 - DNA, 9094 bp, Vitis vinifera
  Intron number 10 from transcript GSVIVT01009120001 (locus GSVIVG01009120001) derived from phytozome v7.0 (chr-ID chr 18; pos 5247972 to 5257065 reverse strand)
gctcccacggaacttgttagtgaattggcttggcggtatgtcttttatcaccttttaactacaattacagtgtaaggaataaaatgagtgtaaaacattgtgtcttttggcctgataatagctgtttctcccatcatcaccatccatcaccttagtgcttttatgttcttttccctccatgatctttcattttttcttctaagcatattgttgtaactatatacaagaattagagcagtgacatcagaatgcatatagttatctgagctgtagaaccatatttgcttttgttgtttttgaaccctggaattttttagttgttggtgttccagtctttatgtcaaattgccgtggtgaccataagcaagctcatgttctggaagcctactggctgtgcatagaaagcttgtaacttgtcactaattcaatagtgtacaattagaagttaaagtagaaccttttggttcattttctgaatgaatatgctgttagatgctccttgatatggtgtaaaatgacaaatcattaggaggggatctcccattgtaataagctctctaaatttggattcatttagggactattttagcatatagccttgttgcaactttaaattttgccatgtaacttatttttcctctctgtgcatgcacatatagacacaattacgtgagaaatcaggatgtcataactttgggatggattctgaaaccctattcagctttggctgggttgaatgcccaacctcttaacccgaggtcacttgagatgtccaccaagttcaggcatctcacgatgaatgttttaagtagagagaatattgaagttagaataacatttttccggtaaccattgcctatttgtgtttctattcatggaaaggggtggtaagatgttttcttcttaagtttgtgttcattgtgggtttctaatcagcaatgagtcgccaccacatttagtaagtacattttgcataaataagaaaaaacagtcatgttaataagaaaaaacagaatatggaagagtatcaaaggtgcgccaaagataaaagaataagggtggaatatcattctcagctgtgctgagttttgatggggaaatacctctaaaatcacgacccagtatccaaaggtctattctgaattcctttattgatcttttaggtacacaccatacacatatatacacacaaatgactaaataagaaaatatcaatctagcttgattctctcctaaaattaggaaactgaatcatcctaaatgatctctctttttttattcctaaaatactttcctaaattaaaaccctaactttgaatgccaaatttcaacacttctcctcaagctggagaatatatatcatataatcccagcttgcaagttaagtcttcgaagttaggcctaggtaaagctttggtgaggatgtctgcggtttggtgcttggtaggaacatagttcaatttaaccgtctcactagccaccttctctgtgatgaagtgtctgtcaatctcaacatgcttggtcctgtcatgatgcacggggttttttgctatgcttatagctgcctgattatcacacatcatcagaattggagatgaactcgtttgtcccagttcactaagaaccctttttatccaaatcccttcacagattccctgtgcaagagctctgtactcagcttctgcactgcttctggctacaactgattgcttcttactcctccaggtaacaagatttccccagacaaaagaacaatatctagaagtggaccgcctgtcaatgatgtttcctgcccaatctgcatctgagtatacttcagtgtcacggttttctgtctttctgaagaatagacctttccctggtgtcatttttaaatatctaagaatcctgtagactgcttccatgtgttcctcagtggggctgtgcatgaattgacttacagcactcactgcaaatccaatatctggccgagtgtgtgagagataaatcaagctcccgacaagccgctgatatctccccctgtctaccagtgtactttctttctcgataccaagtttcttttgactatccataggagtatcaattggtttgcatccaagcataccggtctccttaagaaggtcgagtatgtattttctttgagagactacaattcccttccttgatctagccacttccataccaaggaaatatttcaaatttccaaggtctttaacttcaaactcttctgacaaatacttcttcaaattctgtaattcctccatatcattcccagatagaataatatcatcgacatagactatcaatatggtcgttttcccggcatgagacttcttgacaaatagagtatgatcagcctgactttgcttgtagcccagcttcaggactgcttttgtgaatctatcaaaccaggctcggggagattgtttaaggccgtacaaggatttttggagtttgcaaacctgattctttgtcatactttcttcaaaaccaggtggtatttccatgtagacttcctcttctaggtcaccattcagaaacgcattttttatgtccagttgttgcaagcaccaatcttgattgacagccaatgagagaagaatcctgatagtgttcagttttgcaacaggagcaaaagtctcctgatagtctatcacataggattgtgtaaaccctttagctaccaaacgagccttgaatctctcgactgatccatttgctttgtattttatggtgaaaatccacttgcaccccacgggcctcttcccaaccggcaaatctgtgatagtccacgtcccattcttctcaagtgcatcaatctcatcttgtattgccttcttccattctgaaatttttaatgcctcttgtattgtgttgggaacctgagtatcatcaagagaagtagcaaatgctctgtaagatggtgatagcccttcatacgtaacataattcccaattggatgatctgtacatctcctaacacccttcctcaatgcaatcagcagagtagaatcatcaatgttgggaattaacacctctccagccctatcctcacctatgttctcttcaggaagacttgaattggagtcaatatattggccacatgttgactgtgatccgtgctctaattcctgtcttttcctcctcctgatgtaaacttgtaagttctcattagcaagttgtggggctataggttgaataggcatgggagactggatggtcatgggagaaggaacatttgtgtgctaggctggctggactgatgacggcatgggtgtggacaactcagtgggctcgaattgggaaggatttggtgactctaagtgaaaagaaggtataccctcaagaagagactcccaaacttgatgttcattcatgctctccccctgaacatgagatttgggatagaagaagacatgttcaaagaaagagacgttcatggtggtgtaaaatcttttgttggttggagaatagcatttgtaccctttttgggttagagaataccctaggaaaatgcacttatttgctcgaggagcaaatttgctacgattttgaggatacacatgaacgaatgccgtgcaaccaaatactttgagtggtaaatcagaagaggctgcacgggtgtgaggaaattgttttaagaaaagttgacgtggggattgaaaggtaagcactctggatggcatacggttaatcaaatagatagctgtgagaatagcttccccccagaaatagtttggaacattagaggaaaacataaggcaccgggcaacctccaagagatgtttattcttgtgttcagccaccccattttgttgtggggtgtcaacccaagaacttatgtggataatgccgtgattttgaagataagtactgagactactagtaaagtattcctttgcattatctgacttgaggacttgaattttggaattgaattgattttgaaccataagattgaaggtttgaaaaatgtgcccgacttctgacttttctttcataaggaaaacccatgttacccgtgtatgatcatcaacgaatgtcacaaaccatcgagtgccagaaatattttttatccgggagggaccccacacatcactatgtattaaagagaaaacagtcgaaggtttgtatgggatttgaggatatactgttcgagtatgctttgcaaactgacaaatttcacaatgataagatgctggatttttattgattaataatttgggaaacaattttgcaaggtaaacaaagctaggatgaccaaggcgatagtgtaacattataatctcactatctttattgaccttagaatttgacacagaattgaaggactctaacatgctctgagactgtacgcaacttgcttgagagacttggtttgagaattggccacatgagaggaggtagagcccggaacacagttcagcactgccaatcatcttccccgatttcaagtcttgaaaaacacacgagtttggatagaatttagtaacacattggagatcacaggccaatttgctaatggacaaaagattacaatccaagtttggaacatggaggacagagtcaagatataagtctttagtaagttttatagaacctgtcccggcaattgttgactttgaaccatcagcaatatggacggatgaatgaccattacttggcttgtaattttgaagaatggcagcatctcctgtcatgtgatcagaagcacctgtgtccactatccacgacttcattcctcctcgattagcagtgaaggctacaccggtagtattgccactgccaacttggcttaatagtttctgtagcatctccatctgctctttgttgaatggactcggctctggaacagatgtgctctcagagttggtagccacgtgtgctctgccatctctgtcaacccgtggctttggtttccaatcagctggtttgccatgaagcttccagcaagtctccttataatggcctggtttcttacaataatcacaccaaggccgatcccgtttctgacgatctccaccactactattaaatgaccgagcagcaagggcaaaggcatccaatgttggggcaggttactctttggatcccatcatcactttctttctactttcttcacgcctaacctctgaaaaagcctccctgagacttggaaggggtttaatgcccatgattcggcctctaacatcatccaattccctgtttagtcctaggaaaaacttgaacggtctcttttgttccacaattttcctgtatgttgctgcatcatcagaacatttccatgagtgagtctcgaataagtcaaggtgctgccaataccttgtgagtgtgttgtaatactgagtaactgtctgctctccttggcggaagacatgtagggctgattcaacctgaaaaagttctgaaatattttcagaacttgagtaagtttctttggctgcatcccatatgtcctttgcagtcccaaatagcaagaaattttcacctatgtcattgttcatggaattgataagccatgacatgatcatgctattttcaatcttccacttcctgaaacccggttctgtagtttctggcatggctgcttctccagtgaggtactcatcctttcctttcccgcaaatgaacaacaacacagattgtgaccactgtaaatagttatggccatttaatttgtgtcttgtgatgagaataggagaggaatcactgccaccaaggtttggaatttcagatctgccccctgattctggtgacgtgacgctggatacttgtgatgatgccattccgtattttgtcatggaccggaaaggtagaagaacacttcccaaggcacgtgcagggattggagttgagaaaaaatagctagaggacgccggaaaaactgatcggagggcccgcggaggcaaaagaaccccaaaagaggcacgtgcagggctcggatggcaaaaacaggtaagaagggtggctggtcggcgtcaggcgagcctggaggaggaagcgcgtcgccggaaagtggctcacgcgccctcacgcgccgatcgaaaaacacgcgtggacggcgcgtggatggttttctggctccggtggtttgggaaaaattggagatctcctccaggcgctccttgcggtgtagaaaaaaaccgtcgccgaaaagttcgtcggaaaagttgccggcggtgaagtttttctgacaacgattcgacagtccggaaaacgttttctcccttggctctgagaacagggactgatgaccggaatgagagatggccagagagagagatggtcggattgagagatgaccagagaggttttgccggaatgaatgacggcctgaataagaagtggccagaagggattagggtttcagaaaactggctctgataccatgaagaatttctgaattcctttattgatcttttaggtacacaccatacacatatatatacacaaatgactaaataagaaaatatcaatctagcttgattctctcctaaaattaggaaactgaatcatcctaaatgatctctccttttttattcctaaaatactttcctaaattaaaatcctaactttgaatgccaaatttcaacaaatatcatcatctgtagactgtaggttgtgcagctggatgggtgagtgcttgtctttgttgtttcttgtttttaggtaactcttgtatactccctgtatgcttcgggtcgcctttcaagcaccctttatctaatatatttttgtgggtttatctatatataaaaaaaaaggttgtgcagctggaaatcctttccgtttacaccaagaaatagtagatctgaccttagttgattaggctgaaggaaagattcttgtgtgtttctctggcccatattgtaactggtagggtgattatgctgcgaatttgtcaatcgacaggggaacatggataagtgcacatgcatgtaatcaaattgctattcgatttcattattattattattattttaaatttccatggatgcttgtctaaattaactcaataatttccttagtcaagtcgcaaaggctggatgtagtttgtttgcaggaaactaaaatttaagagatgtctagtggacttgtacatagccttggggtgttgtcaatttgagaggtgcagcaggaggaattctggtgttctaggataatagggtgcttaagttagttggattggcagcagggattttctcaattttgtgccgttttaaaaattgcgaggatggtattttgtggatctttactagggtgtatgacccaatgtgcaggaggaacaaagaaagtttttgggacgagcttgggggaattagggggttatggagtgatccttggtgtatcggaggtgatttcaacatgattaggttttctggggagcgcattaggggaggcggcctttccccagccatgaggagattttcagaggtcatagaggacctgtagcagagagataccctttgcagggggaccctttcacttggagtggcgggttgaataatcagtcttagtttagacttgatcttttcttggtgtctgaagattgggataacctcttcaatggggcgttgtagtgtgtgttttacctagacaggtatttgatcacttttccattcttcaagatgtttgggggggggggggccctgaggaggggaccctctctgttcaaacttgagaatatgtggttggaggagggttttaaagatttgctgaaaaactggtgggtgggtcttaattttaatggttcctatagttttgttttggttgcaaaactgagatctttaaaagcagttctgaaatcctggaataaagatgtgttcgacattattgaagctagaaagggagcaacccttaaccaagtggctttttatgatgaagaagagagggttacaaccttgtctttggaagaggttgaagccagaaatgagacaagggaggattataaaaagtgggtctttaaggaggaaatttcatggcggcataaatcaaaggaagtgtggttgaaggagggtgatggtaataagatgacaaatgcccataggaggaaactggttggctaaggttaaggtgaatggtagttggcttactaaggagaatgaaataaacaatggtgtggttggggcttttcagaaccttttaaccaaggaaggtgggtggagacccaacattggtggattgacttttgagagtctaagaggcatttaggctgcaaggctggagcatccgttcttggaagaagaggttttcgtttctctctcagacctaggcaagaagaaagcaccgggaccagatgggtacactatgatgttttggctttttagttgggagtttgtgaaggaagaggtgatgaacttttttagcaatttccatgaggggggcagagttgtcaagtccttgaatgctacttttctggttctaatttcaaagaaaagtggtgttgaagacttgagagatttttggccaattagcttagtgggcaacctttatatgttgttggctaaggttttagccaatagacttgagaaggtaatgggcaaagtgatatttgaatcccaaaatgcatttgttgagggtagacagattttggagtgtcttgggttctctcttcttcggtcaaggagacactccttaggtggcatggattctttgtaggtaaagtttgcaaaaagtcttggaaggcgaccctattatgtatcttttggacagtttgggaggaaacagacatgctagtgtttgataatgcagagttttcggtccaaatgatgaaaaattattttgtttgtaatttgtggtcttgttctagggtatttgtagacgtgggtcctatttctctttttaactttattgatcgattaggttctaaatgagagcaggtgatgttttttgtttctcttcttctctcacttgagtgaaccattgggcaatgtatactttctatgtattttaggacgctgttttggtgtttcctttttttatatatatgctctttgttcttatctacaaaaaaaaaagaaaggtgaatatagttcattcggtcatatattggttaccactgattaatgatctcatgacaggtacgttttcttgt

SEQ ID NO: 12704 - DNA, 2281 bp, Vitis vinifera
  Intron number 4 from transcript GSVIVT01020840001 (locus G SVIVG01020840001) derived from phytozome v7.0 (chr-ID chr1 2; pos 1212179 to 1214459)
aacacgtgggactgttctacagggtcagcagacaggcaagactatagtattactctgcagttattcttctgatttaactttatattcttgggtataaatattaagaccatttttttgttacttgattctcaggaagcaagaatgatattgttttgatggtagcagttgttatttgagtgtttctggattagcattgaatctcgatgtgcttttccttttcaaaattattgtttgggaatagatatctaatcttttgaaaagagatgggtaaattttgagcaaacttttgttaaatacgagtcagatgtctagtccctttttccagacttgcctttccacgtttgttgggaaagcttagtaaatgtttgaaacatgaaatatcttgtgcaaattggagagatgttcaaagacattggtagaatatttgtatgagtgatctttaattagagtttcctggtcctgatttccaactaggaattgcaagtaatgctgtaaataaatagatatttaggaacattttttgtgtaagatacagggatattgataacaatgctaacataaagaaaagtgcatttgaaggtgacagacacagctctacaattattaatacataatcaaccatatgtatgtatcctaatacagatcttttagagttaaaaggatccaagtctgatcatatgtaaattctagtaaacagttttggtactgcaggtttctttttaaatgttagaaatccgattttgatcattgtctagcctttttttttattggaaatggttattaaaatacagttataattctgagggctacaaaaatttcctctcaaaaatgataatttaccttgcaatcaaaatactactaaatatgataatatacttttttatatgtgcataagcaaattgattgcaattaaattaagaaaaagacaacttattgagaaggggatgtaaagttgaatccttaatgtcgtagggactaacttgttgtagttcttgattttaggctttctgagtcttctccatgatcatatcaagaaaatcattatgttctcgattcttcaactttctcttaaaacgtttacaacttctagtacctgataccaaatctgatgcaggaacttaaaattcccctcatgtagcattttcttgagttatagaatgaggtgaaaagaataaaagatgactttaaaagaaaaaagatatcctaggtaatcacatctagattttgttaagcaattattcttggaaggaagacaatcaaatcctcaaagaaagcaggaaagatgttgaaatcctttagtaaatgactttgaaagactacctaggtttatatagacccttatctcttttctaataggatagttttcctaattccttggtttttcttgtcagaataggaaataaaaaacacatggatggaatatcatttagaaactgaaaaaaataaaaactctcatagtataatttgcgtaaaacagtattctcatggtaaaaatgtggtaagaccaatgggtgcaatgtggagatgatatagcttcatagtttgtagttctgactaaaaagggagcataaaagcatctttgattttgtacatgttgaacctacaccctgcatatgtcttcctatactgcagcttgttctcaaaatggtgtagtaactagtaagtttctgtgtatcgattggatgtgagagatataccctcccattcttttgcgatagcataaataacagttatgtattgaatggaacaatgagaatatttatgtaagatattgaagtgaataccaactaatcaaactgatttattttcaaacttgaataatatgagtggtatgactaaacctaaacccgtaagccatatgacatttatgccttgagctggactaactcatatgaaatacttgtttccaaattcatgtagtcaatttaacatatttgggttactcaaagattagagtttcaatcaggaagtgggttttaaaatgcacttgttaaggaattagaagtatatgcctatgtgtgtggaaacaataatcatttctcttgtggcaggattgtgaaccttgagatcaaagggtaaatatgatcaaacatgaggcattatatatacctggaataaaaaatcttttacagtagtttcttttctgtgtgtctatgtggattgtgtttgccaaaccgcaaaagttcttatcttctgcataagtattcctgtgaaaacttcttgtagtttctggggttgacacaagttgttgctattgcagatccttatcattttgaacgaa

SEQ ID NO: 12705 - DNA, 3812 bp, Vitis vinifera
  Intron number 6 from transcript GSVIVT01035919001 (locus G SVIVG01035919001) derived from phytozome v7.0 (chr-ID chr4 ; pos 5840222 to 5844033)
gtagagcatctgattcaaaacattctcttccctctgtgagtacactagtaagaagtgaaaaacttatgcatgtatatattttcatatatcatgcacacaagcacatttacatgttttcttagtatgtggcaactgctttttggttttgtgtttgagacatgaactatttgttgtggtagtcaacactggatcacttatgctgcttgctaactgtaaacttttatatcatatcatgattgcctgtctttgtttcttttttcatttgcctcttttttttctctttcttttgagagtatcagtgccagatgttaactcaattttacatttgcctgagacatttactttctgtttatgtgtttctagttacacccatggctgtaactccaacctaattgagaggtacacttggcaattttagcacctttggattaaaatttgaaacttttctcagcaaattttcttagatggaaatttggggttctaatgctctgggggaagtagctttcattgcatgacagcagctaagtgggggagtggatatattgatgatgaagtgaaggtgtctgcctaactggtgtttacgtccaagagtgatgggaaattggcgaatctggttcttaaagttgggtttctgctctttttggagtggatcgggtgatgccttatttgatggtggggctgctttcaggatggaatgggtgggtttggctggagggaagaggaggcttggtgggcagtgtcattgtgtataatatggtgacttgaaaggagaggcatatgtgcatttgtgggagagggtcttttaattcctaaattgtagtgccaaaaaggggtgcaccaaaatacacatgatgtatacaatgaccaccaaaaagcataaataaaagggaaggaaaaacaaaaaactattccccctttacttcctttgggagggaatcccaaggcttgtggcttttgggatccagtgattgagaggatctcgagaagattagatgggtggtaaaatgcttatttatcttttggaggtaagataactcttatccaatcttgcctcacccacatgccttgctacttcctttccttgtttaagatacccgcttcagtggctgcaaaaattgagagattgcaaagagattttttatggtcaagggttggggaaggtaaaagagatcatcttgttagttaagatgtagtgtgtaagttgaaggcaaaagggggtttgggatttgggaagattgctctaaagaatgtcactctcttagggaaatggttgtggaggtaccctagggagggttcaactctatggcatcagattattttaagcatttacagatcacactctaatggttgggatgccaacactagagtcagatggtcatatcgttgtccttggaaggctattgcacaagtctttcaggagttttccaaatttactcgatttgtggtaggagatggggaaagaattcggttctgggaagacttggggtgggggaatcaacctttgggatcccactatccaagactatttaatgctctgtggcgtttagccttttctaatgcaattcttgtttacttatcaaaaaaaaaaaaaaaaaaactatccaagactatttagagtagtcatggataaaaatattccaatttcttcaattctcggatctactcgtcccttatcttggaactttaattttcgccgcaacctatccgattctgagatagaagatttagaaggcctcatgcggtcacttgattgtttgcatttgtcattttcgatttcagatgcgagatcctggtctttatctttgtcagggctttttacagtcaaatctttctttcttaccttatcccaatgttctggttctcctccagttttccatactaagttcgtttggaattctcaagtccctttcacagtcaagacctttgtttggttggtggcacacaagaaggtaaatactaatgacttgctacaattgagaagaccctacaaagctcttagtcctgatatttgtaagttgtgcatgaggcataaagaattagtagatcatcttttcctatattgttatttgacgatggggttatgacagattatttcagttagccaagacggattgggttccctcgaggagtatttccgacatgctgtccatcaattacaatggttttggtttatctaagagaaggatagttttgtggcaagctgtgtgcatagctatgatttgggttgtgtggcgggaaagaaatgcgaggatttttgaggataaaacaaggaattcaaagaatctttgggattttattcatttccttgcttctctttgggctttttgttctaaggtctttaaggggactccccttattgtgttacaacttgattgactagcggcgtgtaattcctttgggattggtccagtctagagagttattactttgtattttcttgttttcgcattcttgtagtttagttttctttggtaggaggattcctcatccttctcttgtacttcttttttctatcatttttttcctttgtcgtttcctatcaaaaaaaaaagaaaaacagaacctgaccaattgatgaaatcaaataaggacattgagctttcacctgtaaactggtactcaaattaattttttcacgatggaagaaggggatctaacacatatatttaggatttcattaatggctgaagttgtaaacaagggaggctgcttttgctttttttttttttttctatcttttccttctctttttgttcaatgagtgattggatgcatctggtatacgtcatgtgttactagggttatgcaaacctgtagttttcttattggagtttgcttatctatcgaggtatgcatctgggtggacatgggatattatggacaaggaaagcaaagacattctactttgcttcgttttgtggtacttgttaatgggaatgtcaaaggatggtttggagattctagaggaatccattagggcaatcttctttcctcattcccatttactataatagtagatgtgcttatgtctggtttctagagctgaggaatgtggtgttgagggcttcaggtttgggagggatagaatgagagtttctcatttactgtttgcagttgacaccatttttcttttcatctcagcaagcaaggagtgtatccacaaccttaaattccttcttttgggctgctgcatgagcggaataattttttttaaatctattttttatgttgtcccttgtgatttccaaactcatttcaatggagaccatttgaagttactatcttgaatttcccccctgccccaaaaatgtaaatacattaaagataaaaagtcaaagaacttatttatgatttagttgatgatcaatgctgtttttatagtcctgtcctcagttgttgttagttcacttgagattatttcttaattctctctcttcattgtcctatttaagaaaactaaattacaaagaaaaaagaaaaaaagaaaaaaaaaaagaaaaggttgtgctgtcacatgttttggaggacttatcatctcagctatcttgctctattggcttatgattggtcagtctcttttttttttttaaacttctttttaaatggttgactgatggccaatttactgtgatttgcagtcagccatagttatttagttgtttaatttttgtctgaagatgttgatggtatgaaacataattcttcttacatgtaaagcatccaataagatgtggagtataaatcacaaattctgaatgtattcttttgttctcgttgtcttcgttctttatgaaaggaaattggaccaagtt

SEQ ID NO: 12706 - DNA, 1296 bp, Vitis vinifera
  Intron number 4 from transcript GSVIVT01023563001 (locus G SVIVG01023563001) derived from phytozome v7.0 (chr-ID chr1 4; pos 9582431 to 9583726 reverse strand)
aaagggttagtttatctctcagaatccttctctttttaattcttatgattttaattttccttttaacattgttatcaatcaaattattggaggaaaataaagaaaatttagattgagctggttcttgtttctctttttttattttcatttttcacctaaatttaacttaacggttaataatagagtttaatataattaaatgtttaatttatttatttttattcaggtttgaatggtggacgttgaatgtagtttgtatttattaaaatatttataaaattaattatgatatttcttcttactctaattggaaaaaataatattcaaatatcctaaaatatttgaattattaatattataaaagttttataataattaattatataattattatgaaaatttgtattggaataataaaaatgatttctaattatactttattagtaaaaaaatgctagaaaattttctaagttaacacttctacacaatgtacatatctttgcatgatgcttttataattgaagtatatgtttgattattgaaattaattcactaacttttatatttttaatttgggaaagaatatcaaattctattttttgatttacaaaatttattgaattatttactctaatgaatatttagatgaatgtaaattatgttttgggtttttttaattaagaaatatatattagaattagtggtagtttatttttattttgttgtgtgataaatgtatagaattttatggatttattttttattaatttattatctagataaaggaattttttataaacaaataaaaagtatttaagtagtatttttgtatgataagtttttgtagttcataatgaattcattctcatccaaattacacgagattgtggtggtttaatttttttttaagacaattagataagaatcaatcaaaatatttaaggcttaaagtaatttgctttaacaattaaataaaaaaatgggaaaaggaaaaaccaaacaaacgactcttttggaacatttcaaatgtatgagagttgtattaaaatgaattctacgggaactctgctatttcttgattgattttttccttacaaattcttatagttttagataatgaaattcaacttgtttaagcatgtacattttcctccacccttctttaagatgtagtttattgtgttttcctacacatggataattttcttttttcagttagtcaaaatatataaataacaaaatggtgggatgaactctgcaggttgcatttcctagcttgaagttctcattcatctg

SEQ ID NO: 12707 - DNA, 17994 bp, Vitis vinifera
  Intron number 2 from transcript GSVIVT01000842001 (locus G SVIVG01000842001) derived from phytozome v7.0 (chr-ID chr1 3_random; pos 2802764 to 2820757 reverse strand)
agtagaatgaaaaatcttcgaactttgactgcttttgttgtcggtaagcatacaggatcaagagttggggaattgagggacctttcacaccttagtggtacacttaccattttcaagttgcagaatgtggtggatgctagggatgccttggagagtaatatgaagggtaaggagtgccttgaccagttagaattgaattgggatgatgataatgcaattgccggtgattcacatgatgcagcaagtgtgctggaaaagctgcagcctcatagcaacctgaaagaactctccatcggatgctactatggtgcaaaatttccaagctggttaggggaaccttcattcatcaacatgatgcgtctacaactctctaactgtaaaaattgtgcatccttgccaccgcttggacagctacgatctctccagaacctctccattgtgaagaatgatgttctgcaaaaggtggggcaggagttttatgggaatgggccttcttcatttaagccatttggaagtctgcagactctggtgttcaaggagatgtcagagtgggaggaatgggattgttttcgagccgaagggggggagttccctcgtctcaatgaactccgtattgagagttgtccaaagctgaaaggggatttgcccaagcaccttcctgttttaacaagtctggtaattttagaatgtgggcaattggtgtgtcagcttccagaggcaccgtccattcaaaaactgaatttaaaagaatgtgatgaggtagtgttgagaagtgttgtccacctgccttcaataaatgagttggaagtgagtaatatttgttccatacaagtggaattgccagcgattttgcttaagctcacatctctccggaacttggttatcaaggaatgtcagagtctttcctctcttccagagatggggctaccccccatgcttgaaacccttcgaatagaaaagtgccacattctagagaccctaccagagggaatgactcaaaataatatcagtctccagaggttgtacatagaagattgtgattctcttacgtctttgcccatcatctcttcattgaaatcacttgaaatcaagcagtgtcggaaagtagagttacccattcctgaggagaccacgcaaaactactacccttggcttacctattttcgtataaggagaagttgtgattctcttacgtcctttccattagccttcttcacaaagcttgagacactctatatcggggattgtacaaatctggagtccttttacattccagatggacttcacaacatggatctcacatctctccaaagaatccacatctggaattgcccgaatttggtgtcttttccacaaggaggattgccagcttccaacctgagagacctttgtatcgacaattgcaagaagctcaagtcactaccccaacggatgcacaccctccttacctcgcttgaagatttggatatatatgattgttccgaaattgtttcatttccggaagggggtttgccgactaatctatcttcacttgacatcgggtcttgctacaagcttatggaatctcggaaggaatggggcttacaaacacttccctcccttagaggattggttatcgatggaggtacaggagggttggagtcattttccgaggagtggctgctgctgccctccactctcttttctttcagtatttttgactttccagatctgaaatacctggacaatctggggcttcaaaacctcacatctctcgaaatactcgagatgcgtaactgcgttaagttaaagtcctttccgaaacaggggctgccctcctccctcactgctctccagatttatggatgtcctgtgctgaaaaaacggtgccaaagggataaagggaaagaatggcgcaagattgctcatatccattggatagatatggatggcgaagtcatggactgatgaggatgccaagtttgaatcagttactttgacttagtctaaaatttgaagaattgaagtgttgaattagagagagatttgttatgatttgaaaggtgagggcatatttattatttatagaaattggaatgatataagtagagataataaattgaagagaatgatactaaaatttatttatttaaaagttgataaagaaacatatacttattaaattaatgtattagtagaaagtgaatgtatcccacctaaaaacacctacaaatctaatatattcaaaggtattgtcaaatatgtatcaaaatcatctacattaaaaaaaaaaaaaacattttaaatttttatttttcttagtgagaatgaattgttatgcatccattttaatcttgttattttagtgagaatgaaaacatgtacaacaattggaaaacaaaaaatgtggtgttttttttaaaacatatttaattattttcacttgttttttttaaggaatgttttaaaaaaaaatactaaaaacataaagaatgattaaaaataaaacactataaataaaatttatttttaaaatataataaacatattaaaaatattctaaattttcaaatagacttttgtttaaaatataataaacatattattgaaagccttaaaacataagtattcttaaatataaattatttaaataccaatcattcattttttttattagtcaaatcaaagtacgaactaatttaattaaaataagtaataagtagtcataaacttattatataatttgtgcaaacaaatgaattatataaataacaaaattttcataactttatatattgaagttaaattaaaagcacatacaatgaacaatctcatatcattaatatatatatatatagatgaaagaaattgaaactctaataggaaagcgttttcgaaaataatttttgaaaattaatatttaatatcttataaaacaagagtttgtttaagagcttaaatattcttaattcgttttctatatttttaaaaattatatcatactttgattatttttaattattcaccatatttatataaattatttttaaaacaccccaaaaaaactaacaactaaaagatgttatttcaagacacattatttttctatatttaagaacaaaatttttgttttttgttttttattataaagtgtgtgtgtgtgttttttttttttttttttacaacaaaaaacagttttaaaaaataatttatgtttacttttaaaaaattataataaaaatatatggttttttttatgtgcatgtaattttaaattataataaaaacaaatggaaagctaaaaagtgttgatgtttttttaatatataaaaagtaatagattaaaaattaaaattataaaagtaataatttaagttaaaaaaataacaaaggcataatgaagatttcaatttattcattttacaacttgaattgatttcaaccctattcatgattaattccatatacaattttttatatttttgtggattttagattcctaaattcgaaatttcaatgctttgggttttttcataatggacataggtctctattaaatctgctaaattatatagggattccatccatttcttttatgaccaatgaacaatattttaaatgttattattgtgaagtgttgtacttgaagaaactgtgatatcacttgttatactgaaaaaatactcttataactaacttgctatgtatgagtgtaagaaaacagagacaaaatcatgaacacaaaggtatatgtaattctaacatagctcaactaatcatgcctacatgtataaatgagaaaaactgattttggttagtatcataaagaatattgtaaatgacaatgataataagaattaaaaaaattatataattactgaattttgaaacatcctatatttttcctactaattttatctacttcatcgtaagtatttactctaccaagtgtttccaacaatctctcacatccttacatactaggtatagaatttacatgcccataacttctattttcctcgaggatagttatgctttggtaacatgatcaaactctaaagtctactttccatacaataaggttgtactaaattatcatgttagaaccaatactatcaatgcttcttccataatggcaattgaagttattgcaagtcattaagcaacttcacaagttacttagctatgacactattttagggctcaaaattatggcatctctaagacaattaaggcatgccgcaataatttttcaatagttttcttttttgagagtaaatgatatggtaaatcaaaacatattaaattgaaacatcatgtggttaaagaaatagtctaatttcaaaaggtgtccatcgaacacattggtacaaacatgatgatagtagatccttttacaaaagctttggtgcctaagtttaaggaaacatattcactctaaggggatgttatataattgttttaaacatacaataatataatttcatactcccttgtgcacattttataagataatagttaataggattgtcaaatttttgaaataaaggtcaggatcatctaatggatatttgtaggttattacttcctcatttaggctatctatattgagttaccggttgtgtgatgcatggaatgaattatatttgataaaatgatatgttaccatcatgatccatattggtaactgtagggaattaaaccgaattcccaacccgtgagaaacaaaaaaatagataaaacacacaccaaagaaaaacaatcacacacaaaagacagtatttacgtggttcggcaatttgcctatgtccacggagttgcagggatatcactattatcagggaagaatacagagtacaacctagcggctactatattctttatatatatataacacggcaaccccaccatactaaaaaaccctaattacaaaaggtggttccacaatgggctaaacgggcccaataggccttaataaatctcccattaaaaagccatgcaatattattcgggtcggatcatcaaactggatcaaacaaaactaggctccacaaagcccaacaaatctcccacttggagactagtccaatcaccaacatcaaaccgctatcctccaagaaacaatccctcatccctacaactcatcctcctgtcctcaagctagaagaccaattgaagctgcgcacaacttcaacttctcaatagtgacacccttagtcaacatgtttgcagggttcttagatccacaaatcttctcaagtattaccagtttatcctcaacaagataacggataaagtggtattttgtttgtatatgtttcgactttgaatgaaaagccgaatttttggcaaaaaaaattgcactctgactgtcactgtgtagaatgcccatctcctgcttcttacctaattcatctaagaaaccatgtaaccaaatcatctcctttccaatttcagttgttgcaacatactcagcttctgtagtagacaaagtaacaatcttctatagatttgaagtccatgatatagttgtaccacctagagtaaaaacaaacccagtagtactctttctactatcaatatcaccagcaaaatcagcatctgcataaccctgcagtttcaaacttgcacctgtgaagcaaagacatgtatctaatgaaccctttagatatcttaaaatctacttgactgcctcccaatgctgctttccaggcctactcatgaatttgctcacaacttccactgcatgtgcaatgtctggccttgtacacaccatagcatacatcaagctaccaatagctgaggcatagggcaccttgctcatatggtccctttcttcttctgtcttcaatgactgttctttgcttagtttgaaatgactacccaagggtgtgctcactggtttagctttatgcatgttgaacctgttgagaactttcttcacatactctgattgtgaaagcttcaatgtaccattagccttgtctctaatgattctcataccaaggatttgctttgcagctcccaaatccttcattgcaaactgtttggacaattgcttcttcagattattaatcttctcaatgtcaaaccctgcaaagattattaatcttctcaatgtcagaccctgcaataagcatatcatccacatacaatagtaatatgatgtaagaattgtcaaaggacttaaaatagcaacagtaatcagcttcacatttcttgaacccaattctatcataaaattgtcaaacttcttgtaccactgtctaggagcttgtttaaggtcatacaagctctttctcagtttgcagactagattctcttgtccctgaacaatgaacccttctagctgaatcatgtaaaggtcttcctccaagtcaccatgaaggaatgctgtcttcacatctaactgctcaagatgtaagttttctgtagccaccattccaagtacaagtctaattgttgatatcttcacaactggagaaaatatctctgtgtagtcaatgccctccttctgttggaaccctttaacaactaatctggccttgtaacgtttgctaccatcatgttcattctttattctgtatacccacttgttatgcaaagccttctttcctactggcaattcagtcagttcccatgtctgattccccaatagggaatctatctcatccttcatggctaactcccacttgcttgaattctcatcttgcaaggcttcatcataacactctggctcaccaccatcagtcaacaggagataatttaaaacaggtgaataacgttgcggaggtctaatgttcttggaagatctgcgaacttcagctacaggtgtactcaaatctacctgtaaatttacattctccttatctccttcaccccctttttggacagtactttcagtcaattcatctaagttgacaaactcagatttcttttgatctatctctataacatctgacactacagttgacctgtccttgtacataacctgttcattaaatatcacatttctacttttgatgattttcctgttttgttcatcccaaaacctatagccaaatttctcattaccatagccaatgaaaaaacatatttttgactttgcatcaagtttactacgagcatcagaatcaatatgaacataagaaacacaacaaaaaacttttaaatgtgaaaacttcacctctttaccgctccaaacctcctcaggaagtctgaactcgatgggaactgatggtcctcggtttattaggtaagctgcagtgctaacagcatcaacccaaaaagtttttggtagtccagcatgcaacatcatacttctagcacgctcattgagagttctgttcatgcgcttagtcacaccattctgctgtggtgtcctaggaatggtcttctccatcctaattccctatgcagcacaatactcactgaaccctccatctatgtactctcctccattatctgaccttaaacattttattttcaaatctgtttctgtctctaccatggccttccacttcttaaaagtttcaaatacattagatttatttttcagaaaataaacccatacctttctacttgagtcatcaataaaagtgatgtagtaccttgaacctcctaaggatgcaaccggagaaggcccccacaaatcagtgtgtactaattccaatttttcagccttcggtgtcctaccagttttcaagaagctcacctttttttgctttcctaagatgcaactttcacacatgtcaaaatcaatggacttcaattctggtagttttccttttgacaacaacatcttcatccctttctcactcatgtgaccaagtctacggtgccatatgcttgtatcaatacttgcatcagcaactgcaattgtgtctcttggacatgaggtcatatacagagtaccagtcttctttccacgagccaataccctagctccctttgtaaccttccaagtaccaccaacaaatagtattgcatgtccttcatcatcaagttgtccaatagaaatcagattcctcctcaggtcaggaatatgtcgaaccttctccagtaaccaaacagacccattgggcaacgatattcggacgtctcccagacccacaacatccaaggctgaaccatcagccaaatacaccttaccaaaatcacctgcaatataattctgtatgatttctcggtgtggaatggtatgaaacgaagttcctgaatccaaaacccaatcatcaagtggactgtctactgtaagaagtaatgcatcttgtacctcttctgttacagcattagcagaatcatcttcatttttcttcttagggtttttgcattgccttttaaagtgacctgttttcccacaattccagcattgtacttgttagcctgatctagatttgcttctgttccgattagaatttctggaatttgatctaccccgatttcaatttctgtcattacctttgcctcttgtcttaaggtttagggcagaaccagatcttgaggtttcacctgcatctcttcggcgaatctcctcaaccagaattaaatctcgtatatcattgtacttgagcttttcctttcccgtagaattgcttactaccatcctcattgcctctcaactgtttggcaaagaagccaagacgatcagagcacgaatctcattatcaaaatcaatttctacagacgacaattgatttgtgattgtattaaattcattcagatgttgtgctactgacgcattctctaccatcttcaaattgaacaatttcttcatcagatgcaccttattgtttgcggacgacttttcatacataccggacaaagccttcatcaaatctgttgtggtcttctcctttacaacattatgtgcaacagacctagacagagttaacctaataacttctagaacctgtttgtcaagaagcgcccattcctcagccttcatactctcaggttttgtccccaaaagaggcagatgcaatttcctcctatagagataatcttcaatctgcattctccaatacgcaaagtatgtgccatcaaacttttctattccagacgcctttcctgcttcctctgccattgctcccactcaaacctaaccctaggctctgataccagttgtagggaattaaaccgaattcccaacccgtgagaaacaaaaaaaaatagagaaaacacacgccaaagaaaaacaatcacacacacaagacagtatttacgtggttcgtcaatttgcctacgtccacggagttgcagggatatcactattatcagggaagaatacagagtacaacctagtggctacaatattctctatatatatatagcacgacaaccccaccatactaaaaaaccctaattacaaaaggtggttccacaatggactaaacgggcccaacaggccttaataaatctctcattaaaaagtcatgcaatattattcgggtcaggtcgtcaaaccggatcaaacaaaactaggctccacaaagcccaacagtaacttcattcgataagcatgtagtgatgatattatttttatgtaaccgcttattgaatccataaaagtttcaagttagtatgtgatcatttgcccaagtatgagaatgttggaattattgtgcattaaaattctatattacataggattagaacaggtggattaatataatctagtaggaagttttcatttgtgacactttatgggtaaggtcacttgacattatataaatgggctcttagtgcctttctccactcctcttaagtttgtgaggcttcccatcatttatgcaagaattatagagagtaaaaaggggtaagatataaggtgtcaataccaaaacaaagtgatgcaatttcataaacaatctatataagcttatctttctcatagtggcattatttgagtatttatggaattatgttgttttgttaaactagaattgaaaaatcttatttacttgattttctaatagattgtaccacaatgagcttgtctttaaatattttaaaacatgcatctaagagagatttgattagatagtctactatttgctcctctattagaatgtattgcatgtttaactcttttggcatgactttctcttgtatgaaatgcacatcaatttccatatgctcattcctcacatggaacactggatttgaagtcaaggaacctactatgaaattatcacagtataaaattagagtatcatcaattttaatttttaactctttaaacaaggattaaagtcaagtaacgcttattgtaactttggccaaggatcagtatttagattatatgctagatcttgctagcactttttttttcttgaccttcaatgtatcaagttccctctacgataaacacaaaaaacactaatggattttctatctacactagtagcccaattagcatcacaaaatccttgggaaaacaatccttgagttgctagtgagaattggtgtaaatgtagatccaccagcacctaagtagagattaccttccaaaaaaataataattatatgacaataatatatgtgtttagatgttgtccttaaaaagtgtggttaagacttttggagttctagaataaggtagtcatggttaactatcaacaaatcttttaatcgtcaatttgtatacaaaaggatagtaaaatcatgtgtgaaagtctttaatatgatcagtttcccaataaaaaaagaatataaagttgaagcaataaataaatagcctatcttctatgcttttgtggtaaatttcattttctaagttatgaaaaaataataaaaaaacagagaaagagaacaacaatgaagtttattttctttaatgtttttaagtgatgatgagacctttattttccttaaatatccttattatatgatttttttttccttttttcattcatatttctcaatcaattcattatgacgttcacattccaatttttcaaaaaaaaaaaatgaattacctataattttcatggcccaaggtttgaaataatgatttaacataaaaattcaagtctaaactataaattaatagataatgaaataacatttgtattataatgtactagtcatctattttcatgttcaagaattttcattctagtgtaaagggggaaaccaacaaaatctattttctttttattgaattatctaatcattatatacctttttttttaaataataatggtattaactttattttataagttttcaatttttttttatatattgataatattcaaaataagtttatattggtgaacaaatcacttgctcctcatgataaaaaaaaatccaactttcacatataaaaaaataaacataaaaacaaaaaaagtttcttccctatcttaagcattgaccaacattatccaaacgtctttactaaaacttaacatatcatatctacgaggaacatcatcactcggaagttcaaaaatgttaagctatgtttggttttgaggaaaattaagggaaaatgcaagaaaaagaaaatagaaaaaaaaaaaaaaaaagcagaaagaaaggaaaagtgaaagaaaataaaaactagcttcaaagtcaataaattattttttatgttactttaaactcattttactcattttaactcttggatataaagattaaataatatgaaaatgcatgaatttctacctagttttaattatattttattttctttggtattttcataatacaatcaaatataacaaaattatttttcttaacaatttttttcttttttgtgctttttaagaactaaacataactttaaagtctaaattatttattctaagtctctataagatttaaagagatgcaaaaattctagcttgttcgatttttagccaaagaaaatccaaattaatttggatgtcaagcataaaaaacgtatttgtgctaacaagtgaagattagtgtgttacaactcttaaaacttcttgaaagacatcttgtggaccccgcatttcggatcatgtgcttcccactcgatggagagctcgatttttattttgaaaaatgatttaattggttaaaaaaaatgacttggagttgccacttatttttgttttatttttaaagggtaaataaaataagaaagaaaaaccctaagtgtgactccttgttttggaaaaggttggtctacgaaaaatcagatcgggttcaggggtcaggttacttattgggaaggtacggtaaagaccgtagcacccctctaaacccctaaagttaggtctttactaataaaatgaagctgacgtggaaattgatgagtaaatcaatggataccccgaataaatcatgcacatgtgaaaatcagaacatgcgtagacactgatcagagtgaaagtgggtacgtacctaggcagtgagccaccatgcgctatcaaaaaggaaggttagtgctcaattaagaaacaatagcatacgtatcaaagagcaggataaatcaattatgtatgataatcaagtcaatcagtcagtcaatcaattgatcagtcacatatgtggggcccccaccaaagcccgtttactattgggtgaatcagtttcacaaattctatcactaagaattacgaaaataaattcacacttattttaaaacattttaaaatcatggaagttgttagagttacatgccgagaagaaaatggcggcaaaatttattgaaaatgagatcttgggaacctcaagaaaatgctttaaggatgaagaaaaatgtggaacgtcggccagacagaattccggatgtgagatatccggagaaggttgaacgtcagccggatagaatttcgaatgtgagatatccggagaaggtggaacgtcagccgaacaaaattccagatgtgagatatccggagaaggttaaacgtcggccggacagaattccggatgtgagatattcgaagaaggtggaacgtcggccggacagaatttcggatgtgagatatccaaagaaggctgaacgtcggctggacagaatttcggatgtgagatatcctgagaaggttgaacgtcggccggaaagaattccggatgtgagatatccgagtggaatgtcgacggagaagaattccggatgtgagatacccgggtggaatgagcgatgccacgtgtcgcaaggggccgtctgcgtgtcccagggagaggaagccacgcagcaatttttagggaggatcccacactcatgccatagtattcccatgagactactaaatctgcccttctttccacaaattcaaatattagcttcctacatcatcttgagacatcacctcccggtatgagatgcgtgggggtttacacatgatgaagataaacgggaataggagtggagtgatggatggggacgtaggcatgttggataaaacgatgaataataaacgagaatgggtatgaggatgctgatgaggtgagctttgctgccatgacaactactccagattttctaggatctccttcaagcagggatgagaaaatggatgcgtaccatggacggatatcaagagcagaggaggataacaaaatagagcacaaagagtagatacaagaaaatgagcccgacaagctatgcttcatatcataccaacaggcttagatgatggtgggtaagattaaatgagtatcaaatgaaaagtaaaacgtagttacaaaaatatctcatggagaaatcaaaaccagagcaaactaaaccactcaaaataactctctctagctaggtgggcaagaaatcggacaactatccttcctctcaagcaaccagccccggaatgcctctttcccactagtcctctcaagctaaactctcctctcctcttccccctcttttttttctgcctcattttttttttctatgtttctctctcttttccgcttcttggaatcaccttccttagcaagtcaccacctgcctcctcctgttcatgcatcagccagtatggcctgcccaactaccctcattgttgttgcacgcttcatgcagacgacatcaagctctcagctgggggtcccctaccctctctaaaaaatgtaatcccaaaccaagaaaaatccgttcccccctcctgacaaaaagctcctctctaacaaccaaaaagctcctccgaatctcctccaacaggtgtctccaccccattgcatttccaaaccactacctggttcactgaccacccaaccaggaagcaacatttggctctttaagagccctccacttggtaagaagtgtgacctgcagcaaatgaaaaaaaaaaaacgagccccatatgggggtctacacatctattttttactatttcactataagctataattctattatcattttttaactttaaaaagtactcacatactactgatggctctagatgagggcaaactcttttttttttttaatcagattttgtagttgccttctctattaatctttctgatatgtagatcatattcttgccactcatgaatctaacattatttatccatttcctttcataatttatttcttcatttaattcttattgttatttcttttagataggttgaattacattgttactgctagatccactttgtgaggactatgttttcatttacaagaatccaagggttgcatacacttcccatttttctatttttaagatcaaaagctttatataaaagtaatcatatgtctctaaaaatcacttttaaaaaagtaccaaaactttttaaaataagtttaaaactgctactttttctatgtaagtctttaagagttttgtattttatataaaagttactactattttttattttaaaaatagaaagcaagtaatatatgtaaatgaagactaagataataatgaatcgtgatgagaatgatgaggatgatgcttgtaacgacaatgacaatattatcattttattttattgaagggaaaattggcagatcagttcaattgacaagtcttttgttataatatgaattggtaagttaattcataggtatttctcatctcactataaacatagttcggctagtcatgcctacatccatggataaaagaatttttttcattatataatagagaatattataaaggacagaaccggatacaaatattgggttctcgaaacatcccatgtttctccaatccttgtatccacaccctaaaccacaagtctcctcgctctaccagatatctctcattcttcctcgtatttctatccacttcgtatactccttagctacaaactcatctccacttcataactttttccccttatgacctagaatatttataaagatattcctaataactttttttattctataaaaaaatctaatattacaatgatatattaattaaagaaatattatacataatattttttacaaaaagaaatttatattaattaggaatttgggacacttaccaaaccattcgaactcatatgtttttgttgttgggttgagttttattgaacaagtcaggtggcccttaaaatttatcaaaacaagtctttcataattaataacaaacaaattatataagcatgaaaaggttggtcatagttgcatgatctttaaaggacaaagatggtggaaaatgcatcaataggcttttcacatctgaatcaattttacattgaattttattttccaatcacataaatggaagcagagatcatcccactatcaaggtactcccatagtgccattcacatcaaaactcttattatcctaaaacccagtttctacttgattctattgtagttttcgatatatgtagaaagaaaatggaaaaagttttatttcaaaacccataagttataagtgcaacctcttaatacaaatggttctaaatcgaaatatgcactactcaaggttttcccattttctactttttatttttaaatttttactattttgattaccttcttcttccccatttgttgaatcattgtcaaggtcgattctcgattgttcagttatcttgcaatttctaaaagagggtttggccccatcatggcatcagttttggttcaagactgcttaagacacatgtgtctcgagtaggaatggtccatacacatcaagcaagctttttgctgaaagtttataaatctaagagaggggtgtttagagcagtagcaggaagtttggcctattcatattgtggtacggtattggcctcaatcacaattgatggttttcctttgtgattgttgagtaaacttgataggttttttctactgtgtaggctgtaattttcattccattgtgtttccaccgtcaacacaattacttcctagttataatttgaatggagtcatgaagtatggtttactggtggttgaagattcatggccatatctaaagtggatgggcttcagcatgtgccatatgatgacttctttaccagttgatggcataaaaaacaggggaattctaggacctatggctcttcaaacagagtccaactcagaggatgtcagtgctgagctttcatgattgtgatcccccaaggaaaatcaaagaaagaaatttgaagcttgttctttctggacaattgcagcccaagcttttgcattattttgtttctcctatttgcaagtttaaatatttgtattttctcaaaaattattatatctcaagttttttactgttatttatttatttatttttgtttttaaagaactcgtgagaattaatattgtaattcctatattttgctgtagtgaattatttatcagcttgtcctgtggtttttcccttcattattggagggttttccacatcaattttgtgtttttttatttaattacttctagagttttttattcattgtctactaaagtccaatttctctgtgggtgaagggccaaggacacaagtaaaaatttggtaactcagatgtaaggatgaattgcaatgtgaaaactatgggctcatttttaatttccaccttcacaacttcattatttatctactcaaataactgggtaagaagtatcatctccaaaagtgatgagcatgctttttttctttagtagaggtcaatgaacattttcttttattttaaataaggcatacgtgtcattgactaataaattaagaaagtctgaaagtctactaataaattaagaaagtaagatttaacatgggctttaatatatttattggtgtgagtcattgactaataaattttagttgaaattgggtgagatgagttggatgtcaacaaacttttttccaaataaccaattttaaataattttaatttctttttttcaagcagtctgtatgtttttcctctttttaaaagtaatggtggctgacaagattcttaatgtggccgcctgtggtccactattaaactattaataaaagaggaattgcaggaattgtgtaattaaatgtattaaatcactacaacaacaatcttacaatctgtggaaactttcccttctatctcttttgctctctccaatttactgaaagtatgtttgtggctgaggcaattggatcttccttccttggtgtgttgattgataagttgatcgcctccccgctgttagaatacgctcgtcggaaaaaaattgacagaacactcgaagaatggaggaagacgttgacccatattgaagcagtgctgtgtgatgctgagaacaagcagatcagggagaaagcagtgaaagtttggctggatgacctcaaatctttggcttatgacattgaagatgtgatagatgagtttgatattgaagccaagcaaaggagtttgacagaaggccctcaagcctgcacaagtaaggtacgcaagctcatcccaacttgtggtgctttggatcctagagttatgtcctttaacaaaaagatgggtgaaaaaataaacaaaatcacaagggagttagatgcaattgccaaacggagagttgaccttcatctaaaggagggtgttcgaggggtgtcgtttggaattgaagaaaggttacagactacttctttagtag

SEQ ID NO: 12708 - DNA, 9514 bp, Vitis vinifera
  Intron number 1 from transcript GSVIVT01026588001 (locus G SVIVG01026588001) derived from phytozome v7.0 (chr-ID chr4 ; pos 21318166 to 21327679 reverse strand)
aaagggaattctgtttatttatatttttcttttttgttattttcttaaaataaataactaaattaaaaccatcaaacataattttgaataataaattagcaagaggtataggaaagaattaaggttaaagttttagtaaaataaaagaggaaaagagaaaaatatatttaaaattaaaaagtaataaaaaaaagaaagaaagaggaaaagtgatgtataaaaataaactataatgtaatattttcgagatgttaatgaacaagatggatttttatttattaataatatcttctattttgtccaatcaaacttagaaggatttttcttattaaatagaatgtctttcattacggattatcaacccaatcttagtattgaaatggataacgtataaaagagaattacttcttctaaagaggcttccataatttatgttcaagcaaattatatacccatggacaaattgattgacactgcccaaccacatcatttgcacacactattattgtattatcatgaggattagctgccaaaggtatccatcaagtaatagattctttagattcaatgttaaatatgctccaattttgaatcattagtgggaaaattgcaactatcgaatttatcaaagagggttgtgtaatctaaataagatcataaaaaattaaggttttgtttggtaattattctcgaatacaattctaaaaaatagtttttaaattttttttatgatgttttgtataacttttatttaaaaacataaaatgtttttaacctaatttaaaaacattttaatatttaaaaataataatttttatatctaatgttttacttttaattattctatatgtttgtataattatttttttaaaatagtcctaaaaaactagtgaaaaaaattaaaaacaactaaaatatattatctaaaaacactctattttttatttttaagaacataaaacaaatttctacttatcaaatgtgtttttttttaattccgaaaaacaaaaaattgttctaaaatacagttgtcaaacaagccttaagtgtttcttttcaaaatccttattcattttaattgtttgacattattatgatgatttttaattagatatgaataaacattcttaattatcttagtatcactattgaatgtatcttcaatttattatctattaaataaatattttttttaaaaaatttacatgatattccattgaattgagatacttaattgaaaattgagtatcaataatttttttttaaaaagccaaatataaaaatcaatctccagtttattctttaaaaagagttgtacacttatatataaacaaattatatatatatatatacacggttttatcacaaatgatgcatattgttttgagaacaagccatctaaaaaatatttttagtgaaaacttatcaaaattattttttcagttatagaagtgtttcttatctaaacaacaaaaaactgtttttagtgctctttagtagagattgtagtgcactatctcccaatttgaggttattttcttttgacggttgggatgaagttctcatagagcgtgcattagtgtgtatgtttacacattggatagaattcacaatgaatcatgacttaagactattaggttatcatgattcactaaactaccatactacatggactctcaactttgagaagatattgaatttgtgttaaaatcaataggaaactttgatatgtaggcgaaaccttaaaatggtcatacatccttacagattcggtcattattgatggaggttagtgacaacatgtattttcgataaagacactatgatatttcataggattgagacagtgtatcatattaagttatcaaaatgacatgtgataatgaagactatagacataacaattcctttaatggaatttgatatatgttcattgaatgtaaagtatgtcaattgatcacataatatatggatttaaggattggagagacaattttgataggttgataacactaccctattagattatacagatcagttcatggggggtctgtatgctatggatagtaggtcatggatccacgcttcgccttattatagcttcataagatgttggagtgtggttgactctctttagtggggagttaaatcaacttcaaaactggattatgagggagatattattttcttatgggtcttaatggtctttgcttgagcttgttgttcatggtggcatgtttgttttgaggatattttgactttctagttcataagtgtacatagggtattggtaaaagtgcaatgttgcagtagatattttgaattgtctttctggactcatttaattaattaattgaagcccaatagatctagttaattaattaggacctaagtgggctatattatgtgacctaagcctaattttggcttaagttacttaagcctacaaggaaaacccccttaagagtttaaggtttagatttttgcctatcatcttctagcctctagaaagagaaactctaaccatcctttaaagagaaaaacatcctctaggttctctagatctgtttatcaaattggtctttacatgtcatatttctagtatgattagatctagagaagcctagagttagattgcatgcacactattgatttaaggatagggaatagagtgatttggtgttctcagcataaagccttattccactaaaattaattgtgctttgatatcatgtaagattcaaacaatcataaagataaatgaaaggtgaatctcaataatggactacacctagagagagagagagagaggggggaggggggggaggggtgaataggtgtttttgaactaaaaaaaaatttctaacaaagattacctaactaaagaatttctcaatgtcaataaacttatcttctaacaatatttcaacaaagtgtaacatccacaagcaagtgtgtatgcaccaacactctcccaacaatgtatacatgcaattcacatgcaaatgcgaatagtatagtgagagaaaaagacaattgacacaggattttaacgtgaaaaacctcctaagagataaaaaagcatagacctactattgatcgaaaacattcactatgaagaataaatattgaatacaaggttttacttagctcaagccaaccaatccttcctagaccacttgactagtaccttcactttcaacttctcatcttctttcagagcacacttgaagtttgcaccaaattcgatctcagcctcttcttaaattcacacaagaagaaaatgagtttttgcacaaaaccaaaagaataagagttgaatgtttcagaaatcaacccatgttcattttcataaaatcctaaaaaaaattcttagaaaacttgtgggattttcttatgaggtaaacatccttaaaatggtgaggaaagaaaagccctttcactgttgccgctctcactacttccagaaatgtgagaaatttgattttaaatgagaaagaaacccttaatctaagggctaaaaattgatcttaaaaacaggttagttggatcgatctgcccctgcacctgaatcaatctaaaaaaaggggaacaaaagtcttttagcaaaaaacatttctccctgctttcttaactctttttaagatgaaaaataaggttgattcacattcaatcatcacacactcggctacataccttggtctcttagcaaaatcttaatcttcaagggtcaagtagtccaaagaggaattggaaaatcgagttaagggacatttaggaattttgtctgaaattgtctaccctgctaaactctcacaagaaagaaaagaaaatctaaagttttttattctcaccactgaaaaaatatgtataatacaaattgagtttaaatgggtcaaacaaaaaagaaaaggaccagtttacccttactcttaaaaaagaaagataataaatctaatataggaaataaataactttaatacatatatcctatcttatatttggttgaatataggatataacaattaatataataacttattctatctcatcgtcaatgaaataaggaatagaataacttaatttaagtattaaatatatcaaatatgtttaataaaaaaacttaatattcaagttacttttaacattaaggattaagttaaataattaaattatttttaattttcatttttttaccttatttatccacattgatgggagcataatttagaattagaatttcatatctatgactcattttttataatagatattgtatgattattttaagtatctataatactttcaatatgaatgttttataaataagtttattgcttacaattaataaaaatgattatgggttaaaatcaattagataaatattagttaaaattaatgaggtgtgtcgatcatttagaataaattttaggttaattttattaaacaactttaatatttaaagtaaaaaataaataataaattttaagttaataatataaaaataatttaacttaactcgatttaagttattaaataataaatatttatttttatcaaacacctctttgagtatttggtaaaacttaatatttattatttaatgacttaagtcgactttaagttaaattatagttaagttaacttaaaacttattacttaattattactaagattgttagataaaattaacataaaatttaatttaaattatcaaattgatatatttattttcataaattataattagggtagaggaggtcgaataataatgaaaattgtggaatagtaaaagagattgcgcaaataattaaaataaatgaggataaaaaaataaaataaaaaatttaaaaataaattaattatttttatttattacttaaaattattttaactttatagcatattattaagttatgtactaaatatacttaatttatttagtaacttaaattaagttatcaaattactttaagttattaagttgatttatccaacaacgactttgttttttttcaataattattttcatggttgtctcgtattcgattttcattaatatatagtaaaatttttaaaatatgtaattcttattacgtttcattttctttgacgttgtcgttgatgtgcttttccaaattttcaccaaatatctctcctgtacaaattagcataatgtcaacaaagaccacaatttggtagctggcattcccaaatgtcaacttcttcacgtggcaggaaatttctttgatcacatttaattattattattattataaatttatcttatatagtttcttggctttcagtataaaaatatcaaatatcaaacctattatcaatgtataaataacgtgtcaatattaaaaatatattaatgcacctaaatatcaatacataaaagaaaaaaaaaagcaacactatgatccatgaaaatattgaagagatgttaatgaacataaatgttgatgtgttttgtaaataaaaaataatatatattaaaaagcaatattatgaactttttcttaatttttagattgggctaattttttaaataaaattagtcaaataagtttaaaattagttgcaaggcttaaagaagaattttttatttttacactccaagtgattatttagtggtggacatgaggttgagtgttcaaatgagttgatttgatttgatttgacataatatttttaatagcctaggaacaatttctagtagttttttttaactacttagaataaaaataaaaaaaaagaagtaggatgatattttttaaggggagtattttcttttagtttttttacaaaaacaaaagtcaagaatcttatgtacggataatttgagataaaatttatcagtgaaataatcaaattagggtttttggacatctttaaaaataattcaaaatctttattttttattacctttaaaaatcaatttatagtcattttgattttatagtcattttgattgctggattttgtttacctggttgatgaatccctttttcttttcttttctctattcggaactctatttttattttttacttattttgtttgggaatcagtcttacataccacttgtagtttccaagatcgtttttcttgggatatgtctactatgtttttagcttgattcgggcaagagccctaaacaaggtaaaaatcaaatatcgaagtgggcatataagaagaagtgcttaaaacttaataaaatggataaccatattcaacatgaatgactttttggtagtagactataccactacacttcgcctatgaaaaatggctacataattgatttgattaatcacatgttagaacaattgttagggatctatttatcattaccaacacaaggcttcgagtcacgccttttcttctttctttgctaagctttttcattttcggagcactctttaaatttaaaaaaaaattataaaacacctaaaatttgtaacaaagcatcttcaaacatttgaacgtattttactatttttaaggttctgggaatcacttccaaaatggagcataaaactcatactatttgaaatactaaattaatcaaaacccataactaaagttagattccaatgattgctccaatcgtggacgtgaacgatccacgacatgaaagctaccttttgaattctaccatattcataaaattaaaagaatcaaaactagccagacacatcacccacattattgactttccctactcccatgccaagttgcttcctccaaccacaaaaacttctatcaaaattaatcgctatcgtgacatctatcttcaaaataacaccccccacgaaccaccctattttgaattcaaaatcttcattcttccccacactttgttgccgaccttttgctttcatttttccacgtgtttccttctttgaaaatagacataaaaattaaaagacaaccccttttgatttgaccaaggaagcatacaataaataatatttatttatttagttatttaatatagtgaaaaagttaattgaatgtaataataaaatgatcatgggatgataaatacttgcatggaaggccacgtcacaaacagtgtaacgatttaaaggacacatgctttgcgatcctttcgtcacttgcgtaagacacaaaatgtattacatttcttgtaatcatctatataaaaatataaaataaaataaaacaaatggttttgtttgaaacttcctccttaggttcaatgtttgaagtattttttaccaagcttcaattttaatttgcttctaaaaatatataattttttttcttaaatgttgaataaatttttttattaatattttattctttatattaaaataacttagatatttataaatattgttataaaattaccgatttttttaaaaatttaaaattatgagatttaggttcataatgtatatcgtgagtttttaacgccctctttcacgtttagtctccacttttagttcacatgtgagttctataaatttggtaaataaacatgtgatggtgaggttcgaatacataattttctatcggatttaagctcatatcgtatatcatacacttttaattattatctttaaaagttatgagtttgactttaattttaacttttagtaaaattcaattcaaaaattataatgaatattgaatgacaaatctcgtgatttaaataaaaaaacttagtgcataagtttaaaaaatcttgtgtttgacataaacccttttttcttgtggaggaagttctctcatgcatatttttatcatcaccgtggtcctctaaaattatgacttagacgttcaattgcaattttggactaaaagcaaaagaaaaaggaaaaaaatcaaagcaaagatgagaccatgaaaaaagaaagaaaaatagggagataattagaagggaaaacgtcccacaaaatggatggtcacaatcagagtggtccaaaatagatgcggggggagagttgaaaacttggaatgaggcattaaatataaggaattggttaaaatgtgaaaagacaggggaaaatagagattacgtgaaccgtttcaagactccaatccaataaagtaatgggggggtgtatgattaatgacagccaaactcttatctatattttatcacctttcttgtctcttgggccaccctaaggtaagttgtaatctggacttattggatctttggttttagctacacacacccccccaatcaaatttatttaaaaaaagaaaaaagaaaaaaaaagggcctgttcttgattatcttttgacgtgatttatttatttattttttaatattttaatatttttaatattttgattttttttttggggtttgactgcatcccaaaaatgaaaagtaggctaggaaataataatgggattttttttgattggttggttggatgacttaaaagacaagattgaaaatgatactgcttaaccaattacattgatgggtgatttggcagcctgtttatttttatttttggtacttcttaaaagttaaaatatatatatattctatttttttttattaccatgtgctaaacatcattatttttactatttttttttaataatttacttcatcataaataatgatcgaatatgaaaaagaaaaaatcattataacataaattaaatgcaaaaaattgcaatattcaatggctagttaatattacctaaaaaattgagaaaaaaaatggtaaaatttaatttttttttttaatttttaaaattttaaataaattattggtaacaaatctagaattgtttatgtaagatatattcttcatattcttaccattaactactcacaacaatcaatattcaacaaaagaagaatttgtcacaacatttgagccaaaacattacgtaaatgtaaaggttgttaatggaattttgacattattttcaattttccatgaaaagaattattaaattttgtgggtcaaaaatttatgtgagatccaagacaaaaagataagaatggtggggcaaatgagtaatttgggatgtaaatgcggccaaagccggtggaaaaaagagggaaaaggtgggctacgtgggccggactctaactcaatttagcaccaccaccacttgttctccccctcgtccccatctccaccaccaccttcctttatctctccattcccatttcacccctcgacctctccataattccaacgccatcctgagtcttccatcatcttctccatgttgtcgccaagattaaaggcctagatttgaagatgggtagggtggttcacacctgatcgactcaggactctctctctctttactagttataaagaaaccctaattcacctatagggtgtttacttaacccaataaaaatggtagaattgagaagcagaagctgaggctgagcccatctcccaataacccattcattttacccattattattttctttcaatttcactttctttttccccaccacaattctctgctgtaatttcccgagaaactc

SEQ ID NO: 12709 - DNA, 5187 bp, Vitis vinifera
  Intron number 1 from transcript GSVIVT01034041001 (locus G SVIVG01034041001) derived from phytozome v7.0 (chr-ID chr8 ; pos 15638487 to 15643673 reverse strand)
gcttgacccctctgttaagcgcaagccctttactggtaatctccatgtcgatctaaattggtttttcatttccagaatttttttaaaagcttcttttttctttttggatttcggatcgaggttcatatcgcttaacctatttagatttgattgtgtgatgtttcgttatgtgctgggctgtatttcttgctcattgttgtaattttgataatagacaagtacccatttttccttgaatcgggacttatgttgtttgagagcatttcttttcagaacctagaaagaatcttctcttcactggttatgaattctgaaacagatgaagtgggttttttctttcagaaaaattgaattgagctggttactggaaatctctgaataaatgcagattgtaagtataattggggcataatcggtataagttctcagatgttaactgaacaaggagtagcaaattcaatccctagtatgatcaggatatggtatctcttaccattcattattattgttattatttgtatgaggttgattagcaaaagggaactgccgttggtggcagacacaatgcttcaagttattacccttgtttttgggagacactacatcagacacattgatccttgtgtttcataaagttagagtaagtattttagtttctattaccactgattttgaacttcctgtgatttggcacgtaagcgttgtcctcttcctcaatggtatgttgcaaaactgcaaccaaaattggatgtttcactttcaagtttcatttgaagattcattttaaattttgtcacctcattatttttcgcaagggtttgctctgatcccacattgagtgcaacgtcatttgtatattacattgatgagataccatatttggcttgcttcataactatattccttgttattgattgtctgtaacattgtattagtccatgtgtatgaacacttggtcctattatctattgtacaacccctaccgtcattcatctaatgttgttgattttccatatatttgcctcagttcataactatattctttgttactgtttgcttgtacttcgtattatccatgtgcattggcaatggtgctattatccacattatacactgttttttgtcaatttcctgttataccatatttaacatgcttcataaccattgtttggttctaacctcgtattagccacatttatggcacatgattccattattcacactgccatttacccatgtcctcatttgtgtattaccttgttgagactccatattgaacttgcctcttaaaaatattctttgttatcgattgcttataaccttgtattaagccacatgtactggcacacaattctattatctggactgctctttacctatgtcctcatttgtaaactacccttttgagatttatatttagcttgcttcataaatatattctttgttcttgttttcttgtagcctcatatgagtcacgtgtattgacatattattccattgtctgcactgctctttgcctttgtcctcatttgtatattaccttattgagattccttatttaacttggttcataactatattctttgttatggattttgcttatgccctcctattagccacgtagattggcacatgattccattatccccactgctctttgcaattcaattctattatctacactgctattcatctttgtccttgtttgtaaattaccttgttgagatacaatatttgatttgcttgaataactgattctttgttattatttgcttcatattagccatgcagcttggcacgcaaatccattttccgcactgttgtttgtccatgtcctcgtttgcatattcccttgttgagataccatatttggcttgcttcataactatatccttcattattttttgcttgtaactttgtgttatccatgtgtagtgacacatgaatgattctattgttgacagtgctatttgcccatgtcctcattggtatattgccttgttaagataccttatttttgagctgcttctcacaatgacattctttgttctggttgctcataacctcgcattagtcatgtgtattgacatatgattgaattatccatactgctgtttgcacttgtcatcatttgtatattgccttgttgagattccatatttagcttgcttcataattatacacttcattattgattgcttacaacctcatcttagctacgtgcatcgacacatgattctgctactcactgatttttccccatgtcattatttgtctattactttgttgagattccatatgcttgctttgtaaccatattctttagtatagattgcttataaccttgtaattatgtgtatggacacatgattctgctatatttgttactttttgaccatgttctcatttatatattaccttggtaatatttcatatttgacttgcttcataattatattctttgttattgattgcttaacacttcatatcacccacatgtattggcacaagattctacaatccacgctgctgtatgcctatgcctttatttgtacaagttcatacaaccacatgtatcagtacatgattctactatccgcattggtgtttgcccatgtcctcatttgtatataaccttgtatctaaatttgtatgttatcttgttgagatatcatatttgacttatttcataactagtttcttcatttttgattgcttgtgacctcgtattaggcatgtatattggcgctcttctgtccacattgttgtttttcagtggctttatttatatattaccttgtgtcctcacttgtatttcaccttgttgatttaccagttaccactgactttcttcataatcatattctttgttattgatgactagtaacttcatattggcctcatataagaacatatgaggtctgccatctgcattcctctttttggccatgtcttcatttctacagtatcttgagatattgacttcctttagaatcctattctttgttattgactactagttacttcatgtttgccttatataaggacatatggttcagccatctgcacagtttgttacccatattaaccatgtggatggacattctattctgctatctgaactctgtttgcctatgtcctcatttgtgtattatcttgtggacatacatatttgacttgcttcatatcaatattctttttattgactgcttgagacctcctgttagccatgcgtacacagaatgctgttggcaaatattgatgcaagatggtaaatgtaggttagtgcctacacaaaagcatacacaatgtgtacaaaggtgccaaaaggccaactaaagctaagggctacacaaaaagtaactccctcacaggcttatggatgctaatggcacgttgttctatgatctttccatcatttatttgtattcataattgaactatacaaattaatgtaccattcaaagcaatcatttgcaacaatggccatggcaactccccacatctggatatcaagacataactatctatgtttatttcttaatgtaccaaattaaatatgtattatgtctctgattgagtttatgtgtgtatgttgaatagctagagagagaaaagaattaatatctttgtagggttgtcctagttatgatattctataactgattactgttaagtttttgagaaacgtacttggtatgatgatggatgattaatactatcacaataattagtaatttttttttttacatattttcagtcatttgaattgaaatatgtgcatacacgtatgaattaaacaatatctaggtgccccttcctatggggagttatggggtttatcttttgagatccactagcacctcctaaggggttctttggcatctggttagggctaaaggtaggtttaatttttccgaaaaagaaggtttaaaaaagtatcactggcaccaatgatgcaagttccatattttcatatcttatgtatgaagtatagtagattcgactattagtttgggtccatacttgaggtattgactcagatgcaaatgaggtgtagattgttcaactttttaattctggactgagttgagtcatgtttgattggctagatcaaaccagaaatttgtttgtttcagtttggccccaagttgcacaaaaccaacttcacctatgtacccatgttgacatgacatgacatgggtgtgggtatgggatccttgtgagacactctaattttactttgggtgtggctatttgattttttattgatatcattttattctttcaacctttttaatgataattacattagagaagaagaaaagttagctgaaaagtgaatttttgtaagaatagttagggatacaagggagaaaagggattaaagggaaaagattggagtttttttaaaaagttatctttacttccaatttatttttaattaaattttcttttattctgctgaattctagtacttgcgcccattttttggatccttttcagccaaatcctcgtatcctaacatttgagttatgaaggatcacttggacacatacctccatttgacactcctacccgaacccatgcaacatagatgtctagtttgtttatgttgggattaattctgttttgccctagtttaggttcaacttttacaacaacaatagtatattttagatactgaatcctgaatgctcaacttctagcaatggctggacaggtaatacttggatatgattctatagatggatgacagcagaattgatcctcttaaaattcacaatgtgtaacatcttttccaatggaatcatgtctcatccaagctgttcatttgttgaactacttctgactctcccaatctgggaacaaccttaagaatcagcattcagagattgttgttttccatatttatggcacatacacatacacacagatatcacacactcatgctttttgacaaagatggaatcatgcctgatactaatgttttgtggcaataaactgtgagattccttttgctaccttagtccaggctacacacatgcaccttatcataagtagcatacggttatccagatatggaagtttattcacatttgtgtgcgtgcaaaaagttgtcagtgtgtcagtctttgaactttcaatggtgcaaatcatggttcttaatgaactgagttgttgcag

SEQ ID NO: 12710 - DNA, 2399 bp, Vitis vinifera
  Intron number 1 from transcript GSVIVT01022826001 (locus G SVIVG01022826001) derived from phytozome v7.0 (chr-ID chr1 2; pos 19013811 to 19016209)
cggccctgtcttctctcattcctctaatattcttggtaaggaatggttagcggtgttttggttaaggtttgtttggtgaatttaaatttactgtctttgacttctgcaaactgcaaggaattgcatgatttgatttgatgttacttttctgaaatttgttactattttttcataatagcttcattttatttttctggtttgaggataatatcatgccaacttaattgtgtagaattacaactaatgtattagaaatttgcatagatgtgatgattagtaaacgtaatgaacttcctttcatgaagagaaaggtctaaattcacgataagtgagtttagattcatgcctttcattttacaatttagcttctttttgttgaaatgtatgaatatcatgagatgctgcgttgaggaattttctggtgatctaatcatctatgactaatgttgtttttgggaacttcaaaatctgtaaatgcattgaatgtgttggccaaaatggatatgggattataggtattggatgtatgtatgataggctgtaattgagtgtttatcagatagaaaatgtccaagaaaggaagatagtacatttgggtacctaattaacctgttaggtgctacattgattcttagaatgaaaatatcaatgttcaacattgtttgatatactgaaacttgatcttatggtagccaaaagctttggtaatttggaagtttcccttagttccaagattcagggattacttgaatctgcttcctgcattaactcaccacgcctgacatgagtatttaggtgagtccatatgagtatgtaacatggattccatgcatgatttggtaagcttgatttaataaatgatatctgttaagaactgacctttgagggatggataaagaggcttctatcatttcttattctctagaaaatagccctgtacacaatgtgtgtgtatgtatatatatatataaatgttggaagcaattgtccaagaaaagttttgtttcagcaccattacagtggcatgtagtcaaacctctctgattcatgctggaagaagccttaattcaattaaatgaataagatgcccttctggcttggctctagtggtaaagggttggggtgggtttatgggaggttctaggttcaaatcccaatagggacaaaaaatgcaaaaagaaaaaaaaaattgcctataaaaaaaaaagaaaaaatgaataagattcgaatttatgctccatactgatacaaatttatacattttgctctattcttgttctcatgctactgacttgggagtgatcagtaaggagagaaagcaagttcaaaaaagggaatgaaatctgcactatgaatgggtgatagaactccatagaagagtgtttttctttaaaattggaatcctataaggaattaccttaccctcctttaggcagatgtttaactctttgcatctgtgtaacaacaattttctgatatttgtttgatgtatggctttttcctttcttcaaggacatctttctagctcttttttcatcattatttattttattttattttattttaaaaatttaataattctttaataaagttatcatttctttacaaagtttaaactacctcaattcgagctccaaaaaggctgaaagttttatttctattctctaaagagaatgcttaagaatgtataagtttgtaacttccattatactttattttccttagtatttttcatggaaaaccaacgaggtttccttcatattttttttccttgtatggttgtaacttgatttcaatatttcactttaaacatgtgcaagctcttgagtcacttatctagaagaagagctatcttgtacaaattcttcatgcaaaaaattaggatttccttcatattaaaaatttaggtttgtagatactgttttcataaaatttaacatcagcctggaccagtgttggtcaggtagagattgactgccaccattagatgggctgatgttagatggttacagttaatgtcattaggcatgttctgagaagatatatgtcaactgatgaaacagggcagccacatgcatggaccttaatgcaattctggtaactttacctggtgtaaatggcaatattgtgtatgtgtcatttgcttgtttgtatttttcattgtttggaccaaaatcttaacttcaatggccttacaatataaaagtgaaaagtgtgagaggtaattgctttatcgtctcctctaatcataattacctgagtgaaatatttgcttttcagtttgttgctagtgttcctactgttaaataatcacacacgtgttgtgcatatactggttcattattgtcaaccagtaaagtcaaattttattcctttcctttgcagctagggaaaaggcc

SEQ ID NO: 12711 - DNA, 3436 bp, Vitis vinifera
  Intron number 7 from transcript GSVIVT01031449001 (locus G SVIVG01031449001) derived from phytozome v7.0 (chr-ID chr6 ; pos 18396109 to 18399544)
ttattgaggcaacggcgtactgtatctggtttaaggtattatctttattatgctgtatttataaaacaaaaaggatgtgtgttcctttctattttttccagctgatttgttttttactttgcactgtttttgctaatgttctattatggtcctttttctgagtgtcgtagatgtcattttctttctttctttacttctttaatttttttctcttctttgtgtatgtgtgtggggagaggatgctgctgtgtttggagaatgttggttggaggtttactccagaagagaaagttacgcagtgggggacttttatggtttaaaaattataaagagggctgctggatttcctatgttatactagagctatgtgactttatttgattattcatatggacacccaatctttcatggaaattcaaaaggtggatctggggaactataaataattttcagcattttagccttacaaagaccaaattctcaatgctagtgatgtcattgagaatttttagataaatttgactatgatcaggagaaaaataattatcatttcaaccatagtaaatgattctgaaaattatgtcattgacatattgtaatctaatatatgccatggcaccaggaactggcaaatactttattttacgaccttgacatgatgtaatagagacatgaacctccagaaacaagaagtatgatgtgattttttatccataattcataatacatcattgacaggaaaatgtctaagttgaatgtgtaccacacacatgggtctgtggttgatatacgggattagtcctttcaaaattgaaattttctagtcatcttatcattgttcagttggagcaacaattcactttgattggaccaactttttcttttgtttgtttgtttgtttttttttttttttttttttgtgcataaaatagattggactaaccaattcaagttttttgtgacttatttatgatcattttgatggaaccaactagtgttgttagtgtgtaaaatatactggcctaaccaatctaaattggaattgtcaggttatccctgatcattggtcaaaactgcaaatcatattgatatgatcaactagttttatttgtttgctgttatacattctcatttggtgatgtaatcctacttcccttcacttttcaattcaattgctacagcattaaaatgtatactgttcttaaacaagtaaaactttctcattttcatttaaccttggattccctttaaaggaatttcaaatagaattatcattttttcttagcaacttctaatttttgttttaattgatattataatttaaaaacacacacagccacacaatatcaccatctgaatagctttattaatagtactgataacaagacttaaaaattgataatttgcagctaaatgcattgaagatattgtgtgggatgtctcgactcttttttccgtgtaggagtctgtcccttcatgaactaaagcatttaattttcttctaacattttgaggctgtgattgcattatggttgaagattgtgatcacaataagtattgagattacagatccatgttgtgacctcagtctcccaggttcctcaatattctttttaagccttgtcacctgcacttttactctgtaaaaccttataaataaaattgaattttccaatttgcttattaattacaatattagctagaacaaaaggatgttagcaattttagcaacagtactgggatatgacaacagccttttgattccccttaacttgtggaccaaagcttatgttctacatatttttggatcatgttattaatagcagcatgatttacatttttcagaaagtaatttcttggatatgcagtttcactttcctgcagtttatcactgacaaatttgtactgattttaatttctattacaacctctgttacttgttctttatgatgattgcttccagcctcttgaagagtttatggtaggggggattaagtatacatattgttgcactgcccagtattttgagtgtataatacatatctgaatggtagtagatttttagttccgagaccccttatgactgtaataacatatattttcaatttcaatattgtggatcaccaagctaataattacctctatactttcttttttttcttttaaattccattaccaacgttgatgagaatgatgagggctatagtgggaagacatgttgcaaatgagtgtgagagaaaacatgagagatgctccaacaaagatcactaggagagcactgaatgtgatattgactatgtatgatgaagttctatgacagggccattaagggggagtctatggcactgctggatgagttggaaaggacaggaattaggaagaagagagcatgagtaggttggcaaaacctgatctgtcaattgattctggaggaattgggataaggtgtcaataacagctatcccgatactgatgattctaataaaatgaggtttaaatttacattttatttaatgaagtttaagatcattatttatttaatttgatataactcatggcaggacatgtcataaataagctttcagtgttcattttttttttttcctttggaagtagctttgccagccctttttgttgaaactacattttcatataaataaagagtttccaagtatggttatggtctagataacaagttttcaatgttcattctgtgtcgtgaattctcatgcaacataacacccagtagtgccttagaaaggttccacttactgataaggtatcaacaaatactagtaccagggccagagctatacccgtgcttccttgcttccaaatcttggcaactgcaaagtgcacagaacaacaggtctcttttcagaaaaattttcactgctccggctgatgatttcagtagaagaatttcttgctggaatttatgataagttccatgcagtctagcactctaaaataccaatccatgggttaaactaatacctttgcagtttaccatatgcttatatatttccatttttgtgtcctttttttaatctgtcattaaacgttctccaagtattattgtggggtttttgtgctgattgtcaacatgtgtcttggtttactttctacatcattattactttttgcatttatgtgttgtgtgttatctgccattgggttattgcaaagactcatatgttctggttttggcattttggccctggttatgtgaataattatgttattgcaataaaccatatcgataatgtttttatctctttacttataatttatctatgaatcgatgtggttactgttattttttcttaattgcatgatggtaaaaatcctcttcttcttcttcttctttgttttaccttatattaattttttttaagcagggaaggatttctttccagattggacaattctgttt

SEQ ID NO: 12712 - DNA, 8081 bp, Vitis vinifera
  Intron number 18 from transcript GSVIVT01030071001 (locus GSVIVG01030071001) derived from phytozome v7.0 (chr-ID chr 12; pos 9557769 to 9565849 reverse strand)
gaagtgggctactaatcggagtttcaattgggtattgcttgacctcatggaaacatgagtggttcgtgaaaaccattggaaagcggcaaagaaaatggacaaggaaagaaggaagggggcagagaggctaaatttatccaacccaaatcttcttgaaagatttcttaatctatgtatactatttgcattgttggacttctttcttcatttctatttcctttttagtcatggtgttacttccacttatgtttgtgttggcgaatcgatgtaaaactgcttgggtttcttaataatatatagtgtagcaatgcaacttgattatggcttgtattgaactacagactgaaggtgttattcttgtcatttcttttatcattccttcttccttttatcaagttgtgcgcttacatattagaagtactatcactagcttgcatgtattagattcttctatttatttcacatagaaaaaggacaagagtaaaatgaaagttgccttgcattggagttaagctatttaatgggaagttaagctacagtatgcgtcccttgaggctattttacttgcaaaccttcttgtagttggctaagtcaaactattattgggctcatctacatcaacaatgttcttttctatccaaggtttgaaatatcagtaaatacagatatattggtacttgaattttatggatatattagaaaatattttgacaaaaatattcaaaattcatgggaaagtttgaaaaactcaaaaaaaaaaagaagataaaataagcaaaaatataatgttaaagttattttataaatataattgatataaatataaaaatttagtttaaattcttttaatatatttatcttcatttattttaattttttttaaaaatacttttattaaaacatattttattacatttaaaaaaattaaattgatttatataaaatatttttaaaagatttaatttctaaaattttattacaaatatgtggtgaaattattttctattaatattaatttatttaaataattaaaattattaataatttatcttatcaaattaattttaatttttaaaatattaggacttcattattttttttatattgtagcaaattttgagtaaaattatattatcaatattttaaaataaaaacatttaaaattaaataaaattaataggataaagaaaaaaaattaagagtgaagtgatagtaatttttaaaaataagattaatgagataaatataaaaagtagttgaaaataaaatgataatataaatttaaaataaaatatatatattaaaaaataataattaaaaatggataaatttgaaaaaaaaaaaactcaaaaaattagcaattttttgtgcttttcttccctgtcgccccacgctcaattttttcgttgatattttggtgattttgctgaatttttttcaaaattcatgtcgatcgataattggtgtctgtttcaagctctgttgatatccaatatttcaccgatattttggcaaaaaaaaaaaaaaataataataaccgacatttcaatccttgtttctatcaaaaagactttgtaattgtgaagatccatctaattatttgtccttgttgaaaaagtgagagggagagatatcaacacccaccctatgtttggttttatcattgaaaatattaaggacaatgaaatataaataaaattagttaaaattttgtatatgttagcccaagggttctcctaatcaggttttgatgataacaaaccagggttaagttactaattggtttgaattgttaagaatctcatgtattaatttaaaaattcatcaaaggacctaatggatacatgatcaagacatttggaagacctttaatcatagaaaacaaatgtaagatgaatgcatgggtgcacttaggttttacatatcatttcatgcatttttggaaaaacttggtttattttttaaagttatagtttgttttcattaaaacccaagttttatcaaatgtacttgaggcaaaacgtttcaaaaatgacatattaatttacctaaagaccttacctaagtgttagacgagaaaataacaaaaaaaaaaaaaaaaggttttcggagtaaaaatgttgaatcggtcgaggcactgggccaaccagctcaaccagctaggataccggtcgattggttccctttgcccggtcgaggagtgtaaaaacacactttctcttccagtagcctttccttccctatcgaggtatcttccttcctggtcgacctctgattgaggttcgatcgaagcaacggtaacatgccaaagcattaaatgttccaatggctagtgatctggtcgacccccaacttgatcgattgaggctgcttttttattttcttggctcttaaggttagaaacctataaatagagagctccacttcttttatgagatatagaacacttgcatttatttttctacccacttgttcttgccttaaaagctctcatttctttcttggtgaattaaattttcacctgaatatcctttagtgcacctttgtgattcatcctagctttgatttgtatttaagctatcatttagctaggttgagggtttcatttttgtaaaattgagcgttaaagccttcaattgagttgaatcttgaaaagattgtgtaagagcccattgcagtcggaatccaagtgtaaagaagattagaggcttggttgaagtttcaagttagtggaaccctcaatctgttaagatcttgatgagagtggacgtaggcaaggaagtgttgaaccactataaaatttgagtttgatttttctaactctatctctttatatttgtttctattgtgcttgaatttgttgtgttcaacaagaattttaaaaacccaattcaccctctctctctctctctctcccccccctcttcttaggtgtttttctcacttaagattagcctttattttctcaattggtatcagagctaggcctcttgttttgcataagaggaaatggctattccatcaagctcatctcacattgaaagttttgcataaaatagagctccattttttatgggaatcgacaatccctattggaaaactaaaatgacttggtatttacaatcaaccaatttagacgtatgggatgtcattgaagatgacctaacttttatttcaaaactatttgatggagtcatggtttcaaaacccaagcaagaatggaatgagcttgatagaagaaattttcaattaaatgataaggtcatttacactttgcaatgcactatggatagaaatgaaaataatagaatatgtcaatgtagatcggctaaagagatttggagattgcttgaaataactcatgaagaaacaaatcaagtgaaagagtcaaaaatcaatttacttgttcatagctatgaattgttttttatgaaagaaaatgagactattgttgagatgatcactaggttcaccgatattgtcaatggttttgaagcattgggaaagacctacaaggaatctgaaaaggttataaagatcttgaggtcagtcccatcaaagtggcatacaaaggtcaccacaattccagaagccaaagacttgaccaagctacctatggaggagctcatagggtcattaatgacatatgatatcaatttggcaaagaagctaaaagaaagtgaagacaaaaagaagaaaagcatagctctcaaagctacacctaagaaagaagaagaaattaaagaaaaaaaacaaagtgaaaaagatgatgatttatccctcatcacaagaaagctcaaaaaatacatgagaggtgaaagttttggaggaagaagattcacctttagaagaaacctttctaaaaaggaatcttcatctcatgttgataaggagaaatgggaagagaaaagagatttggtatgtttcaaatataagaaattgggacacattaaatatgattgtcctctctacaaaagtgaagtcaagaggagaataaagaaggcaatgatggccacttagagtgaaagtgaagaatcctctgaataagaaaaggagaaagaagtggcaaacatgtgcttcatggcaatagatgaacctgatgaggtaaactctaactttagtgatgaagatatacatgatgtttttgaagaattgtgtgaggactttgaaaaaattagtttgaaaaatatttctcttaaaaagaaaattcaacaacttgaaaaagaatttggagaagtaaaagaaaaattttcaaatgttgaaatttctcttgaaaaagaaaaatagattttgagaaagaaaaatgaatggttgacctcctctctttcaatattttcttgtggacaaaaatcttttgaaatgattctagctagccaaaaaatgtgtttttgacaagcaagggctatgattcaaatctttaaaaaatcaaaagtattttaaaaactattttgtaaaagaatccacaagtgcaagtccttccaatacttgcaacttttgtggaaaaggagggcacattagtagtacatgtcatttgagaaatggttctcaaaagaattcaaatgcaaaaactaaaaaggtttggattgaaaaatccaaggtcactaaccctcaaagacccaaaaagatatgggtacctaaatcaacttgagttttatattgtagggttcaaagaaggataagtggttcttggatagtggatgctcaagacacatgaccggagatgaatccaagtttgctttccttacaaagaaaaatggaggatatgttacctttggagacaatgcaaaaggaaggtgtggacccgcatttctcacatgcacccccactcgatcgacaagacgagtttttatttggtgaaaaattagttttggaaaagtcggagtcgccacttattttattttattttaaagggaaaataaaacaagaaataaaaccctaaaaaatgacttcatagtttttggaaaaacgtgtctttgaaaaacccaagtctaggtcaagggattaagttacttattgggaaggtacctttaggaggtagcacctctctaagccctataaaggtctctattgactaaattgagggaaatacggtaattaattgattaattatagatacctaagcaggctaggtgatttcaaaaataacatgtctaacaagaaagccaagcacaatcataaagaagatttagggtgcgtacctagaccacatcttaaggttgttacaagacatcagagttagttcaaataatatatcttccaacatgcgctttattagaaataatagaacaatgaaagatgtatatatcaagacactcaagcactatcaagtatagatgcagttcacagtgacatgcatatttatagaatttagaaggtgggtgatagatgacgtaccaagacagcataaataacttataatgcatttccacatgacatgaggggttagataataataaaataaagaaatcctagcatgcttgttatctaattagcataaacaaaaataatcaaagtatacaaaatcatcaattatcgcacacatcttatatataattcctaaaaaatagatacatatgatttcaataaatggcaagggtgacaacaaagatgagttttgaaaagatgattttatgtaggggtttcaccaattccccaattgatatacacaaatctggcttggaattatcccatttatttgggacaacaagcttggattcgtgtcttactcaaaaccgtagtttttattgaaaactaagtaggatgcgaacagaaaaaaaatggttgcatattatttttaaaaaagcgagattttgattctaaggactctaaatgaattatttttaacacaaatttttcaaaggtatcttttgagaaaagcatttgatttaaaaataaaggaaattaatatgaaaacaacaaaacacaagaaataaaataccaagcaaaacagaggaaaacgaattcacaaagtgaaaattttgacaatatgagcaaactaaagtggtaagaatggaagccaatcttcactattttttgatgacctctaaaaattaaagataaaattattatagcaactaactagagatttttagatcctgtaaactaacattttaacaaatctaactttcaatttaccaccaagaattacaagctaacatttaaaaaaatctaactttcattctattactaagaactatggaaaacaagtgtctaaaaaaatctatcttttagatgatcatcaagaataagaaaaaaaaaaaaaaaaaacaattaaagacttcaagaaaatcttaaactagcatagataatcgagaactaatcgttggaattttaaatgcatctaaacttaagataaatcaatcacgcgcttgtttttaaaatgaaactaataatacgagattatcataattataaacttagtttcaaagaaataataaatgtcattgggcatcaggatcaccaaaacaacatctaataaatcaaagaacaacatataatggcatagatcatcaaaaatcaataacttattgcttagaaatgaatataaattaacatgggtttttaaaattaactactaaggattttgggaaaaataaaaatcaacatggatcaatatagaaaagatttcataagtatgcactaaggtgattgaattattaaattgactaaaaaaaaaggtagtttgatttccacaatatgacacattttcgaaagatttcatgagtgttgatttataaagaaaacaattaatttccaattcgatagttttaatgaattttatttataaaagaaagtttagatttagacaaaatgctttaacttcatttaaaggaaatgcttttaaaaaaattatttacaagaaaataaatgttattacttttgtaaaagaaatatttcatgagtattaaaaaaatagttgatttccaattcgataattttaatgaattttatttacaaaagaaagttttgatttaaaaaatgctttaacttcatttaaagaaaatgctttcaaaaaaatttatttacaaaaaaaataaaaataaaaataccatgattcccacgtgaaacagttcagtgttaaaacttcatataaaaaaaataccatgaatgattctacttcatttacaaagaaaagaatttcctaggaagaaaataccaaaataataataataataataatagtaataataataataataataataaaacctcatataaaaaaaaattattccaccatttaaaaatattttataaatgtaaaaatatcttttacaattttatttgaatttttctttaataatttttttagactttattttattttcaaaaggatgatttccacaactttttatttagaaattattattatttttttgaacataatcaattttataaataagataaacaattattttatattttaatccaagaaaagaaaaaaaatgtttaaaataatttaaatattacgatttttttttatttgaacaaagctctcataaaaaattatccaaacacttaaaaattctaacttttccattatcatcaagaattatccaaaactaaaaattaagcacaatataacttttcattaatatccaaattattgaaaactaaaaacttacaaaatattctaacttttcattaacatcacaaaattatccaaaacgaataaaacatctaatttttaaactatcatcccgaattatccaagacaaatgcttacaaaaattaacatgggattagcaataataataataatgataactaatataaaacaaaaaataaaaataaaaaattcaaaaactaacaactgaaaatcctaacctgatttatattttattcaaacaattattaacatatctcatataaatccattagatatttttttttttacaaaataaacaacatgccactcacatagcaacacgcattcattggaagttttttttttttttttttaacaatcccatgccactaacatattttgtaactagctacattctcaaatgaaattttcaaatcaacttttcaatttcttattattgtttccttcaaagccaacacgtcaccaacataccttc

SEQ ID NO: 12713 - DNA, 1280 bp, Vitis vinifera
  Intron number 2 from transcript GSVIVT01018976001 (locus G SVIVG01018976001) derived from phytozome v7.0 (chr-ID chr4 ; pos 18186394 to 18187673)
ttttcccaactcggtcacacacagttgcagctcaggtatgagtgccttagcttataagattaacgttttagtttcttttcattaggttggtgtatattgcactaagcgtgcaaaatatgccgtaccttcacctggtatttaggtttaatcgcatttgttgtaaaatgactcaaatttatcctttgaaacctctctatgatataaatgtttcactttgtacttgatatctatgtgtatgcatatttgaagtataccattagggtgcatgtgaaaattgagttggcacattatttttcatttatctaccacagaaaatggcagctatcctcaaatgattgtgaaatcttgagatggccagagaagctaagccacatgcttttctgaaaaattcaggaaagcaaagaacgcaaagctcagatgtcatcaatatagatgacacaatgaattattgccttgctatatgtacaacagagataaatacatccccatgtgatgcagatttgggttgatacaaagaactctatgtctttgggcatggaagagttgctaaccattacaatgtcaatattccagtgtcttacacaaaaagcattcaggaatttttgccttcttttcatgttcttttaatcttgagtccaaaagtccaaaatcatgcctttatcagttcaagataatgctttaggtacagaatcaaattattcttggaacatgctttggcaaacttattttataagtatgcatcctctttcttatagccaccataagttgttgggcccttataaaggtttcacatttttgcagaaatggattatgttccatctgtactactgcttgcatatgggattaaaaaattgtcaagttggaccttggtagtttttccggataatgctttattttggataaatctttctgctgaaataagttgttagcctgttagagatcattgtatgggcagcatgggttactagcaaatctgctctactgctgttgtattttagtttgtaattttttttaactaagtgattttggaattgtagtatcagttaggaggacttacataatggaagccagacagtggacattttgagatgttatactcagtgtattctgttattatatatctgattctgtgccttaggttgatgtctggttgtcccttttttaattgaatagatgtaattgcatccagctgcatcaactttgagtcaccatgtaaaattatttattacaatttggctttgttgctgatctttagtgtaactttatatagggtggtataa

SEQ ID NO: 12714 - DNA, 24420 bp, Vitis vinifera
  Intron number 3 from transcript GSVIVT01029778001 (locus G SVIVG01029778001) derived from phytozome v7.0 (chr-ID chr1 2; pos 14525896 to 14550315 reverse strand)
tggcgtcaagaccacggttcaaagttgcggtatcggtcactgacttggagggcccctaggcgtattggtttggtatcgggcgatacgtaaaataagctaattagaaaattcaaaaaattataaaaatattatgtaaatcatcagaaaaatatatacaattaaataagctcaaaaaattaataaaataaaattgtctcacatttgacattatttaaatagttataaaagtattttgcttagagttatttatgataatgctaataaaagaaaattattttatttcaaatataataaaatttttactaacaaacatacaatataataatcaattccatgttaaatgacaacggggttcaaaatcatcatcatcagtcctacgacaagtatataaattggggtggcaattcctatagtgaggatatggttgaaagagttgttcataactcgaatatgctggctgagatgattggcttgatgatccataatcaggaaaatatggtttcgaaagctgtttcgggtcaacaccatattgatagtatccaaaacctcaataagcaatgctattgctatgagaagattgatcatatccatatgaatcactagctcgtgttcctgtatttaactatcccttgagatgcatcattggaaatcgatcaaaatcatatctactaaaagtactggaagagctatcacggtctctaaagttgtgatatgatctatcatctacccctctgaaatacgaccttgatcctatacccaaattctgtaagtgctcattgatactgtgataatttgatctatgataatcatgcccactagaataatcatcatcgctaggaaatgtaattagtctttccaaatgcttttgttattctcatatccctgattgatatccatgatttgtatcttgtgtggcatagtaattttcaccttcttatgcccatgacatgccatggtctacttgactaacataaccacctccagtgctaccatctccttccatgctaccatcttctccaatacccccactagtgccaccatcccgcctactgcgcccattgtcaccatcaccactactagaacttgaagaaatcgttctaggagtcttacctttatgacaggaatcaacatctctttcttgtgtagcattacttgtacgcctactaactctacgatttgtggcaccatcatcttcatgaactgtttctctaccttcttcattagtgggaagacctttatccacccaatccaaattattagatgataaaataggctcatctccttctcgtatccactcatctaatatatcattgattactactcaaaaagtgctattttatagcttgtaattaactcttttaaacacttttgagtagtagttattgccttttaactcaattggcatgttaaggacccttgcaatcatttctaatcaaattgtgttaagttttagtgtttttgatagctttttttttatcaccaaagcaatccaagaatgaggaagatctttgtatatttcatggcaaagcaagttgaagctcaaattcatgaagaaactaagctttggagcttcatagccctttgtcaaagccaaacgaggatgcaaggaagaaaaacacagaagaaaccaaccatccagcaatttcgcaagttgtggaatccaacttgcaaaattttcgcaactagcgaagtaggaaggggaaaggaataactgcaagacaaagagctgataagttgcaggacaattttgcaacttgcgaaatggataatttcaacttgagaaatttttgcaagtttgcgaaatccacctataatttgagatatttgcgcaccgactccgtttaatatttatctttagatatttgtgtttaaatccctattttcttcttgtaacccaccaatgacaatttttcttggttgggaagttagcaggaggggtgaatagcctctctatataatatctattgtaattttcttttagaagatcgctcgggagtttttctcagggatgacactttgtatagtttttcaagaaagtaatacacagagtttggctttgccttacattctcattttgttttctcattatttttatttctagcaaatcaaactctgaggatgttttcccagaggatgagtggctaggctttttgtttcttggagtgaaggaagttgggtaaggttccggatataaaagtggaagttttgttgtttcagtttttatgaagagaaagtgtgacccgttaatggtttttatccttttagttaacttaaaattccttaaaatcacctggtccaacacttggtaaggcaagtgatcttcgttcattgagatacactagtttatctcttgcgagcctttgggaggtggtttaaaggtaggattatgtagaatagccaacacttggtaattttttggactcccaggagacatccattagttatctcttacgagcttttaacgggtaattcaaggttaaggatcaccctgaatggccaatactaggtgagaggtatgaaccattgcaagatgattcagtgatagagatttagtgtttgaaaccataaaagggaaacatctgtaccacaccggtttgggaaataactatatgttaaatccccaatgcgaggaaaatattcaattgaccgaaatatctctttttgtatgacgaacctgagcctagtgatctaaaactccaagaagcacttttctttgtaagtaatttcagttactttatttttggtttcaccaaaaaccaaccttttcaaacttatttatgttttcttttaaagctaaccttgaaaagaaaaaacaccaattcagtttttgaactaatatcagttgtaatttaaaaactcatccctatggacgatcttaaagccactatgttatgctagctaatgctaccctagtatatggtgaaataggtttataaattttgttgattactatgtctgaggactgaaatcagagtacaccagttgattgaacaccaatcaacagggcatacaccaactaggcacgaatcaaatggcgtcgttgctggggatggtgccaattttatagtgatataaccttttccaaaacacttgtgatgaagataacaagtttggtgatttttcttttcttttactaactctttttaattgtctcttttacttgttcatattttagtctatcttttaatttagtttttagttaatcttagttttttgtagtattattttcttttgttttctttgtttttgttacaattgttactagttgtgtatgccatattggatacgagatagtggaggaagacttttaaaaattgaaacacctcacgaaacagagttggaattgtgcttgaacatcatagaaactacacctaaagatcagcatagttaccatggtcactaggacaatcccaatgcattcagatcaatgggggaccgcatgcatccacctcgtatgagtgcaccatcatgcatagtgcctcatacagagcaactagtaatcagactgcatattgtgccacttctacctactttcgatgggatggaaagtgagaatccctacgcgtatatcgaagaatttgaagatgtttgtaatacattccaagagggaggaacttcaatcgacttgatgaggctaaagctatttcctttcactctgaaggataaggccaagatttggcttaattctttaaggccaaggagtatccgaacttggactgatttgcaagctgaatttctcaagaaaattttccctactcataggaccaatggcttaaaaaggcaaatttcaaacttctcagctaaagagaatgaaaaattctatgagtgttgggagagatacatggaagctatcaatgcttgtccttaccatggctttgatacatggctattggtgagctacttttatgatggtatgtcttcctcaatgaagcaactctgagagactatgtatggaggggatttcatgagtaagaatccggaggaagccatggatttcttgaattatgttgctgaagtttcaagaggatgggatgaaccaaatgattcatgcctaattggtgtatcagctgattcgtgtccagctggtgctccttgaatgagggagtaatcaacaaaatttataacctataacaccatacactatgatagcaaagaaaaagctactatagtatagcggctctaggatagttcactgggaaggattaacaagctatcaatgatgccaattccaagtgaattggtcttgtttcatttcaaggttagcttaagaaataaaacacaaactttgattggtaaaggtttagacttaaactaactaacacaacaagtaataggaataacttaggaagaaaaacattccttggagagtcaagttcactggggtggttcctcatgcaaaagacatagctccggtcagatggttcatttcctcgcgttagagattcaacatatagtcaattctctaaccggtgttgtacagatacatccttcaattagatttcactttaattctctcactgatgcaacttgcaatggtttaagcctctcactaagccttaaccattcacggtgatctttaaccttggacttcccttctcaagctcgtaagagataactaatggatgtctccttggagtccaaaagcttaccaagtgttggcaattctagaaaatcctaccttgaagtcacctcccagaggctcgcaaggggtaaactagtgcatctccatggttggaaatcacttgccttaccaagtgttggcccaggtgactctaaggtgttttaagttaactaaaaacatagaaatcactaaaggatttcacttcctcttcattacttactaaaaccacaaagcttttcattcttgcacttggaaccttccccggcaaccttagctccaaggaattagaggtttagttactcattttctggggaaaactcctcagagagttcataacttagtaataaataaaaaatacaaagtgagaaggtaaggcagtagaaagaactgaactttacttgcttacccaaaactttacaaaaggatctcctctctgagaacaggctcccgagaggtatatatatgaacataatataaaactaattattacattgatattttctcttttttactaacttaaaagctaaggaatcttgtaattggtggcttacaaggagtattttgggatttagacaacaaaaatctgatgtaaaatatctcccaatgtcagtagcaaatatcgggaggctccaggaaccatttcgcaagagaaaatggtgtctgcgagatttcgcagacactcaagagggctgcaaaatcatttcgcaacaacatgctatcttctcagggctgcgaagttggcttccaccttgaggttcccagcttccctctcgcggtatatgtcgggcaacttcagaaggaaatacaccatactgtacaaaaaggctgcggaatcacttcgcaacaaaagggtgatttcgcagcactttgcaaaatgcttccttcagcttggagtgattggcttacaatggctgtaacttcttcgtttcaactccgaattgcacaccgtttgaagcagtggattgttgacttcctgagatttcaaatggtatatagcatgcatcaattggacttcagaaagtgctccaaaagtggctactatgactgtcatcaagaatatgcttcatgtcagattctctttactttttctccttgcaatccggatttactcttggcaaatgaattttaagctttgcccaagattcctcaaaactctcctcaatcttgaattgctttggtgatcaaattactaaaaaaaacaccaaaacttacacaaagtgattaaaattgctttcaagggtccttaacatgccaattgagttaaaagggcaaaactactactcaaaagtgtttaaaaggattaattataagctatcaaataacacttttttgagtagtaatcaccgaacaggggagaagtgggaagaatgaagtctcaaccaaatgctcttaatgctaaggctaggatgtataccttgaacgaagatattgatatgaaagaaaaagttgtagctatgacaagaagattggagaagctagaactgaaaaatatatgtgaagtgcaagccgtttctgaaacaccagtgcaagttatgctttgttccatttgtcattcttatgagcacttggtggaggagtgtcctacaattccaattgttagagaaatgtttggaaatcaagcaaatgttattgaacaattcaagcccaataacaatgcttcatatggaaatacctacaattcaaattggaggaaccatccaaatttctcctagaaaccaagagcacttcagtacacacaaccaagctaagcatctcaacaagcttcaaatcttaagcaagtaataatgaatctaggcaaggtcgtgggagattttgttggagaccagaaatccattaatgctcaacttagtcaaaaaatcgacagtgtaaagaatacattgaataaaatgatggatggaatgcaaaaagatctatctcaaaagatagataatctccagtactcaatctcaaggctcaccaaccttaacacagtgcaagagaagggaaggtttccttctcaacctcaccaaaaccccaagggtatccatgaaatggaggctcatgagggagaatcttcataggtgagggacgtcaaagccatgatcactctaaggagtggtaaagaggttgagctgccaacacccaagccacatgatgaaacagagagtgaaaaagagacagagaagagagaagaaatcaaaggaaagaagaaagggagtagtggaaggaaagggaaccatgattcaacagttaatgaagatttggagaagatagttatcaatggagatgtgatgaagaaacacatgcctccaccttttcctcaagctttgcaaggaaaaaagggaatcagcaatgcataagaaattcttgaagtattgaggcaagtgaaggtcaacatcctattgctagacatgatcagacaagtgccgacttatgcaaaattcctgaaggacttgtgcactatcaaaagagggttgaatgtgaataagaaagccttcttgactgagcaagtaagtgtcattatacagtgcaagtctccagtgaagtacaaagatccaggctgccctaccatctcagtgatgattggagggacttttgtggaaaaagctttgttggacttgggggcaagtgtgaatttgttaccatactctgtctacaagcaattgggacttggtgaattgaaaccaacatcaatcactctatctctagcagatagatcagtgaagattccaagggggattattgaagatgtcttagttcaagttgacaatttctactatctagtggattttgttgttcttgatacagacccaattgtcaaggaaactaattatgttcctatcatacttggaagaccattcctagctacatcaaatgcaatcattaattgtagaaatggactcatgcaactcacatttggcaacatgacattggagctcaatatcttctatatgtccaataagccaatcaatccggaagaagaagaaattccagaagaggtgtgcatcattgacactttagtagaggagcattgtaatcagaaaatacaagagaagttgaataaaagtctcggggatcttgatgaagggttgactgaaccctcaaattttcttgttactctaccagattggaggaggatagaagaaattctacctttgttcaatgaggaggagacacaagaagctgttaaaaaggaggccccaaagcttaatctgaagccactacccacggagttgaagtatgcatacctagaggagaataaaaagtgccctgttgttatatcttcatctcttaccactcatcaggaggagtgtttacttgaagttcttaggagatgtaagaaaacaataggatggcaaatatctgacttgaaaggtatcagccctttagtctgtacacatcatatatacatggaagaaaaagctaagccaattcatcaacctcaaagaagattgaatcctcatatgcaagaggtggtgcgagccgaggttcttaagctacttcaggccagtattatctaccccatattagatagcccatgggtgagtcctacttaagtagtgccaaagaaatcagggatcacagtggtgcaaaatgataaagaagaagaagttgctacacgcctcacttcaggttggaaggtatgtattgattatagaaaattgaatgttgtgacaaggaatgatcattttccattgccatttattgatcaagtgttggagagagtcttaggccatcctttctattgtttcttggacagctactccgggtattttcaaatagaaattgatgttgaagaccaggagaataccactttcacatgtccatttggaacatatgcctacaaaagaatgccttttggtttatgcaatgaacctgcaacattccaacaatgtatgttaagcattttcagtgatatggtggagcgtattgtggaagtttttatggatgatatcaccatatatggaaacacatttgaggaatgtttagtcaacttggaagctgttctgaaccaatgcattgaaaatgacttagtgcttaactgggagaaatgccattttatggtacagcaaggaattgtccttggccacatcatctccaagaaaggcattgaagttgataaagcaaaggtggaacttattgtcaaattgcaatccccaacaactgtaaaaggagtaaggcaattccttggccatgttgggttctacaggaggtttattaaagatttctctaaactttcaaagcctctttgtgaactattggtgaaggatgctaaatttgtatgggatgagagatgtcaaaaaagttttgagtaactaaagtagttcttgacaaccgctccaatagtgagggctcctaactggcaactaccttttgaagtgatgtgtgatgctagtgactttgctataggagctgttcttggtcaaagagaggatggaaaaccctatgtgatctactatgcaagaaaaacattgaatgaaacgcaaagaaactacacaaccacagagaaagaattgttggatgtagtttttgcctttgacaaattttgtgcttatctggtagggtatttcattgtggttttcactaaccactcagctttgaagtacttattgacaaagcaagatgaaaaatcaaggctgattagatggattatcttactacaagagttcaatctctaaatcaaagacaagaaatgagtggaaaatgtggtagctgaccacctttcaaggttggctatatcgcacaattcccatggtttacctattaatgatgatttttctgaggagtcacttatgttgttagaagatgcttcttggtatgctcatatttccaactatctagttactggtgaagttccaagtgagtggaaagcacaagataggaagcacttctttacaaaaattcatgcctactattgggaagaaccttttcttttcaagtattgtgcagatcaaataataaggaagtgtgtccctgaacaagagcaacaggggatcctcagtcattgccacgaaagcacatgtggaggccactttgcctcttagaaaacagccaggaagatgctacaatcaggtttcaattggccatcacttttcaaagatgctcatgccatgtgcaggagctgtgatagatgccaaaggcttgggaaactaacatgtaggaaccaaatgcctatgaaccccattttaatagttgatctcttcgaagtttagggcattgacttcatgggacctttccctatgtcttttggtaactcttacattttggtgggggtagactatgtttctaaatgggttaaggcaatcccatataaacacaatgaccatagagttgttctcaagtttctcaaagagaacatcttctcaagatttggggtgcccaaggtcataatcagtgatggaggtactcatatttgcaacaagcctttttaaactctcttagccaagtatggggtgaagcacaaggtagctacaccttaccacccttagacttctaggcaagttgagttagaaaacagggaaatcaagaatatattgatgaaggtggtgaacacgagtagaagagattggtctgttaagctctatgattcactatggacatacaaaacagcttacaagactattcttggcatgtctccttatcgcctagtctatggcaaagcatgtcatctccctgtggaagttgaatacaaggcttggtgggcaattaaaaaagtaaacatggatttgaacagaaccgggatgaagaggtgcttagaccttaatgagatagaggaattgagaaatgatgtctacatcaattccaaaattgcaaaacagaggatgaagatgtggcatgatcagttactccaacaaagaatttcaaaatggacaaagagtcttactctatgactctaggctccacatctttccaggaaaactaaaatcaaggtggataggccctttcattattcaccaagtgcattccaatggagtagtggaactactcaattccaacagcatagacactttcaaagtcaatggccactgtctcaagccattcatggagcctttcaatcaagacaaggaggaagtcagtctcattgagccacaacaatcttaaccaaaaaggagtagatggacttagtttttttgaagactaaccaaagtccatgttttttgtttcaattttgttgatttaaaagctttattatttgttttaattttaattctagctttaatttattttattttaatctaacttagaatttttggataatcaaaattaggaggaacttcaaaggaattggaggaaagccttaaagaaccaatggggagaaaaagcctgaaaaacatagcaatattcaaacttgcgaaaatagggttcaacttgcgaaatcctcaaagctcaatttcataagtccactattcaacttgcgaaaatttttgtagcctgcaaaagcacctccaggcacacatgtgccatttcgcaagttaaaaatccattttcgtagcctgcgaatcaacttgtgaatcaagttgcgaaatagggcaacttgcgaattcaggccaacttgcaaaaatgacaaccgtcgtttaaattcctatttaaacctctggtttgctcattttttcattttgcacagcccctccaagttacgaaaaaacactataagttgtgaagccccaaaatttcaaagcatcccttccataggaagcctagaggtcttgtatctgaagaagaagcacttcacgcacctccgcgtaccctgtggaacacgagcctctccatttcagccatggccaagacaagaggagcccaagccgcgtctccatcagcccgcaatccaaggccaagagctccacctgcgtaggattccatgtttgaggctccataggcctctgccattccacattctaagggtgaagtgccatctagccatcctcagcacaggtatgagatgagaagaccacccactacacctggggtaagcacttcgcaccccaagaaatcatttcgtcgccctcttgcaaaaaaagcaagagttcaggctcaagagagtcatctacacctccatagcctcaaccgcctactacagagtctcagattccttctaggatgactccaaaagtgattatcaggcaacctatggttacacagccacctataaagggaaatttggattatcgagctatgtcattccactccgagctatgttttgatatgaagacttttagataacagttggagcttagagattcattccacctactgcagagataccatttggagcacctgatgactcctagggacttcttctatcccacagtagcactagacttttatcagtctatgactactcatcgcgtccaggattctactgtcatccacttcaccattgatggatgccatggtatccttagagccagacacattgtagaggccctgcacattccatatgagcctttgagtccagcatattttagagagtggtcccgtttctctcagagagacatggtccgtatattgtccaagaggacctctacacgttcatttcttcttaggaaggagcttccacctaggatgcttcttttagatgtggtgtgtgttccaacatatttccactttagcatatggtgtagaggagaggagctatattggaagcgttattccggatatcagagggtttttactttggccttcatcatttggttatgacctctcttctttactttgaagagaaggtccataggaaaaagctctagagagcagatgccattccattactttttcccaggttgctctatcagatattagagcatttaggctattcttctgagcctcaacttgagcgttgccacatttgccgagagttattcactttcgacaaatggaatcatctgacagcctatgttgcacctctaagagccccagatatgccagtacctccagagttaccacaggatgagatgccactacaggcacagcaggccgagatacctatagagatcataccacctacctctgcagcaccttctacagtgcccatgcctgaggctacatcttctgctcctcctaccacgcctgaagctccaccagttatactagctacatcaacacctcctccatctgagtcctctatcaccatatcctgttcagagtttagaggcctatgtcatacattgtagacattgagtaccactcaaagtattctcgcccagcgaaaagtagtcatacatgcacatcaggatcagcttattgccacgtagacccaggatactgccatcctgaggcaaatacaatagcatttgggtatttcaccaccacctgagcataatatgcctggtccatcagagcctacaactccatttgaggaggctactctagttgagcaagctattccatctcaggaggctactacagcagagcagacgatgcctcatgagaagactactacagcaaaggtcgagactccgatctagagcactcaaactaccacagcagagccattgtctctacatgaccctcccaccactacctgatcatctatctactttttgtatttacttattatagtagaactcttaatcccatgttttttatgttttatatattgggattggatgtattaattgtgcatatttcatattgtacttccttaaagtaatacatatccttcattttttagtgtacttgacatatttttatttatttcctctactcatttttttgttgttttttgaatcatgtggttcctcctatacaattcaaactctattccactcaggagataccacttcctccctttattttcaattgctcttcaaacattgagggcaatgttcagcatggttggagggagaagttgaggaaggaaatattgtttataatgataggttataaatggtaatttagttactttttgtgtaaatttaaaaaaaaaaattgaatactcttcatggttatcaaggaaaaaatctcaaaatgaaatgggagaaattgaatttacttagagtttgtattatgcttattaaagttgatgaattgttgaaatttctattgaattcaaccttatttcgtccactttaagcttaccacacattgtgcacactagattccgagtataagatgaaaaactatttcaccccttgacttaggaaattttagacttggtatctttgacctcgttttaatagtgttgggacaccttagaaaaggccaatgagcctttgaaaaatgttttatttgccttgaaacccgagcaaggtctgaggggtatatggtgaaagtctttaaaacctggtgccctaagccttcattggttgggagtcaccgacctgaatgctcgttataagggttaataggtggagtttaacatactgtaggtgcttgggtattgaattccaatctcaaaactctgaggtaaaatccgaggagttagtggtcgaaagatccttgaagcttgatgccctaaaccttaattggttaggagtcatcgatggacccccgttacatggataatttagaaaagaatacctttaagctttgtactcctacaagaaaaaaaaaagtgtgaaataaatgaggtgcattcttagcctattggaggttgatcagttttctaagatttgacaaaaaactaggttggggaggagagattagttcagcatattatattcgaaaactaataagtaacacttagatttttatggaagagtaaggattgaccatttgggagtggaaattcttttaaagcttaaatttgcataatgccttctctttatgaattgtgattaggcaagttatttgataactcttgttgaggtttgagttttatgtctttaatgtctcatgagagagtttgatcatcatgccacttgaaattttttggagtgattagcatgatgttgtaaattatagtactgtttatttttatttttctctccctcattgctaaggaactagcaatatgtcggttgggggaagtgattactacttaaaaagtgttattttatagcttgtaattaactcttttaaacacttttcagtagtagttattgtcttttaactcaattggcatgttaaggacctttgcaatcgtttctaatcaaattgtgttaagttttagtgtttttgatagcttttttatcaccaaagcaatccaagaatgagggagatctttgtatatttcatggcaaagcaagttgaatctcaaattcatgaagaaactaagctttggagcttcataaccctttgccaaagccaaacaaggatgcaaggaagaaaagcacagaagaaatcaaccatccagcaatttcgcaagttgtggaatccaacttgcaaaattttcgcaacttgcaaagtagaaaggggaaatgaatagttataggacaaagagttaataagttgtaggacaatttcacaacttgcgaaatggataatttcaatttgcgaaatccacctgtaatttgagatatttgcgcatcgactctgtttgatatttatcttcagatatttgtgtgtaaatccctattttcttcttgtaacccaccaatgacaagttttcttggttgggaagttagcaggaggggtgaataacctctctatataatatttatcgtaattttcttttagaagatcactcgggagtttttcttagggacgacactttgtatagtttttcaagaaagtaatacacagagctttgctctgccttaccttctcattttttttttctagttatttttatttctagcaaatcaaactctgagaatgttttcctagaggatgagtggctaggctttttgtttcttggagtgaagaaaactgggtaaggttccggatacaaaagtggaagttttgttgtttcagtttttaatgaagagaaagtgtgacccgttaatggtttttatcttttaattaacttaaaattccttaaaatcacctgggctaacacttagtaaggcaagtgatctccatccattgagatacactagtttatctcttgcaagcctttgggaggtggtttaaaggtaagattatctagaatagtcaacacttggtaagcttttggactcccaggaaacatccattagttatctcttgcgagcttttaacgggtaatccaaggttaaggatcaccctaaatggccaatactaggtgagaggtatgaaccattgtaagattattcagtgacaaggatttagtgtttgaaaccataaagggaaagcatctgtaccacaccggttcgagaaataactatatattaaatccccaatgcgaggaaaagattcaagtgaccgaaatctccttttttgtatgacgaacctgagcctggtgatctaaaactccaagaagcacttttctttgtaagtaatttcagttactttatttttggttttaccaaaaaccaaccttttcaaacatatttatgttttcttttaaagctaaccttaaaaagaaaaatcaccaatttagtttttgaactaatatcagttgtaatttgaaaatccatccctgtggacgatcttagagccactatgctatgctagctaatgctaccctagtatatggtgaaataggtttataaattttgttgattactcttgtctgcggaccaaaatcagagtacaccagttgattgaacaccaatcaacagggcatacaccagctgggcacgaatcaatcatcatcattaaagatatgattcagataaattggattgtataaatcttcattgtttcgctcttgcatcaaattcttaactcaaagtcgcatattgtagtgcacataaactaacttatgcaactttttcattgccaaatggttgtgcaactttgtgtgaatcaatgaccatgtggcttgatgcgactcatggtagcttagctttaaaggcgtatcaacaaaatttataccttaggtactattactaaagtagccaagctaatagcatagtggttctaggatcgttcactaggaagggttttcgcaaacacaagtgatattcaaattaggaaaataggtgattttcttatggatgttagctttaaaagaagatgtaaatgttttagaaagatttaactaatctaagctaacattaaagactaaaatgaaagggtgtaaaaacaagtttctcaaagataggatagctatgctctagctcttatgcaaattggaaatctcaggataggctcctcgcgttggggttgcaactatggtgatgcttgcttcccgaaccggtatggatttagcaaatcaagttttaatcctttaaaatggcaaaacagatggtagtgaatttcatcaatggttattcaccttagacttcctttgaatggctcgtaagagataactaatggtctaaagccaaaagcttaccaaatattggcaactcaaagtcattccaggtgataaactcacctttcaatggccattgaaattggttctaacggattaatgcaaaacttggaattgaaaacctcaccttccaatagctcgtaggagataactaatggatagaaatccaaaagcttatcaagtattggccgttggaagttgtccaaaggaaataaaaaccaaactttgccttaatgaacctttaatgaaaaacaactaccttaccttcaggtgtgagaaatttccatgggattgcatccaagccatcacataacatccatactttgaggaactaaaagttttagccaatcatcctctgaggaaaagccctcagaggctgtttggcttccaagaaaataaaatagtaaagagaaaagagagacgagagagctctgtatatcctaagtgtaaaatgcaacacgcatgttctctcttccaagaggtgatttccaccccttatatagtctttacaaaagcaaaagcttgtgattggttagttacaaggataagaaaggaaattacatcaaacaatacataaaaaaatatctaaagtggagtcggcaaaaacagaggaaaattcgcaccacgcatgggctgtgcgaattttgaaggtgttgtgcgaatttcgcacaacaccttgtgtcgtgcgaaaatttcgcacaagcctggagcagttggcttccgaaggccatatcttcctcatttcagctccaaatcatacacggtttgaatcgttggattcttgacttccagggatttgaaatggtatgtagcatgtaaaaaatggacttcggaaagtgcgaaagaagactgcagctgctgtcctctgttttcctcttctccattgttctttccttgcatactttgaacgactttggcaaagggctatggagctccaaagcttggttcttcatgaatttgagcttccaaaagctttgccataacttgtccaagtagctcctccatcatttggcatgcttgaattgattcataagctgataaaaacatgtaaacttgccacaaaatggttaaaaccaattactaaggaccttaatgaattaattgggttaaatgaatatgattactactcaaaggtgcttaaaaccattataattaggtctacaaaatagtactttttggtagtaatcatggctccaatttctttcacaacctagtgaagaacaagtttggctttaattttaacaacaatcttttgtagatgtggaccttcttcgtcatagttgttccatcattcatctataataaagaaaatgcatacttattaatcactatgatatatttaacaaaaaatgatgataatttcttatttttaatatatgtaaatgtattgattacctagaagatattgatttattgttttctttgtaagtgcacttccaaattctcctcggtcgtcaacaaataatttcacctacatcattcacatttttctttgttaatgcacattacatatacaaaatgtattatataaaggtcacaaactattattatacctcgttaatagttttttttgtctatccaaatatggctttaatatcttgataacctcctttaatccaactttaatttttggatggttggagaaatgttttgaatattagaacattggatttaaaaattatgttgctataagttaaataataatcaatttataataatttgtacttgaaaaaaataataaaaaaatatataaagaatctttttattacctgcagcatgcaaatgtctgtgcaattgaccttcccaccttctatcaatgacttcctaatacttttctcattgcttaaccgattccttgatagccaatttagctctatccattgcttcataaatgattgatagtgtgggctttttatcttgatcaaccaatttcaatactttgatgagaggttccatgatagtttgaacttcccctgttttcttccaaaatagataagttaagacaaggttggttaccttatctcttagactttttctactcctatctttattgaattcacactactcatttgttgtgcacattctctttaaatcagcctcataacgtataaaactctcaagtgaaatgaattcagtggcaaaacgggttattcctggctttaacatctatccttggtgaacattttcatcaaattcactactttcaagctattacaaataaatcctgtgatcatcttagcttaatctaatgtctccttaatctgcttcatgcttgcaatatctttaagcattaaatcaatacagtgggttgcacaaggaggccaaaacaaatgcttccacttctccatcaacaacatattggctgctttaaaacttgcctcattatcagtgactacttgaacaacattttcccccccaacctcctctacaactttatccataagggaaaagatgtagtttgctgtcttaggtatgttggtagtgttaactgaagaatggtgtatcatacttctatcacaataaatcatgaaattgaagataggctttctagtcctagaactccaaccatcacacatgattgtgcacccacatatagaccatttaaccttcaatgttgttatatatacctcaagctcttgcacctcctcttccaaatatgtatttccaatttggtatccgatgggacccttgatgcttggacctgcttctactatggtatcaatcattgattgatagtaaggcccactgtcaattgcattaaagggtattacattaaagagaatgaatttagaaatagctttacccactttcttcacatctttagtaaaaaaaaacaaactttttattgatttttgctttgatgggaacatgtagggatcaattccttttggaagtatgctagctccttctcttacactgaagctacgtgtcaattcgcgtttaatcctagcattagaaagttgtgaggaacaaccatccttctgatgctcttgtctacctttttaaaaaattggacgactttctttcattgcttgtttcatttgtcttctttcaaaatcaaccatagcaacttcctcaatttcatcatcagaatcacccttatcaatttcatagaaattttctttatttaaggaactcaaaagttgttcatttttttttctttaactgtgccttttcttttgaagtatcagacatatgttgtctaacactatgtgacatttctaccgatacacgtggacatctttccacttatcaagagattagagtcagatttggatagacaagcaaaaactattactgaggtataataataatttgtgacctttatataatacattttgtatatgtaatgtgccttaacaaaaaacaaaaaaaaaaaatgttaatgatgtaggtgaaattatttgttgaggaccaaggaaaatttggaagtgcacttataaagaaagcaataaatcaatctcttctaggtactcaatacatttatgtttattacaaataagaaattatcatcattttttgttaaatatattatagtgattaataagtatgcattttctttattatagctgaatggtggaacaactattacgacgaaggcccacatctacaaaagattgttgtcaaaattttaagccaaacttgttcttcatcaggttgtgaaagaaattggagcacatagtcattgattcacacaaagttgtgcaaccatttggcaatgaaaaagctgcataagttagtttatgtgcactacaatatgcgactccgagttaagaatttgatgcaagagcgaaacaatgaagatttatacaatccaacttatctgaatcatatctttaatgatgatgatatattagatgagtggatacgataaagaaatgagcctattttatcatctgataatttggattagttggataaaggtcttcctccttatgaagaaggtacaaatcgtagagttagtaggcatacaagcaatgctacacaagaaagagatattgattcccatcataaaggtaaggttcctagaacaatttcttcaagttctagtagtgatgatggtaacaatgggggcagtaggcggggtggtgacactagtaggtgcagtaaaggacttagtggcattggtgagggtactggaggagatggtagtgatggtggaagttatgttagtcaagtagatcctagcatgtcatgggcacaaggagatgaaaattattatgccacacaagatacagatcatggatattgactaaggatatgggaataacgaaagcatttggaaagactaactacatttcccagcgatgatgattactctagtgggcatgattatcatagatcaaattatcactgtattgataagcacttacagaatttgggtatatgattactacccaaaaagtgctattttacacctttaagtcattatgttttaagcacttttgtgtaataattcttcatctttattccaattggcatgttaaggacctagcaatgactcctaatcatatttgtggctagttttagtgtttttgacatctttttagatcattaagacaagccatccaaaggagaaaagcaaagaaaaccaaagagaagcaaagagaagcaaggaggaaaacagaggacagcagctgcagtcttctttggcacttttggagcacttcccgaagtccattttttacatgctatataccatttcaaagctcaggaagtcaaaaatccaacgcttcaaaccgtgtacgatttggagctgaaacgaggaagatatggccttcggaagacaactgatccaggtgtgtgaatagtgtgcgaatggtgtgcgagattcgcacgcccccttagctgtgcaaatggtgtgcgaatggtgtgcgaaactcgcacactcccctcaggtgtgcgaaaattcgcacaccccatgcgtggtgcgaattttcctctgtttttgccgactccactttagatattttcttttgtattttttgatgtaatttcctttcttctccttgtaacaagccaatcacaagctttgcttttgtaaaaactatataaagggtggaaatcacctcttggaggtatcacgcgtgttatgttttacacttagaaaaatatacagagctctctcgttttcccttttctctttactattttctttttcttggaaaccaaacaacctctgaggatgttttctcagaggatgagaggctaaaattttagtttcttggagtgatggaagctaggtgaaaagtccagatgcaaggtggaaaacgctcgtgccttaaatacaggtagttgaagttcataaatggcttttaaatccaaagttttgctttaaatcccttagaatcactttgaatgaccaatacatggtaagcttcaggtctctgtggatgcttattgctagatccatatcagtccattagttatcatgtacgagccattggaaagtggttcaaggtgaagacccatagtgtttaaagccattaatggacctttactaccatttctattgatttttatggattaaatcttcattgttaaacctataccggttcgggaaataactataggttaaatccccaatgcgaggagaaaaatccgaaattttccactttgcattctaaacttgatcctagcaatcctaagctccgagagactttctttcttccatttttaattagtttatgttaatttagtttcaaacactttcaaaacaaattttattttcttttaaactctaagttttttataaaggaaatcattaaattcaattcctaatcatgagtatatcactggtagaatgaaaacccatcccagagttcgaccctagagccactatactatagtagctttgctacactagtatgaggtcataggttttataaatgttttttattaaatgacccgactggatttacatctgcgaatcagtataggatcaaggtagtatttcaaagaagtagatgatagatcatatcacaactttaaagaccatgatagctcttctagtacttttagtagaaatgagtttgatcgatttccaatgatgcattcagagggatattcaaatactggaacatgagcttatgattcttatggatatgattaatcttctagtagtagtagcattgcctatcaaggttttggatactattaatatggtgttgatcccgaacaaccttcgaaaccatattttcttgattatggatcatcaagccaatcggcttagctaagatattcgagttatgaacaactctttcaaccatatcctcactattggaattaccatcccaatttgtatactcgtcgtaagactgatgatgatgattttgaaccccctcatcattcaacatgaaattgattattgcattgtatgtttgttagtaaaaatgttattatgtttgaaataaaataattttcttttattagcattatcttaaataactttgagtggatacttttgtaactattgaaataatgttaactgtgtgacaattttattgtattaatttttttgaggttatttaattgtatatatttttctgatgatttatataatatttttataattttttttaattttctaattagcttattttacatatcgtctgataccaagccaatacaccgagaccgatacatctcgggaccctccaagtcagtgaccgataccgtgactttgaaccatgttctggaatcatgtagctaggtgtttctgcaattgctttggtggagtggtgagtttgatcactaggattgatggctgattttggaggagagagagagaaaaaaaaagccattagagaacccatttttggatgtttatctatgtcttatgtgattttcttgcttatttaatcttctgaagatgaaaatttcacaagttatttattctcttgcttgttttatttggccttctttctcgatgtctagcaaatgtgcttccattgtctgtgctgggggatactggatggaggttgtggaatttggtgtctccaatgagtaaggactaaagatttatatatggaggttcagcaacacgcccttaaagggaatgagcaaattttctaaatcaaggtatggggatgaatttctgttgtgatatgtgttctgtttttcatagtaacataactaacagattacctggattctgcttaaggaccaaaaatgccctgaattttctgacctgatataaccaaagtggctagtcaagtctgtttgtaagaagagaaaaaggagcctaggatttagaatagatgttagagaggtgatctgtggtcatctggcatgcctaggaccaaaacattaccaatttatgaatcctgccccatcagaccaaatgaaaattgcaagcatcaggaagatcatgctgtaacacagagaagggtaataaaagggtactctaaaacttcgaaaagaaaccagacgatcatgaacccgattaggatttcaactgataagttcttgttcctccataaca

SEQ ID NO: 12715 - DNA, 20164 bp, Vitis vinifera
  Intron number 1 from transcript GSVIVT01029981001 (locus G SVIVG01029981001) derived from phytozome v7.0 (chr-ID chr8 ; pos 2661606 to 2681769)
tggtaagtttctaatttcttagctctaattttattttatttttcagttgaattatgggaagtaagtccttgattttgtatccatagagcattttttggtgtgaggatttatataattttaagatgaattttaattttgtctagttgaactatgggaagccaattcttgattttttttttatttatttatccatataccattatttgttgtgagatttgatatattttttaggtcaattctgaattttgtccagttgggttatgacaaacgatttcttgatgttataaccatgcggaacttttggacatttttggttgtgcaagattgatatatagcagttttcaaatttttccagttgagttatgacaaacgatttcttgatgttataaccatgcggaacttttggtcatttttgattgtgcaagattggtagataggagttttcattgttctggactgaattttgtagagttatggaaaggggattctttatgttgtatctacatagcagcttttgctgcaagcagtaatatcattagtggtgaaaatttggccttggcatcttaggtggagccgcataattggactagaattatccactgattagattatatatacgaaaaaagcagccaaatagaattttaattttttctgtattaatttagtcataaaatgggctgagcctagatggaaaggaattccactccgaataccatacacttgtttttttgaatttgactgtatcaagcatgcgattcactatggatgatactttatagatttgaagtacatttttccctcacaaagtcttgtctagtgcatttggattattaaattcttgacaaaagtttagaaaaaaaaaaggaaaataacacttctactgcttaaggttgggtgatgttactaggacactccctctggtttcacatattataccaacactccttatcaaagttttttactaggctttttggatttgaatgaaatataatctaggtttggaaagtccataggaatgcaacggttaatgaagtgtgggacccaaattttggtcaaggaggttggaatctcagattttcttgaggttttaatgattgggagatggatttaataggagatttgctttctatgttgagggactacaggatatctttagaggaggattcagttttttggaagagtgggggaaatggaatttttggggttaaggatgcttacaaactgctggttgctcccaacgatttcgccttcccgaaaaagtgcatttgggtggataaagttccaaccaaagctgccttttgcttgggaggccacgtgggggaagattcttaccctaaataggcttcaaaaacgggggtggcagctccctaatcattgttttttgtgcggttgtgaagaagaaactgtaaatcatattcttttacactgtatagtagtcagggtcccctgggagatcgtccttgccttgtttggggtttagtgggtgttcctagagacggttaaagaagtgttatttagttggagggacccttttgtggggaaaaaaaggaaaaagatttggaattccattatgttgtgtattttttggacggtctggaaggaaaggaatgtattagctttcaagggagggggggtccttagctatacagaaactcaaaaattcttttgtatgtaaattgtggagttgggctagggtttatattgaagaggggtccttttcgttgttaggctttttggagtgacttgtgtccacttaagggttggtaaggttgtttgttttttgcgttttaaggtttaggctactgtgtatactccctatatgctttgtggctttttgccttttgttaatatatttcgtgcttatttataaaaaataaaaataaaaatctgggtttggaaagtaaagatctggataaagtaatgaaaccaggttttggaaatctttggatttggatgaaatttagggaatagatcaagaactctttgtagtcttctttgtccttgtatttgggtaggtgaggagagtttgtaggggaaacatctctagtgggtaagtgagatcttcctatagtttgtttgggttagaattttaacttgaaggagatatggatgtgtagattggatatttcggtgcacttgtgggggagaaatttcttcaaggtgggggcacatgtggtggttttgttgcagtggattaagacatgacatattgccgccgataccattcaataataattttggtgaaaaatttagggaaagaaacattaggcaaagtagaggtgtcgaggaaagattcttacttcattaagtcaagatagtgaggaggtctgtatggtggtgtttagaaaggggcttctttgttaaatctttttattcctttctagagtgcgacatgcaactccattactttttgtagtcatctgaaattccttggtcccttcaaaaatgttgttttttgcttgggaagctagtttgggcgaagtgttgaccttgaatcagattcagaagagattttgggctttgacgaatagatgtgtcctttgcaattgcgatgaggaattgattgtcatattctcatccattgtgatgtagtgagttcactttggcagcttcttttctctttgttcaatattgcttaggtccttcctttgtcgataagagacactcttttagggtggcatgattcctttgtaaggaggaaacgttagaaggttgggagagtagttcccctttgcaattgtttggacaatttggaagaagagaaaccaaatagtgtttgataggaaggtgcaatttcaagcattgaaatgctctttacttagtacactcttgtcttggagtagcatgtgcataaaaaggctttcaatctcttattgatttttttgtagattgggtgaattcttggtgagggacatagttttgttttgttttttttgataaatggtaaggaacatggttttaaaaggtgtaaggagcacattaattctcctaattcttcattttgcttggtcttcttgttcctctctttttgggttggaaagggctttgtttgtcactgttggtgagcccgatgatggagttggtgcatgcatcttggaaaaggagtccctaaacccattaggggtagtttcggttgatggaagggagttgggtggctcttgctcgcctgttttggagctagggcttggtgaagcagtacctaggatcttggtggttaaggagatgggggacgggtttttagaggatttggttaggccattagattattggtcctctagttgtttggtgaagtttagtcactacttggggatgctgactaaggggtttgagtgggaaattttgaagttgctaaaaaaaatgaaggagagaaaggataagaaggggattgggactggttgaaggaggaaacaattgaagtcttccaggtctgaaagggagttgcaaaaattggattagtctgtgaactattttagatcaagagtggattgtgggggtagtgtttccagtgttagatgaggatgcatatttatcttggaatgaatgtaagaggggttaatgatagagacaaaaggaaggttattaaggctttgattaagtctcataaagtgaacctggtttgtttataggaaatcaagattgaagaaatgtctatggggttagtgtgtagtcttggagtggggagatttttagagtgggaagctgtgaacttgaggggtattgttggaggtattatggtattttgggctaatagggtgttacaattggttggattggaagtgggtaagttttcaattttgtgttggtttaaaaattgccaagatgatatcagttggatttttataggggtttatgggctggcaccgaagagagaaagggaatatttttagggtgaattaggggctataaaaggtctttggagtaaccattggtgtgttgcagacgattttaatataatcagatttcctcaagggcatagtagtggaggtaggctgatttcaacaatgaggaggttttctgaggtaattgaggacttgtagttgagagcctttgtttgggggcccttttacttggagaggtggtctgaataatcaaaataagtctagttttgatcgtttttcgtgtctgagtgggataatcactttaacgttcctagaccaatgtttgatcactttcccattttgctagattggggtggggggttgttgaggagaggccctttgtcttttagatataaaaatatgtggttgaaggaggagggattcaaggatttgttgaaatcatggtgggaggggttcaactttagcggttcttttactttcattttggttgcaaagttgagagctttgaagtttatcttgaaaaaatggaacaaagaagtttttaggcagactgcagttgggaaggctatggcattggatcaagtggtattttgggatacaaatgagaggtcctgtaatctatcccatgaggaggtggaagcaagagaggtagtgagggaggagtttaaaaagttggtcatgttaaaagaaatttcttggaggtagaaatcaagagaagtgtggttgaaggagggggacaaaaaaactattattatgatttttttccatgacatggttaatgctcatagtaggaggaatttctcggccaaaattaagataaatggaacatggcttttagaggagaaggatattaaggaaggggtggttcaagcttttcaggccctattaactaattcaggggattggagaccatgtttaaatgggttgttgtttgagggtctagaggcttaagaggctatttgattggaggagcctttttgttaaggaggaggtctttagtgccctttcgggtttcaagggaataaagtggttataccaaaggtgattttagaggaggattggtgattttaaacaacctatgctgagatgtttttgcccatgaaactttggcatattttggaagaccatgaattttcgattgaagagttcaatataatggttgtgaaaatatctatattctagtgtataataggcatacgaagattcgtcatccaattaaggaaatccccttgtctaagcaatcagaaaaaaaaaagaaaggaaatgcagttgaaagaagtgcttaacatgcatgaatttggaaagtatgaattaaattagatgaaagccccacaatggacacaattttgcgatagttaaagcttgaattgaatttcttgagtctgccgggttttataaggcctatgaataaggctatccgatgtaactaatagaacagtgaatgaatcatatgttacttttttgtatattttgcaattttcaatggtgagactaattgttttctcttgtaaataatactcctaaaaggctttaataagattcttatcctatgtttgattcttggaaaatttgagtaaaaatgcaaagaaaggaacataaagaggaaaaattaaaaaatagaagaaaagaaaaagtgaaggaaaaaaaaaagattaaaagttaataaattattagtacatgctttttcaaactcatttcatttatttttctttgtctctataaagactaaataatttgaaaatgtacgagtttctaattaattttaattatatttgattgtctttggtaaagcaaacatgaaaaaaaccatttctttagcaattgttcctttatttctttttactaccttccttggtacttttttgaaccaaacatagttttagctttttcattccccccgtttttttttccacaccttcttgttcttttcctcacatttgtttttatttttttttctcattgtccaacctcaattccatgtttccttgctcaaatcttaagagaatgaagccttgacccatttatttgattgtagacaactattttgaagttgtcgtgcatcaaatttgatcataaatagagtttcctctagctttgtcaagaatttgtggaatcctaataactaggagttttttttctttattactatctctgtgtttctttattatgattcctgaagatcaaatgagctagaagactaaacattggacatgattaataacccattgatgtgataacccaactcaacccgtttggctttgttcctagaaaagatagtctagcatcctgtaatgatttatgattcattatcccatatgatttgtgtgatagataagagttaatcagtaatgtcttggaatccaatgaaagaggattagttaatcataatgaaaggagcagccaaaaaagcccctaagcctagcttcttactacaaaagtgctcctagctggtttagagcacacaaatttgatgctacctgtttgctctactcatattgcatatacacaaccagaacatatttcccagataactctattaagatcattttaagtttatcttccagcaggaagttccagtttcagcaaccatgcactgagctacatgtaagcgaacaagttccccttgttgatcaattatactgctgaatatgcacatccaaattattttggggattgaaacaaaagaaaagaaaactggcatgacccgtatatcttcaactagcaaatctaatatgtagtctctctctctctctctctctttttctcgcctcccttatagaacctacagcatggccgagatagttccatccacaacacattctttctccccatctcctcaagtctgcaagggagattctataacaaaaacacctccttggagactgcctgttccattgtagcaagggcaaacaacctctctccctatatatagaatatatatatgctaaatggtggaatttgtaaggaaatttagtggactgaatgtcaagaaactggaattgaaagaatagtaattcttttttcttatttgaatgatgaaccactagggaataaatagaggagagaacataatttccttcctctaattatgggatacagaaaattaaacttcctaaacagattcctctaaaataggaaatagaataaactaggaaaacaaggaatttgggtaacatcctacccaaatccttaattcaaggaaagtcaaaacattacacagtaaaatcccttaattcccatgtgccttattagtacaaatattcttgactttctacactccccctcaagttggattgtagatgtttatcattcctaggttggaactcaaatcttcaaaattcgtccaaggaagagccttggtgagaatgtttaaaatttggtgacgtgttggagtatgaagaagagctatgatcccactgtctatcttctccttgatgaagtggtgatctatcttgacatgtttggtttggtcatggtgtatggggttttttgtgatgcttattgccgcttgattgtcacaaagtagattcattggtccttctattgaaataagcaattcactgagaagtctctttggccatattccttcacaaattctatgggccattcctctaaatttagtttcagcattgcttcgagcaactagagattgcttttcactttgccaagttaccaaatttccccacacaaacatattgtaccctaaaatagacttgtgatctgtaattgaacttgcctgtcagcatcagtgaaaacttcaatcttcctatttgagttaacccttttcctggagtcatttttgggtatctcaagattcgataaattgcctccatatgtttctccgtaagattattcatgaactgactgaccatactaattggaaaaccaatatctggtttaatgtaagagagatagattaatctgctaacaagtctttgatactgacctttatctactggagcactatcatctttgattccaagtgtaatagtcaaatccatgggagtattggccggtttgcaccctaacattctggtttcttttaagagattaaggacatattcgtgttgtgagactgagatacccttatgtgatcgagcaacctccatacctagaaggtatttgagatttcctaagtatttaatctcaaattctttggctaggagtctcgagtctgctcatttcttctgcaaagtcccctatgagaataatgtcatctacataaacaattaaaatctcttccgttcttcccttattctcaaagatcctattgtttctctcttgccatatcatccataacaaagtaaggcaagcaatttgccaaagtgtcttgcctcttaatgagttccccaagcctttaaaagcaataaccaacatgtcctcaatactccttggaggaacccaagccaaccctgctagattgaacaacttgtgccagactccaatggtaacagggcaatgaagaaaaaggtagtctattgattctccatttcctttgcaaagaatgcaccattgaggatagagggatttgtagggttttctcaattgcaacttgtcattggtgtttgccttcccatgtgctactaaccaagcgagagccttaacctttgagggggcttttgaactccacaagaacttggccggaaggaacaagatagaatttgagacttttgacaaggtcaagaaaaaagatttcactgaaaacaagcctgatgatgacaaagatcacactcttcaatctgccaaagaaggagagaaaatcactgaactaagggaggacattaaactttgaaggagatcaatttctgaatcagtaagattgcggtgaaaattaaaattccaagacagtggaaaggaattgccaaggacatttgagacagtgaggtttttcatagaaataattctataaagaccagcaaattgagagcacaaagtttggttaccccaccaaagatcttccccaaaacggattctcttcccattacccaccactaggcaaacaaaaggggaaaaatcctggaaaactttagcaattgccttccaaggacatctatgtgaccatctaaccaccatgttggcgtcccatccattaggatgtgtcccataaatactcgccataaccttatgccaaagaccactcctttctctaaggaaccttcaaagccatttccctaagagagcaatgttccttagagaagtcttcccaaaacccaaacctcccaactcctttgatctactaacaacatcctatctgataagatgatctttcttcccttcccctgccccagaccaaagaaaatccctttgcagcttctcaatctttgaggctattgatgctgggattttgaagagggagaggaagtagctaaggatgtgagacagacttggttgaattaaaataatccttcctcctagagacaaaaaggcctttttccaaccatctgacctcctcgaaattctctcaaccactggatcctaaaagcctattgtctttgggttccctcccaatggaaggcctaaataagacaaaggccactctgacactctgcaataaaaaactgaggccaaacttgacaacaactcctgcctagtattaatacctgaaatgatgcttttttctaagttgatttttaaacctgatacttgcccaaaaaccaaaaggataatcttgaggttttgaagatgttccagagaggctttagagaaaaagatggtgtcatttgcaaattgtaacaaagacactctagtcatatccctccccacaaagaaaccctcagttagcctaatttcctctgctctgatcatcaacctacttagaacatctgctactaaagtaaaaaggaaaggagagagggagtctccttgtctctgtagtgccaacgaaagctttgatgccaacaatgttagttcaagaacacaaagataaaacaatcacacatacggtacacgaggttttaacgtggttcggccaaccatgcctacgtccacggatgagagagaataattccactatacaatagagaatattacagaggataaaaccagatacaactattgggttcccgaaacatcccatgtttccccactccttgtatccataccttactacgagccctctcgctccaccaggtacctcccgttcttcctcacatctctatccacctcgtatagtctctataggcccatctccatctcataactttttcccctcatgacctagaatatttatagagatatttcctacaaccttccttattctataaggaagtctaatattacaataatatatcaacctagaaatattctatataatattctttacaaaaaaggaatctataccaattaggaatttgggacacttcccaacagtctcaaacctctagaggccttaacccaaccctttgcattcccattaactaggattgcaaaatttgatgaagacaaacatccccttatccaagatctccatttcgggctgaaccccttcctttctagcacatgatctaaaaagccccaatccacatgatcataggccttctcaaaatcgattttgaagactaccccttcctcccctgaccttcttttctcatccaccacttcattggctatcaacacagcatccaaaatgtgtctcccttcaacaaaggctccttgagggccagagattgtttcatggaggactttgcgtaaacgctctgataagaccttagcaattatcttttataaacttgtaaccaaactaataggtctataatctgagattttaaaagtttggctattcttaggcaccatagcaatgaaggtcgcatttgtactttgatttattatcccattggtgtggaactcaagaaacaccctcataagatcctctttgatgacatcccaacactcttgatatactgcaatagtaaaaccatcaggaccaggggccttttccttattcaattggaaaactgctattcatacctcctcttcagaaaaaggtctgtccagccaaaccgtactctctccatgaatagagacccaatctactccttcaaccctccaagaagcaccttcgggtttggaatagagctttccaaagaaatttacaatctcctcagagataacctcaatgttgcttagagtcacccccttcttagaaatcagagacttaatgaacttcctgcttcgccttccattggccattctgtgaaaaaacttagaattgcaatccccttctttaatccacttaaccctagatttttgtctccaatgaacctcttcctttaataacaaattctctagcttccttcttcttaaggtccttccagataccaaatcaagattcaaattctcttcttgttcaattagatcaattctacctaagttcgaaagaatgagttttttcctctctcttaaatctccaaaggccactttattccaatctttcaactttgaattaacaaactttaatttcctcataaacttgtgaccttcccaaccttcaagcgtacactcttgccaccaatcactaaacttttccttaaactcaggatggagcaaccacatattctcaaacctgaaaggagtcggaccccattttaaaggattagtttccaagcaaattgggctatgatctaaggtccatctaggaagcgcctcttgaagactttgagagaaaaaggaatcccactcagaagaaaacaagaacctatccaaccttttgcaaataggatcaacttgcatgtttgaccaagtaaaagctgcatttcttagagggagatccaacaaaccactctcccttatgaactcgtcaaaacacctcatgttgaaagttaacctagaatcacccagtttctcagagatcctcttgattacattaaaatcccctcctacacagcacattgggaaggtgttgaagctccagccaaaagtccttcctccacaaaggcttattcgggccatacactgaagttaaccaaaaagacctttcctcaccagagttcaacttcacagttacagagaaagatcttaacaccttctctgtacacttgaacttatttgaatcccacataatcacaatcccccctgaagcctcacaagcaggaagagcagcccactccatacttctacctttccagacactactcacaaacctcctatcccaaatttctctctttgtttcgtgaagcatcacaacatctggactttgagaacttaaaaaaccttttgacaatcctcattttcttcttggaacctaatcctcttgtattccaacttaagatcttcatgtaaacaaaaaaacccagcacaaactgcaaccaaaactaagtctctctctgggttccacaatcatttttcctcttccttctgaaatagaccttgtccgcaaaaagagtactcttgctctctacttccgcaccttttccattatctctaacaattctaatcctcaaactctccaaaaccgactaaaccttgaccatcttcctaggcgtgaggccctcaatctgaaaaccttccaacgggagggtgggaggttctggctttggggacgaggccttgcttgagacgcaaagctcctctgggttactgagtgattccctaaggataggacagtctttaaaatttcggttagaggcttctatgggaaacgccacaccttcagaacaggacacgctaacatgacaactaagctcaacaccaggaggatttgaaaagggaacaccctgagaaggaaagactgacttcatcggatacgaaaaaaaagctgacaccaaaacaaatgaatagcaaaaacagaggagaagggaagagattttggagcaagagccccagccaaaggatgaccttgcttagaggaagctgagaaaggaggacacaccttgtttgccaaactgcaacgtgaaaactcatcacctccctctatctccctggtgaaaacttgggaggtttctggagcaggaggaagaacgcccttattggaaactggtttgccccgaaaaatggctagatttgcttccgcagagccacccccatctaggttacgcttcggtgtagaagatgacacctttaggctcggaggctagcttctcgctttgcgcctcgcagagattgaggggccttttaactttgacgactcttgagagtgaataatcgacgtaacctcctttgtggaggatcctgagcattggaactttgaggacaaaggcgctacaaggtcgccattagaagatcctgcttctgtttcatggactagaccagtaagaggcccaaaactcttcgccccaaactgggccttagcagatcgggctttaaaaaaggcatttggctttgttggcccaataactcttcccatcgttgggcccaagagactccctccccatcctttctccgctttggaagccataattgaaactgaggaactagaatgggaacggtgacgaggcctccagctgtaacactcattgtccctagcagtagctcgtagccccgtagcgttctttggcctctgagagacgcaacctcccgctgacatcaactcgtccttgctgcgagttgactcaggcttgagaaggtcgtctccttcaacttctccgacgattgaaaccgtaaccgtaaatgaccaggtccccatcttccacctctagcagtgcaggtagcacgacatttggaagcatctccacccacaactttacctttgacaagtctacaagcttcagagattcccatgccacctttgttaccttcccccacttctgcagaatgtatcttagctgaacctcgtcccacaaatgaaaaggaaggcctcttagttctaaccaaccccttctaaattttcctgatacaacagtattttctcttgacgaccatctcctcagaacaacagagccttctctcactgttaaactcccctgttcttgaaaccaatcaactctccttgcagaatccacgaaaaaacaccccttgtaagcggaaataggggttacagacaccattcctttcgtactcatcatcctcgtaatagcttttcctacataaaatcaatctagtacttttcttttactttcacaaattacagctctggcccattttcccactggcagcagagcttcgttcctaggtccttcctctgcaaccacatctacataagaccgaccttctctgtaaatgcccttgctcacctgagaatctttaatcatctccttcgaggctcttacagcttgatcagacaagtcttgtactgaagaaatcatcttcctaagggcttcccacccattgcctttaacacccttaggaacgactagaactagaggcttcctctttgtaacaatttttgtaattttcataaatccccctttactattgaaacaaatctccatcaaatgagtcctagtcttgcccctaatctttcgaataaaacccctgggagcctccaactccacaactttcttcaaaagctccgacaaccaatccaactcctcctctccaaagcctattgaaacaacaaaacctcgacttctctctattattgagatccacgttcccccattggagccttcaaactttacctggaaagcctttctctccacttcaaaaaacttcgccattccttcaaggtcaccattggggaaagcattcttgacatctaattggtaaagtggccaatccaagttagatgcaagggataagagcacttgttggtgttaagttttgctacaggggcgaatgtctcttgatagtcaattccataagactgggtgaacctttttgccacgaggcatgcgttgaacctctctatgcttccatgagctttgtgtttgatagtgaaaatccatttgcaacccaccggttgttttcctggtggcagctcggtaatgtcccatgttttgttcttttcaagtgcttgaatctcctccaagatggctgttttccatttgggtattttgactgcctcgtgtatggaatgtggaacctgtacttggttgagattgctgacaaaagcacggaagctaggagaaagaccctcataggatacaaaattatatataggatgattagtacaagatctcacaccctttctcaaggcaattagtctatttaggtcctcactaggctagtcaacattgatgggttcagaggagatgttaccttgagaattttcaagagtgcttgaacttgggttggacttctgaccttgctcatggcatgtttggtgctccactcctttctgaatgcttttccttttgaaaaataacagctcaaggttttgagaaggttttgagtaggaggatggacacactaggagataagtgtgctagtcaggagaaataacaactttaacttgagtagtaacaatcggtgttgtagcagcagtagaagcaggtgtgctggtcggactgggagataaagtgtgctcgtcaagggaaataacagcttcaacttgaggagtagtagcagtaggtgttgtaacaacagtgggagtaatgtcccaaagctgatattccttagaaaaattccccccctgaatattagttttggtgtaaaatggttcctgctcaaagaaagtaacatccatggagttgtaaaagtgtcttgtaataggagaatagcacttgtaccctttttgatttgaggaatatcctatgaatatgcatttgatggccatgggatccagtttactcctattatgtaaaaaggatatggacataggcagaacactcgaacactttcatgggaatggttgagataattctagtgtttggataagagtttaggagtatatgacttggagtttgaatgttaagtactcaagagggcatcctatttatgagatatgttgctgttagaactgcttctccccgaaaaattttaggaacatgtgtagtgaacataagtgacctggcaacttcaaggaggtgtctattttttctttcagctaccccattttgttgtagagtgtcaatacaagagctttgatgaactatcccttgacttaatagataatcacctaggattgaggtaaaatatttttttgcattgtcagtttttagcacttttatttttgtttgaaattgagtttgtatcatagtgttgaagtttttaaatatttgacctgcctcagatttctctttcataaagaatatccatgtgactctagtgtgatcatcaatggaggaaatggaccaacaagttcctgttaaacttttaattctgtggatggtccccaaatgtcagagtgaatcaaggaaaaaggatgtgatagacttggataaggatttctcacatgtttcaagaattgacaaacttcacatgaaattttttttgaacttttattcttgaataatatgggaaagagtttctcaagatagaaaaactttggatgacctaaccaatagtgacataacattatttcactatctttattggaattaaaacatgacaaagagttgttttgacactgacttgtggacatggccttgtgagcttgagagcttgtggaatcatcaactttgaggagataaaggcccgaacatgcctcagcactgccaatcattttccccgaatccaagtcctgaaattcacaaagatcaggagtagcactacaattcaataaaactgaatcgagggttaattggtttgagaaacaaacagaccggattctaacaactttagataatgaaccatctgcaattctaacaataagtccctcatttcattgtttataattttttaaaataaagacatcacccatcatatgatctgaggcacaagagtccaccattcatggcccttgttttacttgtttcacatttagggcactgatcagattacctgtttgagccaaagagcctataccttttattctgtgattgagtgaacattttctggagtagttctatttgttctttgctgaacaggtttggttttgaagaagtggtgttgtccttggcagaagcaagctgtctgcagctctcttagtcattggaaaaatgtgcaggtttccaatctgctggttttccatggatcttctagcaagtgtccttggtatgaccaggtttatgacagtgattgcaccaagtttgtcccttccttggtctgttatcattgtttaggggctgttgggaaccacaaacagccaaagcagatccttctccagtggatgaggaacttgatgatcccataatcacctttcggtgactttcctccaaacgaacctctgaaaaagcttctcgaacattaggcaatggctttgttcctaaaactcttccacgtacttcatcaagatctttgtttaatctcattaggaatttaaacacacgtttcttcttgatgatctgtttgtacagtgcttcatcttcaggacacttccactggtgcactttgaacaggtcaagtgttgccagtgacgcctgaggcaattgaagaactgggtgacagaggaatctgcctatcaaagttcatgaaggatgctttcgacagaaaatagttctgatgcattttcagaactagaataggtttctttggctgcatcccaaatctctttcgcagtaccatagggtaggaaattttctcctatctcattggtcatagaattaatcagccaagacattaccatattatattctgatttccagaccttgaacgctggatcttctttctttggaatggttactgctctggtgagatgatcatctttgctttttccacagatgaacatcatcatagattgggaccattggaggtagttgtggccattcaatttgtgacctgtgatgggaagaaagctgtctattgagccttcattagatcttgtgatgacagctcctggattggatgtgacctcggatgtggagctctgccttttggtggccatcccatattttgtcatttagaagaaaaggttttagaatcacgctttgataccatgaagaaactgcaattgaaagaatagtaattcttttttcttattcgaataatgaaccactatggaataaatggaggagagaatgtaattcccttcctctaattatgggatacagaaaattaaacttcctaaacagattcctctaaaataggaaacagaataaactaggaaaacaaggaatctagttaacatcctacccaaatccttaattcaaggaaagtcaaaacattacatagtaaaatcccttaattcccatgtgccttatcactacaaatattcttgactttctacagaatgtgtagaaggttgttagtctgtggattttatatctgggtaagaaacattaaggccatgtttggttggcgggataggataggatgagatatgtatatatatatatcctagtatatgcattttctatccaatgggatatgacatcctttgatattgtatccatcagacatgatgtcctaaggtaacatatcaaatggaatatgttatgctatattatgtttatatttagtttgtgaaatgaataaaataaatagcatagaatatatattatttttcaatttttaaaataaaaattatattacattataatattttctgtttaaaagaaatgaaatttcttacttttaacaatattcataattaaaatatttaaattttataaatatatatttttatattatgttattcaatatatgaaaataatatatattaaataacacaaatattaatattattttataaatatttttttagttgttcttttttaaccacaaatttaattttataataaaaattttttattttacaaaataagtaatataaaaaaaataaaatattaataaatttatgatacatgggatatgcatatcctatattttagtataggattaaaatatctcatgtagaagagacataaaaaagagggtagatattatatcccacgatttatcctatcttatgtttagttgaacataggataagataagtgatgtgataaattatcctatcctatcaccatccaaacatgggttagaatataatatcccttctcttattttatccattctatatccagccaaccaaacatgacctaaagtgtggcaaaatgaattcttggataccttgcattctgtttgtttaggagcaattttacaggctgctgataattatatggatacatgtacaggggaagatgacactagggtatccttgatgggtatgtgttggacttgcaggtggaccattatcttggaagtcaattctatagttaacttcagtattgttaaaagtacaatagaatatatcagtaacaaaaatagtaaaggaagttctgtggcttaaagactgggattttcttatgtaagtttagagtcatatatgcctgttcacctttatactggcatgttatatccactaataaaaaatataactaggtccactctattcttacattttgttttttaatgtgttttttgagcaaatgatgtattcaattgcaaattctggttgtttttccaaggatatgatggtaagaccaaatttgtatgcatacttcataatcgcgtatgttttgtttgaaggaacctaatctttaaccctgtgattttttatttctttattgttgtaaattgagattggtgatatttagatatgcacacttagcttgtaagcttgtggggttaaaaaatgacctcataattaaaagctgacaacattgatgcccttaattcatgccatatgtaggtgaactgataatgaagtttgttttaaacttccaaaaatgaattaaaagttgtgaatctgatgattactttggaaagaaaaaatggagaacagccttgtgttttgtattataggatttctccctatcgaggcacaggtatctgtgacattgccaatgtaggatttcctaagtattctttaaatgggaccagccatgtgtttcatgcttgttttaattcaagcagagcgagccttcgtccaatatgagctcttcttgcgttaagttttgttgcagtctttttctctccaatctgaacttgagtttgtgtattcagctgtagattgtgagacttagatggttttgccttcctcttccctatatggaaaatacagaaaagtgaaacattgcattagtcattttgtgcagctgtgtgaaaaactgttacaatgggaaaaaaatctgtttccttaaaagaaatttgtagcattttgcttgtattcatagaattatttagtttctctttgctcttagtggaatttttagctgtgctttatttgaattggcgaatccaggtagtgcacttgtatgtctatttctgaattgacatgcattaattgttagataaattttcattgtttttgttcctttaggggctataagcgttttttcagaagagct

SEQ ID NO: 12716 - DNA, 13103 bp, Vitis vinifera
  Intron number 10 from transcript GSVIVT01029102001 (locus GSVIVG01029102001) derived from phytozome v7.0 (chr-ID chr 11; pos 19763540 to 19776642)
gggtaatctgaagccagactatttggaaaaggtatgtttaacttgtcaaatgacacagtggtgcttacatatgtttcaattatgtatatgtgtgtatgtgtgtgtattttccttttgtttgtagtcaactgttaaatgtgaatctgaatgtacaaaggttatggaatgattcatttgggagaatatcctaagtaccttggtattcctacaagatgcgcatgctacaccattttatctaaacatttatgacagttaagtagtgatgggtgccctgttgatgttggaagctactcaatcaatggttggggaggggttttaccaagtttgtgtcaagccttttttcatgtgttatctcatagttgtagtgtaataatctactcctaatcgtatagatattgtccactcttggtccaatgaactttcacaactttaaaatgcatctacataattaagaggagtttactatatatagtgccaatgtgggatatcacagtcacctaacgcctccatatcccacatcagacaggggaatgaattcttgatactatacatatagtgaattccttttaactgtgtagatgtgttttaaagccttgagtgtccattaagcccaaagcaaacaatgtctacataagagaaagtaaacaaatggtatttttgattggaaacgacacaaagatatattgatagaaaaagaagtacaagaagaaggatgagaaatcctcccgccaaagacaactaaattacaggaaaatacacagaaaacaaacgaactccctataaggaccaatccttatggagtacacaccgctatccaatcaagttgaatcacattaaggggagtccccttaaatgccttggaacagaaagcccaaagagaagcaaggaaaacaatagagtcccaaagaaactctgaattccttgctttatccttgaaaatcctcgtgtttctctctcaccacacaacccgaattagagtgatgcacgcagcttgccacaaaactatcccccttttagaagtaccaaagcctttaaatttgatggacatcatgtcagatatgctcctcgggggaacccaatccatcttagctaattgaaataacctgtgccacaacccaatcgtcaaggaacaatgaagaaaaagatgatctgctgattccccatgcttcatgcacagaatacaaatatcaggactaagggctttgtagggtcttctcacttgtaacatgtcattagtattcaccttcttgtgtgccactaaccagaaaaaggacttcactttgaaaggaacttgagaattccaaacgaactttgaaggaaagtcctgaggagatccagaagattgagataatgctagaaaaaaggatttgactgaaaaaagccttgaagaggataatgaccagaatctggcatctaggaccgaaggagatagatgcaattcatccaatgaccgcatgaggccttctaagtcctctatcttagaatctgacaggttacaacggaaattcaaattccaagagaacggacgagtaggaccgagaactgaagaaataggaatgtttttattcacgactactctaaatagtcttggatattgggttcccaaaggttggtccccccaccacaaatcttcccagaaccgaattcttttcccgtttcctaccacataccgagtaaacaaggaaaactcctgaaagacttgtgcaatagccttccaaggacagcgatgtgaccatctgactaaagtgttagcatcccaaccattggagtgtgaaccataaatgcttaaaatgacctgatgccaaagagctaaaccctctctaggatatttccacaaccatttccctataagagcgagattccttcaagaaatattcccaaaacccaaaccccctattgccttcggtttgcacacaacatcccacctcactaaatgatctcttttgccttccctaatccctgacaaaaaaaaatccctttgcaacctctcgatttttgcagccactgacgcgggaatcttaaataaggaaaggaaataacatggcaaatgggtaaggcaagattggataagagttatcctcccccctaaggataagtaggccttttgccacccatctaatctacttgagattctctcaatcactggatcccaaaagccacacgccttaaggttcccacccaaagggagacccaaatagagtataggccatccggacgccttgcaatcaagcatctcagccaatcttgaaagatgagcctgatcaatattgatgccataaatactactcttgtcaaggttgaccttgagcccagaaatgtgcccaaacactaacaaaagactcttgagagtttgcagctcttcctcccttgtgttagaaaagaagatggtatcatcagcaaatggcaaatgggacaccctagttctatttctgcccaccctgaaaccctccaacatatttctttcctcagctctcataagcatcctactcagtacatctacgattaaagtaaacaaaaaaggggataaagggttgccttgtcttaaaccttttgatgccttaacccaccctttagcgctaccattcaccaagattgcataagataccgaggataaacatccactcatccatttcctccatctaggactgaaccccttcttctctaacacatgatccaaaaaatcccacttcacgtgatcgtagaccttttcaaagtctattttgaatacgacgccttcctcccccgaccgtcttctctcgtccactctctcatttgctgtaagaaccgcatccaatatttgtctcccttgaacaaaagcgccttgagtatagtggatggtctcatgtagaacccctcttagacgccctgagagcactttggctattatcttgtagagactagtgataaaactaatgggtctaaagtctaatattttctttgtcaaactctttttgggtaatagaacaatgaaagaggcattagtgctttgattgataattccactcctatgaaattctgcgaacactctcaccaaatcctccttaatcacatcccaacaatcttggaatactgcaatagtaaagccatcaggccccggagccttgtccctatccatctgaaaaatggccttagaaatctcttcttcaatgaaaggggagtccaaccttaacgcgctctcttctgaaataggggaccaatctaatccttcaacaccccaagactctcctgtacggctcgtgtaaagcttttcaaagtaaagtaagatctcctctgtgatactctcggcattcttcagcactaagcccctctcattctccaactccttgatatatttcctatttcgcctgtcattagccactttatgataaaacttagagttgcaatccccttccttgacccatttcaccctagctttttgtctccaatggatttcctccctcaaaattaattcctctagctccccttttcttgaggctctttgacttaacaaatcagaagtgagaccccctacctgcttaatggcatcaaagttagctaataaaactatcaaagtccctcatgcttgatgttagactagaactccccaatttttctgagcttctccttatgacattaaaatcaccgcccacacaccataacggataagttagtccatatatgtcgaaaagttccacccaaaaatccttcctaagtgagggactgtttggaccataaacaacggaaatccaaagaggtccacaatcgtccaaagcgaacttgattgagactgagaaagatcctaatgccacctcctcactacgcagattttttgaatcccacctgatgccccagatgccagaagagcaacccagtccttatttctgaccgtccagacactgcccacaaaccttctgtcacatttctcatttttttgttttctgaatcatcacaacatccggattctctgacctaaggaaatctttaaccatcctacgcttatcccttgaacccaaacccctaacgttccagctgataattttcatggaaaaacacaaaggccctaaccttccaagccaaaaccaccaggtctcaataacctgtggggcctctgttcttcctcctggaatacaccttaatgtccagagagcataaaacctctcgcattttagccattttcctgggggacaggccatcaataaggagatcacccgaatcctccttatacgacctgacattagactccctatgggtacagctctcggacatctggtttgataaagcacactggttctcctcctcaacacggacaaggatgtcaccataatttaaagagtcaacaacaccttttttagaaattttttttgagataacttgattttccgtaggagactgagaaagagggactgaattggggagatgtggaccagagggactcgataagggagaatccagactacaagaaggaaaagaagaagactcgggtggctgagaaggagagggctgacatacctccaagtttctcgctcccggtatttcgcaaatcccctcaaagatgagtcctttacctctgattattgaattagaaggtgaaaccatgtctgaagagccacgaggatcaaaccccactcgtcccgttagcccttttttgtcttctacgcggatcgccgaggtatcttccctcgaaaaattaccaaacagtggagatcgaaagagaggattctctctgattcctctcttcatctgaaatcccgtcccaaattcctcttccatgttgcgaacttcacttgacgacgatgaaccctgtaggaaaagaggctcgtagctactccgatgtccctgccgtcgatcaacgcttggagggaagagggtggaccacgtcttctttgaaattgtcgtatcttcctcctgcgtagaatctctcatctgaaccgcgggagctttcccttttctcgcttcgttttcttcccttcgcgaccagacttccatagcagaggacttcgttcctcctaagttttggcccaaccctgacgggcctattaacttacagcccacggtggtgtctgacagtgggctagggttgggaagagacaaggcctttaactcaatggcccgaccttcctctccaaagatagccgcgacgccggccctctcatcgccttgacaaagcatcgcgatcgcctttgcaggggaaacaactcgctggggagaaggagacgaagccgctgcagtctggtgggcttgaggagcttctgggccagcttgaagcccacgaatcctcatcccactttgggccctttccgtgtgggctttaaaagagatctcaggcactgagggcccaataaaattttcctctactgggcccaggctgctccttccccttccattctcccctttgtctgccaaacttgtccttgagtgccgataacgtgcccggggaagaagcctccttctgtagcactcattgcccctaattctacctcatagcccttctgcaacttttgacgactgagagacgcaacctcccgctttcacccactcgttcctgctacgggttgtctcggatgtgacagcgtcgacttcgtcatcttctctggtgactgaaactgctactgtataggtccagaccccatcttccacctcaagcaacgctggtaacacaacatttggaagcatctccacccacagcttcgccttcgtcaagtctaccaacttcaaagtttcctttgccaccttcgttaccctctcccatttcttcaaaatgaaattcagttgaacttcatcccataagtggaaagggagacctttcaatactaaccagcccctcctgaattttccgtgaaccaccatattttccttaggcgaccatttccttagtagaatagtccttcctttcactaaaattcttccctgttcttgcacctgttccgctctccttgttgaactcacaaagaaacaccccttgaaagcggaaatgagatttatggacaccattcctttcatacccatcatcctcgcgatggcttttctttcgtgagtccagccttggactttttcttggctttcacatattacagctctggcccattttccagctgacagcatacctccagtcctaaaattagcctctgccaccacttctgcatatgactgtcctcctctgtaaatgtccttattcatctggatatctccattcttctccttcgaagctcctccgacttgatcaggatactcttgcactgataggatcgccttcctaagatcttcccacccattcctttttacgccctcggggacgacaagaaataagggtttcctttttgtaacaatttctgtgattttcatgaaccgccctctgttattgaaacatatctccatcaagagggtcttagtcttgcccctaatctttcgtataaaacccttggaagcctccaactccacagctttcttcaaatgctccgtcaaccaatccagctcctccataccaaatcctactgaaactacgaaacctcggctcctttctgttactgatacccaagttccgccattcaatccttcaaactctacctgaaaggactttttctccacaacaatcctttcaactttgcacttcatcatccccaacataagcaaatttttttccacagtatgagaggtttgatcatgaatcacagaaacataagacagtgattctgaagcatcactttcaatctcaccatcatcttcttctgcagtatcctcctcatcgcttttcaatcttgaagttacaaactgagacacttgaagatgtaagtctgatggatttagaagtaagccattccttccattacactctcaccgcaccaaaacaagcaaaggggagccacactccagactttcttttacccttaatccaaacctagtatcaaagtcgatccctaaacctagtgtgagtctagccttgtaaggagtgtttatttgtttgtttgggtggctacatgattcgtgggactaaatggggacattgtgtctatatgggaggtgaatgtgatatctcgattggttaggggaagaagttcatgacactaaacatgtagtgagttcttcttaattgtttaaacgtgttttaaagtcatgaaggcccattgggctagtcaacaaattttttgcatcattgggagtagtttgttatatgcagtgtctatagttggccattgatttgcatttatggtctatttcttttaataaagtcaaacgaagtagaggagtagccttattcacttagtagttaaaaatcttaccatgcatgatatggtacaataataatacatttttgtgtacaacgatgtgttattagtacatatcttaaatgtatcttaagttacaatagtataaacaatactacaaaataatgatttaagcacatttttctatcattaatactttctaaggaaatcaaatttgaaatttcaaaaaaaaaaattatataggatatataaaatgtacttaaagttagaatttgataataaaagggaaagtataaagtagaataactgtagtgaaaattctacctacatgttgtcagttgtcaattgatagtcatgaaagattggaacttaaaaatatttatttttataatgaatattagggaattgttatttgaagtatctgaatgttgaccatgaatattaaaatgaatgaaaatttttcattaatatattagtgtctatttaggtacacttcctgttttctatttttgaaaatgtaggaactaggtttattttgaaaatgtaatgatttttataaatggatttaagaaattgaggtgtcaaagaatttttactacctcaaattttaaaattttacaagtaattttaaggacataagataaacctatactttttgtataagagtttctacattttatatagaagtttctatttttaaaaacaaaaaatagaaagtgtatctgtttttcaagacaattttttgttttcaagaacaaaaaaacataaaaacacatttggaaattagaaaagagaaaataggggcttgtttgtgaactattttttaaaacaattcttaaaaacagtttttgaaaattgttctttgatattttataaaaccaaaatttgtttaaaaacttgaaatgtttttaacatgtttttaatatttttaaatgtgttttaagaataaattttatgtctagtgctttatttttaatcattctacatgtttgtataattatttttttaaataaccctcaaaaaacaaataaaaacaagtgaaaacaattaaaaaatgttttctaaaaacactttgttttctattcttaataatagaaaacaaaaaataatttttggttgtcaaatatattttccttattttttgttctggagaacagaaaactgttatcgaaaacagttgttaaacaaattctagttttctgttcttaaaaacagaaaagaaagtatttttaaagagtatcttttagttattttcactggttttcttagtgttgttttaaaagataattatacaaatatggagtatgattaaaaataaagaactagatataaaatttatttttaaaacataaaaaaaaagaaaaggttaagaacattttaggttcccaaacaagattttgttctataaaactttagagtatggttttaaaaaaattgttttcaaaaattattttttcataaatgttttcattaacacttcccaaacaaagccttatttttccttttttagattctcttttttcttcaatagagggaatggtgatgagcttgaaaaccagaacttcaaatgtggcaataaatacactcaaaataaatgtttattttggaaggaaagaaacatgatagtttttgatactgaggttttgtcgattcaaagaatgaaaaattcttttgtttgtaatctcttctcttgggctaagtcttgtttagaagtaggacctttttctttaattaactttgttgattggttgggttcttgttgagggctggtgagtgcttgcctttttgtcttttgtcttttggtgactcttgtatactccttgtatgttcgggttgccttttaagctccctttttctaatatatcttctatgggtttagctataaaaaataaaaaaaaataaaaaaatacactcatattagcagtacaaacgagtgtatatggctaattgaaattggaactaaaagttaaatatggattctctcatggttttaagcatggattctctctcccaccacaccaccgcgccccgctcccaccctcccttactctttatttttgtttcttgctttttaaagattttaatgtaccaattacacgcttatatgcaccccacattttgtgtgacttacaaatccatgattaatatgatctagtgcaggaaaaagaggaaaaacccccctgatttctctcaccttgattctagaaaaattgcattagatttataggagatgatagcaacaaatctgccagctaactcctttattttaaggataaatatgaaagataaaccaaactacaataggaaattcaaaactgaactagaggtattggataatagattatccttatccctttatttgaactagctaccaaacacagaaacctatcgcaggactcctaaaaatcatgtgatcttctataaaatttggactcacgatgtgaatctcatttggatttctgcactccccctcaagttggtgcatggatgtcaatcagtccctagcttgttgatcaaagcagctaaactaacccttagaatggcctttcttaagatatctagctctacctcagccttgcttctagcaatgactgactatttcttgttgcgctaagttgctaaatttccctagacgtaagtgcaataaccaaaggtggattctggtcaattatggaacctgcccaattagcatttgaaaaaatttcaatacctttgtttgttcctttccgaaagtacaatcctttgcctaggatcatttttaaatatctgagatttcgatatactgcttcaagatgttcttcaattagattgttcatgaactgactcacaacacttattgagaaaccaatatttggtttagtatgagataaatatataagtttttcaacaactctttgatatcttcctttatcaactagagagctttcttctgtcatgcctactttgcatgaagaggccatgggagtgttagttggttcacttcctagcattctggtctctttaaataagtctagatcatacttaccttaagaaatatagatgccttttcgtgatctagccgcttcccttccaagacaatatctaattgctttaaggtccttaatctcaaattccttatcgaggatctcctttaacttgatcatctcctcctcataactcctagttaggataatggcatctacatacacaatgagaatagcaactttcccatcatgtgagtgcttggtgaatagaatgtgatctgactatccttgagagtgtctatgcttcttaatcgctcttgtgaatctttcataccaagctcttgatgattgtttgagaccatatagagacttctgcaacctacagactttgttggcattgcttgttgtttcaaatactgagggaaactccatataaacctcatttccaaatccttattaaggagaacatttttgacatctaactagtgaagaggccaatttaaattggttgtcaaggatagtagcacacatactgtatttagttttgccactagagcaaaagcctcttgttagttgattggttgattccataggtctgagtaaatcctttagcaactagccttcctttgtagtgatctacacttccatcagccttttatttgacattgaaaatccacttgcattccataagttgttttccttcaggtagatctgggagttcccacgtttcattcttcttaagggcatgaaattcaggtgtttctagagcttcctagatattttttggaatttctttctcgaaaagatcagtggtaaaagcacgataccttggagataatttttcataagatatgaaatgggaaatcgggtgtcgagtacatgtcctaataacttttttcaaagcaatgggaatatcaagattatcactaaggtttttaccttgcattgagttacctggaatggtattaggattgtcttagcttagctgggactcttggttctgctccacaagtgttgaaggctctttctcctttcgagtttcctgtcactttgaataactctttgtgattttaagttgtgggagaatgagaattagaatctgtatgtggaatgggaacgacagaatgagaatcaaactctacattctgagtatgggttggattttttgtggaggaggtggtgtgttcagtggggcaacatctttgcgtgaccaaaactaatattccttagtggtggctgaattctccccttgaatgagttttggggtagaatggtgtgttttcgaagaatgttaattttgcatcaagtttgttgcagtattgttggtgaatatgtaaaaaggcagaacatctaaaaattttaaagggtgaggaagagatgatttaaggataggtttatgtgagaatttgtgaaggagtttgaaagttaagatctctagatggcattctgttgatgagataagcagtagtgggaaaggcttctcctcataaatgtttgggaacatgtgtagtgaacataagagaccagttccaagcacgggtggcacaagacagggttgtgattgtctgagaagcttttgaaggaggcccatttgttctttactgaagagggtcatttcaaagtttggatgctcattcccagtggccagaaagccacaactatcctgttctgtaagttgtctagatggtttctagtcagcaggtttctcatgaatcttccagcatgtatccctagtgtgtcttggttgcgacagtgatcacaccaaggtcttcctttccttgtccgattatcattgcttgagggatttacccctcaggacacaagcgccaaggtctcaggtgtagcactagtgctttgatttcccatcataattttctgcctgctctcttttcttctaacctcaaagaacaccactcatatggatgacaatggcttaaattcaagaattctttcccgtacttcatcaagatttttcttgagtccaactaagaatttgaaaattctttccttttcaactatcttcttgtatttgatacaatcattgggatggttccacatgagttctttaaacatgtctagttgttgcgaatgacgggtgagaatgttgttacaagtcatgaagattgctctttatctcaaagagtttggcggaattttcattgtcaaagtatgttttgttttagcaacatcctatatctcttttgcaatggagtagaacatgaagttttgaccaatctcagtctccattgtgttgatcagccatgatattaccatgttatctcagatctccatgttttgaactttggatctccggttgttggagcagttacaaccccagtgaggtaatcatccttaccctttccactcacaaacatcatgaccaattgtgaccatttaaaaagttctgcccatttaatttgtgacttgtgatgggctaaacagagctctcgaagttgctatggttgctggaaacaaccatttcttgggtagatgtggcatcggaggtggggctcttgtcactggctatcccctgatttctctcaccttgattccggaaacttacatcagatttataggagatgatagcaacaaatctgcccactaactcctttattttagggtaaacataaaagataaatcctaactaatatagcaaattgaaaactgaactagggatattggataacaaattatccatatctctttatttaaactagctaacaaacatggaaacctagcttcgggactccctagaatcatgcgatcctccataaaatttggactcacaatctgaatcttatccggatttccacagctaggaatttttatggcttagctgattaatcttttacttttgagagagaatgttgaattccaagttgaagctggtttccttgattttgattgtttacttttcagaaaggttttgttgaggctc

SEQ ID NO: 12717 - DNA, 2661 bp, Vitis vinifera
  Intron number 4 from transcript GSVIVT01017995001 (locus G SVIVG01017995001) derived from phytozome v7.0 (chr-ID chr5 ; pos 5342716 to 5345376 reverse strand)
caaaaggagttagcaaccatgtatgtagcctactacatttgctaatttgtggtgtacttttccaacttctatatgctggaaaaaattggggttttctggtattcatgtatcaaagtcaaaaagccacttggctcatcacaaggacttgagctgatactgacacttctaagttcattaataagcctgagctaactcagtcttgttaattattacaggtctcaatttgttggcattgcatttagaactaaaagctacagatttttttttgcgtttagttagttttttaattttttgagaacttgatactaatggtgtaaagatccagattatatgtcttcctgtcctatgtaaaagattagatgtaagtaattgttaggttaaataaaagtgaacatccactagactgaatttgcttcaagctgaacctgggctgacctatagcttagtgggcgaaatgttgtcgaatttccagatgacctaagatgatagacctagcttacagtccaggcaatggcattgggaaagtcaaccaaacttttgactcattaacttcttttagattttcaaattctccattattttcaaatatttagcattttcttataggtaacatttttcccccatagtaatctaacttggaacatcccacatccccatcccaaccctttgcaattgagccaattatctagatagtaacactacttatatgcctttgagttattaaaaatagtactttaaagagatacaatacactagaatcttaataaaattctagattacaatgatgttttgaggtaataatatttgaatttgtatgaatctcaatattatagagtaagaatttttttgtgaaaagcaaaagtatttgtactccttgtccaataggagttgggtttgatgatttcatgattatttgtaggttgccaatgaaggactcatgagattaagatgggtctttaaagacttcctagtatttgtcaagaggtagccaacattatagaggtgcccaatctgatgtgtttctttggagacgaaagaaaagctgatatgatttttgggaggagaattgggttttggcatgatgtgtaaagcaatgattcttagcctcctttcttgagctgtttaacatagttgactccaatgaggcttgggttgcagatatattaggagttgagggggattagagcactgatgagaagcaagggggataggatgatttgcgagcattccaaggatggagtgttttctgttaaatcttttttctagtctcttggttcagctagtggtgagtttcctgctgaggtgatttggggttcatcagctccctcaaaagtggacttcttttgaggggaccaactgatgaggagagggtggcctttagtggattggtgctgtttgtgcaagggtgaggaagagttggccaaccccatcctgattcaatgtaggctagctcgtgctttgtggcatctcatactctttttgtttagtctttcttgggctttccctcggttaaagaggtttgattagggtggcatggaagcttgataggaaagagtgcaggaaagtttggagaatcttccctttacttgctttggaccatatagagggagtgaaattattgaacattcaaagacttagagcagccagttgagcctctaaaagtcttttctttctcttcttttgtgatctggctcatttgagaagtttgtggaagcagatctttgtctttgttgggtttctttgattgtttgagcccttactaaagttttggagttcatagttgtgccctttgggcactcttttgtatacttactgtgtatgtgggttgcacccacttttgattggtgcttcttctaataaactctctcttgcctaggaggaggggaagaggagggggagggggaggggagggggggtggtgagaaaggctgatatgagtttggtggggaaagtcaaaatatcatgaaatctaagtgtgatttatgctttatttagtggataaatcaactatgagccatgactcttattttttcatttatgatgttcttctcttactttttaaggttatagattctaagtatactgatgttatgcataaatgagttgttaatgtctaattgaacttcaccctgttgttattcaagtggtattgaagtgatgcccttttataatcaggaattgttgcttacaaagcaaaaaatgtagtttctgttgatcctcccttgtagtttagtgtatctaatggtggtacatggtagaagtactgttatctttgcattcaccaccttttaagatcatatgtactaatggggaaaggtggcccaattatgtttaaaattgagtaagagtgatattgcatcaccgtttgctgatcaggaaatttgttgttctgaaaaacacctttatttcctcttctgttctgttgttggcatacctttgttaatatttgatgtgtggatcttgaagtttgtttccttatgttgtcattctaagtttttctattagtgatttatattggagaatcattgtcctgtgttctctgtttatattggatttgcggatcttgtttgtttacacatgttattattctgagtcttctacttgtgacttacatttcacatgacagaatagtgaataagtatcaggataatccttggagaa

SEQ ID NO: 12718 - DNA, 4430 bp, Vitis vinifera
  Intron number 2 from transcript GSVIVT01017833001 (locus G SVIVG01017833001) derived from phytozome v7.0 (chr-ID chr5 ; pos 3865445 to 3869874 reverse strand)
gccctattttcctctgccactctcaatcctcccaggtactaatctaatcttgttatttatttttatttttccgcaaccccgtttgattcccaagaaaatccatcccccattcgatttccgggaaaattcatcatcgtttgatttgagaaaatccatgcaaaacccccaaggaaaaccagaaagattgctttttttttttttgcttcctgtgttttccggatctgttctaggggtcgctttgcttttgtgccattggatttaaatttcacgaaccctaaatccacgatttttgagccaggctaaaaaacacaacctttgcctgcaaatcatgatcagattttgtatcctgtgcgcgggctggactggtaggaaatatcgggaaatttcccgaaaaatcggaaaaaaaatcggcgatacaaaccgaaaattcgccgataaattgcagtgtccggcgattttttgaagatttcgcctatttttcgcctgcatccatttttcggtgattttttcgccgattttaaccgaaatttggcgaaatttctcccatcgacatttcgcccccctctttcgtatcgccggccaccgaaacccgaaatttcggcgaaaaaaaatggaaactttcatccttgatcagacctacggagaatcattctgtatttttctccaaacgctgcgtttcgatcgatctgagttcaatcaaggcactgctccctgtctctacccaattcaatcaatccatcgaattcttggttagatacaatggtttggatgctgagaaaatgcaaataggttagattcaatcctttggatgctgagaaaatgggggaaaaaatcgaatagtaaacttctctccatctagggcgcgagaatgcagaaaaatgacgctttaccctaaactcgtatgaatatttggctagttgatgtgattttattttttgttttttggatttttggcagcaaagaaagtgagaaagataacgtatgaataaaattgtggttttctgttatctttattcattttcttgttagccaagcagagggtcggaatttacttcaagtgctttataacttgggaatgctgttgctggaagttttgaaatctaggatttctctttgaacagacatcgaaatattgcaagtttgaattacagcttagactgaaatttttgttagattgacggtctttgctgtttggtaatgttttcttctataaaaatagattcagtttagacgcagagaaaatatgagaaaataattcatttttgaattgtcaggttttcaccaccggggattaggaaatacagaaaaatgccactttgcttaaaacactcactgactttttggcttagttgacctgggtttattttcttttcttttatttatttggaaggaaaagataagagaaggcagaagaatgaaaatggatttttttatttttttgctctattttcttggaaatcaaacatagggtttctctttgaatgcttttaattcatcaatgctgttagcctgttgctgaaaattttgaataatagggtttcatgtttggactacagctcaagctagaattttgggaacattatcgggtacaattatgtatataaatattttcttgaatttaatcaatcgatgttcaataattttaccatgtgaacataaatggtacctgatataaatagaagccttgaaaaaaaaaacctcttattgtgatttttaaggtgaattttaaataacataaaggtgaatttattgtgaattttaagacaaattattatgattgtcatagttaaataataactacgtgtactctggaatatgaggggagagaaaagtacaaacttttcgtacttttatatatagtatggatttttggaattgtagggacatttcatgaaggtcttcaatgtgaaactgaaagttttttttggacgcaactttgaggaaaaaaaataatcttcagaatactcttcactaagttgacactaaaattttctgggagaagtgatctctgcagaatattatagaaagaggattttggtgtttgcttcacttctatgcttcagttttgattctgtagaagtcaatcctgttttgagaaaatatgttgaatttgtgtctgaaacttgtgacattgatattaatctgaaaaacaatgcagctagctgttgctagagcaaagaagtgaaaataccttttcctttgtcttatgacatggtgagatctcctctatataaacagttaaagctctgttttacctgctaaactagtggctggattattatgatcaataaaaagcaaggcttaaaataatctctggttcaacatctcagaaaactgactgaaatacattaattctaggagtagagttgaaaagagcatctaaagaaacatcaacggtattaatgtgttcacatataagttacaaattcagatatagatgtgtctggaactcaaagactattgaaggagcagtagccaaaactatacaaaaaccaatgtgaatctgcatggtgccaataccattaatgaaaataggcaagtaaatttaaggaattgcagtggtaatgggtggttgataaaaccttacaatgtaaaccaggaaagaccaaccaaaaaggagaagtactaagagtattgagcataatcaggaaattatctgtgtttccaataatgtagagcagtgatggatagaaaatggagatagtagcacaagaagtatggatgggatactaattaagcatgttaaatgtactttgtattgggctttatgaggtctggttaagggttttttcttccaggagatgatgaaaggagaggagccaaactcagttacaatctttctgatttgaagttcataccaacttatactcattaatacttgcacttcatggttgatcataattttagattccattgtgatttgtgaacatgtgactgtggaacttagtttagagaaacgaaagtacatctcactgtttcattatgcggatggaaaagaagacttaaaatggtttgaagattcatggtttatgtaagcatttgttttgtcatatttgggtgaagccaaatcaagtactcaatgtaatgaggtgggggtggaggatccctgctaactatgatgaatgcagtaactatggatatgatgtttgaaataaaccaattttatatcacccttcaattcgaattagcaaaaacaatgtccccttgcataatatggattccaaacattcatgatttggatatgaattagttgaattacttatccctcggtctattagtgaactatctctccctctctctctctctctctctctctctctctagagattgtgaaagatgttccactagaaatattcttgttattgcttcaactcatattccccaaaaagtggatcctgctctaatagctttgaatgaattaaatacatgtattaagatacgaaggtttcttattccacaacaatgcaagcacttcctcactctttcatacactaggggatttcacttggaaaataaaatgttccatgctaatagatttgggtccataaccatgggttccaagcacaagatcttgtagcacttaccaatgaaaccctatcaattagtattacacaaaagaaatcaattatagacactaatgtaattagatctgctcttcatagacaaacatgggatttgcgatcctagataagatcagttcaagatcatgggatccttcttacctatcaaaaagaaaaaatcatgggatccttctctattatataggaaggttgttgcacaaaatgtacttcttagaaaattgccccatagatcctatatctatccatatgaagaagaaatcatgtaatgaaggggattcttttttttgatagatatgtaatgaaggggattcttatttgtacaaatggtacttagaacctttttttttttttttggctaagtaaaagcaattgtattaagagtgcataaagaagaacatccaaaagtatacacaaatggtacttcgaacttggaacgagcatgaagaaattaactagacttctttatcttttgagttgttcccaacatatacgttctctagagttgtttgtggggtagcaaactttttggtttggttttgggttatttggagttcagctagtatggataataagctgcagtataaaaccgaaagaatagatgattagttgaatactgggttctgatttttatttttggacaactcaaattttctgaacttagaaccccagatgagaagtttgtgccttcatcaaaaaaataaataaataaataagaagtttgtgcctggacctggtttaactcatgctggccaaaagattctagctattctccacagaatttattttctctttctttaaagattccagtcccaggaagtttgattggttctttcttgtttaaagccaggg

SEQ ID NO: 12719 - DNA, 11361 bp, Vitis vinifera
  Intron number 12 from transcript GSVIVT01013865001 (locus GSVIVG01013865001) derived from phytozome v7.0 (chr-ID chr 16; pos 5607868 to 5619228 reverse strand)
aaaggccacccattggtccaattggcgcccatttggtaagtaatggagcaaatgtgattgtttgcatgtttatatgtatatcatgtacaaatgtcttttcatatgttttgtgtatggacacattttttggactcattctttatggaatttgtaaatattcattgtgttgaaaccaaaaagcttcatctttattcgcttaaaaatacttatattgcaatggtatatatttataaaatatggaatctagaagtatcagaaatcctaaatattcagagggatattaggaattctaggtattaggagaaattaggagtcgtataaaatacctaagctactaacctatttttaatactccccttcaagctggggcttatctatctataagactcatcatggtacacaaactataaaaagaacttatttcaagagatttagtaaacttatcatccacttgatccttagacgacatatggagtgatcaccttctttctcaccatttcaaatattctttttgctgcactttaaatcccttggattgtaaaatgtgattccacttttctttcactttaatgtatacccattacaacattagtgaataaaagatgttaggcccgtttaattttgtggaagtaatctaaaaaccagtgtagtctatcaaatttccatattttgtttttcaccaatgttgatcataatcactagctaaacaatgaactgtatactaaacttcaacaatgaagcaaagggaaaggacaataattattaacacttaatttacactgaagcacatatagctatccaaatggatggaaaagcagcaaacactgagttcatgcctcacgcagctgcacagacttgacaaagatttcagcgcatagagcagcacaaacacatagaaagcaccagaacactacgtttatcagcagcgcacaatgaaatcaatgccacaccatgaaaaaacaattagtccagatggatcacatccgaaacagaactatcagcacctcaacacattgcaatcaccacccgaaagtgcctgatctctcatcagagaagtgctccaatactatgttgaaatataaatttttttcattttgttcacataaaaggacttgtattacacataaaatctagaatccaagaagtactagaaattctagatagtagaagagtaatttggaattctccttgtgctatttttaatagttgatattgtttcttagtagtttttgcctccttgttctctgatttatagaagtcaaagagagatgattaatcattggaatgtttgcatattatctcccttttgtagaacttcgttactcttaacctgatggaattaaatgatacttgtttttctcatttttcatggaattggtaattttgacatttaggttatatcttgggattaatgaaatgaagtatcacattgctgttgtctagtgcatgtgcgcgagtgagctacacacactcacataacataagggtgtaacatgtgggattataagaggaaaaatttagagggaaatgtaagcttatttgtggaagaagttaaaataggaaaaatttggaactcactattgggaagttactattttattttcttttattttttacttaaagaataatataggattatttgtgtcatttcatatgtgaaggagttgtgatgtcgaggaaaggttatcttcttttagtgataataatatacatagacacatatattatgaaattttttcgttagtttctcttttattttctttagataatgacttgcagtatttctaggtgcttctttctcttattgttttcaaacatgatgcaatatatatgacttaattatttttgctcttattttttagatctaacaaatagataacaaccaaatgatgaaaaagaagggatacaaggaagagtggctattctttagttaaacaaagtaagaaattacaaacaatagagaaaaccacaaattaagtattgaaaatctttagtgatacttgtaagtgttgaaaagtatgattgttcaatttaccaaagtgaaatgctagtttatatcatctaaggaacaaggcttgaaatctgaagcaaggagattttcatgtaatagaatactttaatgccttctcaagattatgacaagaattggatttgtcgagtaatgaagaatggagttatttggatgatgctacaaaataccaaaagctgattgataaagaaagaatttatgatttcttggcctgactttataaggagttatatgaggtacggggacgtctacttggaatcaacccacttccgacaattgaagaaattgttgctgaagtaagaagagaagaaagtcgggaacgtgtcatgcttggaggaaaatctccagacatagtggaaaattcgacattagctgtaggaagatccaagaattgaaacagaggagaaccacaaaataatcgaagaggaaatctttggtgtgatcactataagagatagaatcataacaaagaaatttgttggcatttgcatggtaaacctaactggagaggtaacagaggaaacaaatgtcatgctaaaggatttcggacaatgacagacactacaatgacatctcaatgacaaggagataataacagcaaccttaacctcacaaaagaacaaatcgaacagctattcaggctaaactcctgctaaatccactggcacttctctgttagcctgttaaggtacattcttgacagcccttagtagtgtcagtgagaaacaagaactctgggtcatagactcaagggcttctgaccacataacaggttgtgaaagttttttctcctcttatgcacctagtttcaatacttttaaagtaagaatggctgatggatggctttcaacagttgtagggactggtaccataaaaattagcccaaaaatagttcaagaaaatgttcgtcccaaattgtcttgcaaccttctttctcttagtaagataaccaaggatctcaaccttctttcttgcagtggtcacaatttgtcatgctgttcattagaggaaggggtaggatcaactaattgaatggtacaaaacaggcccaaaaatttgatgatcccacgtaccatgtctgggatgcagagagttctatgattttatcatggctcattaattctatggaactgaagattgagcaaacatatttctttctcaacactaccaaacaactatggaatgtagtgagcgagacgtagtcagatttgggcaattcctcacaagcttatgagttgaaaacgaagattagaaatataacactggggaatatgtctgtaacaagttattacaatatgttgaaaagtttgtggttggaacttgacttgttctatgaccttgaatggtcgtgtgttgaagacagtgctcaatatcaaaggaccgtggagtaggactgtgttatgaaatttttagctggattaaatacagatttggatgaagtgagaggtcgtgttttaggaaaagagccgctactctcaatcagtaaagcattcttgaagttagataagaagaaagtcgtaggggagtgatgatgggaaaaccaactgaccaacggtgagaattcaacacttaatgctactctaccagccaataaaactgctgcaacaacatacaatcggaaacctgtagcccagatttcgaatagtcctaatgaaaagcccaaggtatggtgtggttattgcaacaaacctcagcacaccagagagaagtgcttgaaattgaatggaaaaccaacaaattggaaggaaagaaaacctggagaaaagaatggctgtggaatgcaagctactgcagaaattgagattctttttatcaaagaacaacttgagcatctctacagaatgatgaatgaagtccaactttcaagtgtaccctctgtttttgggctcaaataggtagtgtattcactagttccctaaattcagaaccatggataattgattttggtgcatttaatacaggactagtcagctacacttttttaccacttgttctccatgttcttgtcatttaaaaatacaattgcagatgacagactgtctctgatggcagggaaaggttctataattatttatgaaaatttaattctcaaatttgttcaccatgttcctaatctttcttgtaatcttttattagttagcaaaataacgaaagattctaactactttgcaaaattttgtgactcattgtgaatttgaggaggattcatagtgttagatgagactttagatttccatataaatttggctagggagaaagaatatatatctgatgcattagacaaagctatgaaaaaggatttgattgaaaataatcctaaagaggtcaatgaccatgctttcacctcttaggcggatggagagaagtgcacatgagtgaggcaggacatatgtttcaaggtcctcaatctccaatttgtaaggttgtgatggaaattaagattccaagaaaaagaagagtggccaaggatagttgacatagtgagatttttaattgtaacaattttataaagacttgaaaattgcgaacataacggttggtccacctaccaaaaactctcctaaaaatgagtttttactccatcactcataacaaagtgagtgtattaaaaaagaaagaactggatcatttgtgcaatggccttcctagggcaccgatgtgaccatttgaccagaaggctagtttcccttccattagaatatgtcccatgcatgttcatgataacctgatgcaaaaagacaaaacttttcttagggaacctctaaaaccatttctctaagagagcgcgattcctcatagaggtcatcctaaaactcaaacctctatagttcttaggcttacacattagatcccaactaagcctattccccagctaggcctatgcttgctttttataacactgtcttaggatttattaactttgtggatttttgaataattatacataaagcactttaaaatttgttagtagttgaagctaatcttgtatccatggtcccgactttctaacgtcttccaattttgaagtcaccaaatattgagtgaccatgcttggtttataaaaattcaaacgatagttgttgttctctttgtttggtacttcttaggttatttctgcctttgttacggagactcttctaggatgatatggctcctttttgggatgaaggctgttgaaagttggcattcaaagttaggaaagtatttttcagtttcctaattttaggagagaatcaagctagattgattttttcttattcagtcatttgtgtatatatacgtgtatggtgtgtaccgaaatgatcaataaaaggaattcagaaattcttcatggtatcaaagccagttttctgaaaccctaatcccttttggccgcctcttattcaggccatcattcattccggccaagtctctctggccatctctcaatccgaccatctctctctgtggccatctctcattccggccatcagtccctgttctcagagccaagggagaaaacgctttccggtcggtcgaatcgtcgtcagaaaacattcaccgccggcgacctttctggccaacttttccggcgacgtctttttctgacaccgcccacaccgcaaggagcgcctggaggagatctccaatttttcccaaagcactggagccagaaaaccacccacgcgccgtccacgcgtgtttttccggccggcgactgcatctcacgcgcgtgagggggcgtgaaccactttccggcgacgcgcttcctcctccaacctcgcttgacgccgactagccacccttcatacctgtttctgccatccgagtcctgctcgtgcctcttttgggttcttttgcctccgtcggccctccgaacagtttttccggcgtcctccggctattttttctcaaccccaattccgtcaagtgccttgggaagtgttcttctacctttctggtggtgccttggttgttttttcttttccattaggccggtatctctgattttctcctcttccctatttccagcaaccatattcggctgtcttcctcatctccatgacaaaatacggaatgacatcatcacaagtatccagcgtcacgacaccagaatcaaggggcagttctaaaattccaaaccttggtggcagtgattcctctcctattctcatcacaggacacaaattaaatggccataactatttacagtggtcacaatctgtgttgttgttcatttgcggtaaaggaaaggatgagtacctcactggagaagcagccatgccagaaactacagaatcgggtttcaggaagtggaagattgaaaacagcatgatcatgtcatgacttatcaattccatgaacaatgacataggtgaaaatttcttgctgtttgggactgcaaaggacatatgggatgcagccaaagaaacttattcaagttctgaaaatacttcagaactttttcaggttgaatcagccctacatgacttccgccaaggcgagcagtcagttactcagtattacaacacactcacaaggtattggcagcaacttgacttattcgagactcactcatggaaatgttcagatgaatcagcaacatacaagcaaattgtggaacaaaagagactgttcaagtttttcctaggactaaatagggaattggatgatgttagaggccgaatcatggacattaaacccctgccaagtctcagggaggctttttcagaggttaggcctgaagaaagtagaaagaaagtgatgatgggatccaaagagcaacctgccccaacattggatgcctctgcccttgctgctcggtcatttaatagtagtggtggagatcatcagaaacgggataggccttggtgtgattattgtaagaaaccaggccattataaggaggcttgttggaagcttcatggcaaaccggctgattggaaaccaaagccacggtttgatagagatggcagagcacacgtggctgccaactctgagagcacatctgttcccgagccgagtccattcaacaaagagcagatggagatgctacaaaaactattaagccaagttggcagtggcagtactactgggatagccttcactactaatcgaggaggaatgaagccgtggatagtggacacaggtgcttctgatcacatgataggagatgctgccatttttcaaaattacaagccaagtagtggtcgttcatccgtccatattgctgatggttcaaagtcaaaaattgccaggacaggttccataaaacttactaaagacttgtatcttgactctatcctccatgttccaaacttggattgtaatcttttgtccattagcaaattggcccgtgatctccaatgtgttactaaattttatccaaactcgtgtgtttttcaggacttgaaatcggggaagatgattggcagtgttgaactgtgttccaggctctacctcctcccatgtggccaattctcaaaccaagtctctcaagcaagctgcgtacagtctcagagtatgttagagtctttcaattctgtgtcaaattctaaggccaataaacatagtgagattataatgttacactatcgccttggtcatcctagctttgtttaccttgcaaaattgtttcccaaattatttatcaataaaaatccagcttcttatcactgtgaaatttgttagtttgcaaagcatactcgaacagtatatcctcaaatcccatacaaaccttctactgttttctctttagtacatagtgatgtgtggggtccctcacggataaaaaatatttctggcactcgatggtttgtgacattcgttgatgatcatatacgggtaacatgggttttccttatgaaagaaaagtcagaggtcgggcacatttttcaaaccttcaatcttatggttcaaaatcaattcaattccaaaattcaagtcctcaagtcagataatgcaaaggaatactttactagtagtctcagttcttatcttcaaaatcacggcattatccacataagttcttgcgttgacaccccacaacaaaatggggtggctgaacgcaagaatagacatctcttgggggttgcccggtgccttatgttttcctctaatgttccaaactatttctggggggaagccattctcacagctacctatttgattaaccatatgccatccagagtgcttacctttcaatccccacgtcaacttctcttaaaaaaattccctcacacccgtgtagcctcttctgatttaccactcaatgtatttggttgcacggcattcgttcatgtgtatcctcaaaatcgtagcaaatttgcttctcgagccaataagtgcattttcctagggtattctccaacccaaaaagggtacaaatgctattctccaaccaacaaaagattttacaccaccatggacgtctctttctttgaacatgtcttcttctatcccaaatctcatgttcagggggagagcatgaatgaacatcaagtttgggagtctcttcttgaggctgtacctttttctcaatccgtgcccactgagttgtccacacccatgccgtcatcagtccagccagcccagcccacaaatgttccttttcccgtgaccatccagtctcccatgcctattcaacctatagccccacaacttgctaatgagaacttacaagtttacatcaggaggaggaaaagacaggaattagagcacggatcacagccaacatgtggccaatatattgacttcatttcaagtctacctgaagagaacataggtgaggatagggctggagaggtgttaattcccagcattgatgattctactctgccgattgcatgaggaagggtgttaggagatgtacagatcatccaattgggaattatgttacgtatgaagggctatcaccatcttacaaagcatttgctacttctcttgatgatacacaggttcccaacacaatacaagaggcattcaaaatttcaaaatggaagaaggcagtacaagatgagattgatgcacttgagaagaatgggacatggactatcacaatttgccggttgggaagaggcccgtggcgtgcaagtggattttcaccataaaatacaaagcagatggattagtcgagagattcaaggctcgtttagtagctagagggtttacacaatcctatgggatagactatcaggaaacttttgctcctgttgcaaaactgaacactatcaggattcttctctcattggctgtcaatcaagattggtgcttgcaacaactggacataaaaaatgcgtttctaaatggtgacctagaagaggaagtctacatggaaataccacttggtttcgagggaagtatggcaaagaatcaggtttgcaaactccaaaaatccttgtacggccttaaacaatcaccccgagcctggtttgatagattcacaaaggcagtcttgaagctgggctacaaacaaggtcagactgatcatactctatttgtcaagaagtctcatgtcgggaaaatggccatactgatagtcaatgtcgatgatattattctatccgggaatgatatggaggaattacagaatttgaagaagtatttgtcagaagagtttgaagttaaagaccttggaaatttgaaatatttccttggtatggaagtggctagatcaaggaagggaattgtagtctctcaaagaaaatacatactcgatcttcttaaggagaccggtatgcttggatgcaaaccaattgatactcctatggatagtcagaagaaacttggtatcgagaaagagagtacaccagtggacaggggaagatatcagcgactcgtcgggcgcttgatttatctctcacacactcggccagatattggctttgcagtgagtgctgtaagtcaattcatgcacagccccactgaggaacacatggaagcagtctacaggattcttagatatttaaaaatgacaccagggaaaggactattcttcagaaagacagagaatcgtgacactgaagtatactcagatgcagattgggcagaaaacatcattgacaggcggtccacttctggatactgttattttgtctggggaaatcttgttacctggaggagtaagaagcaatcagttgtagccaaaagtagtgcagaagctgagtacagagctctagcacggggaatctgtgaagggatttggataataagggttcttagtgaactgggacaaacgagttcatctccgattctgatgatgtgtgataatcaggcagctataagcatagcaaagaacctcgtgcatcatgacaggaccaagcatgttgagattgacagacacttcatcacagagaaggtgactagtgagacggttaaattgaactacgttcctaccaagcaccaaaccgcagacatcctcaccaaagctttacctaggcctaacttcgaagacttaacttgcaagctgggattatatgatatatactctctagcttgagggggagtgttgaaagttggcattcaaagttagggttttaatttaggaaagtatttttcagtttcctaattttaggagagaatcaagctagattgattttttcttattcagtcatttgtgtatatatacgtgtatggtgtgtaccgaaatgatcaataataggaattcagaaattcttcaaaggcaaaagaaggcatggagagacgctccctacaccatattttggactatttggaatgtgagaactgaagatcataaatgaaatgtctgatcaaagtctcaaaagcgcttttctcattaacctctatttgtggctcaaggtgtacatagatgaattgtctgtctttattggattttgttgattgattgggtttttgatgagggagtactttttccctctttttttatttacctcttagtgcctgttgtatacattccgtgtattcgagtgtgctaattcttttgatgtttttaatataccctctttttcacttatcaaaaacataaaaattcttagataggatggattcccaatactgactaaactatgagtctaatcagttttggatattgatatatagttcctagtgtttgagagttcctttttcggcatgtgattcctctcagtagtgatgttaattctgtcattcattatcctttgtgattgttgcatggtttttattcaaggaaaactacacctgtgatgtaagaatgtgattgtgtttccttgatcctttggtttttggtgtatgcaagattatcaatttttattttttattttttgtatagatatcatgataatttcataacttcctgctaatatattggtttgatgattacataaagactttagtca

SEQ ID NO: 12720 - DNA, 10691 bp, Vitis vinifera
  Intron number 13 from transcript GSVIVT01011337001 (locus GSVIVG01011337001) derived from phytozome v7.0 (chr-ID chr 15; pos 8876603 to 8887293)
ttgcatttgattctagtggatctattgtttggaaggtatgaatctagcatgctactttgttgctagatttattttaatctttcttgaataagaaacaaaattcctagtgtattacaaaggaaacaaaaggtacaagaagaatcaactatttttttaaaatcaaactagaaataaaggaattacaaccaaattcatccaacaaaaccatatacttgtgagcctatctaatctccactaaacatcaaggattgtgggaagtctcctaaagaacatttctcatattttagctcatgtttaatctagttaatccgttgtctcatttgtatactaagtgaaagtttttaaaactttggtttcatggagaagtaaaaaatagtcaataatagtttattacaatttagaagtcaagtgtagatatgtggaaaagaatgattttattccttgcatttctaacaaaatgatattgtatttataatgtacaatactacaaaattaagaaactaaattacattaaggaagtggactacttcctaaaaattctctaccttaaaatcaaggaaaatcaaacaggaaatatgcaatataccccttaaaaattaaggtaagcaaaaattagcctaccatgaaacaacccccccgcccccccccccccccaaaattgtcatggggaagagtgtataatataattaggctccacacaacttaataagtaaggttgtgattttactagttgttgattatttgataaagagagtatgatccccctttgttctgttgaaacttgcaattgcctataaatttagtaaatcttgcaaaccgtgctctatgagattgttttaagccatataatgtcttttgtggtctccatactttattagacttaggctgtataatgtcttttgtagtctctacacttcattagccttggatccatcattgagccttggatccatcattggaccttggaagtgtttccaggtagaccttttcgcctcatccatcatgcaagaagacattcttaacatcaaattgctacaaagaccagcaaagattagctattaatgacaataatacttgtatagtattcatctttgctatcagagcaaagatttatttatttattataagcaaacaatgcaaatcttataagagcgctaaaaaaagaaaagaaaaaagaaacaaagaaaaactaggagcatacaaccaaaatagccaaaacaaccacaactacttgcagctaagactatctaggaaatcaagtattggcaaaattctcaaacctagagaagcgcttgtccattccaagagggctctaataaggtttgcctttaacatttatttgtgagcttttcattattaaagatttagcagttgcgctctttccaaatgtaggggagccactcaccaaacatggtgtctcttcttattagtcccttaaacttcctcttaggaagcaagtttctcaaagttgctggaaatacccatttgagagcaaaagatttctaggagaaacatttataaccattgtcctcttacagtgaatcaagatatattcttctctctttgcaaagactacatctattaattgtcgactaccccatcttcattaacatgtcaatagttaaaatcttcccctaaactacttcccaagtgaaacaagatatcaaaggagtgttagagccccatttttcctaagttgggaactccattctagatttaacactcaaaaaattgtggtacgactttacactgaaaggtcacttcctaccttctttccaaaccaagatatcttcttctcatctttgctattagagcaaagatttcttaatggtccactttatatgcccgagtgtagcctttaactataagtctagctttgtatctctccaaggttccatttaccttatattttacagtatacacccatttacatcccattggtttattccctttaggtaattcaatagttgcccatatcttgttttttcaaagagcactcgtctcctttctcatagcttttctccaattcacattcttaagtgcctcttgaacagttgatggaatttcaagaagatctaattgggtaatgaagcctttgtgttatgaggataatctatcaaaagatataaaattagatagaaggtgttgggtgcatttttaactccttccctaagagcttttagaaaatttgggtctttaaacattggtgacaaagaagaatggctaaggttagattcagtaactatcatggatttggattcttgcttttgcactataacaagattccacaattttctccttgagtagactcgtagtggaacaacaataatgctacctttcctctcatcctcatccttatcctcaggtttagaagtgttggcccttgtatgagtacatccgataactatggaagggggcgaatggtagattggggaaactcaagtcagcctcatatctatttaatgatagagactccccctaaagatgaggattagtgaagaaggctggtttcaacaaaagtagcttccatcaaaatgaaaaatttcgtggaagtagggtaataacatttgtaccccttctttgttggtgaataaccaataaagacgcatttaagagcttgaggatcaagttcactactttgagcatcaatctagacaaaggagacatgtccaaatacattagataggattttgctaaatctatgaaaatcaggaaagaagtcaatgaatatttgtttgggctttatttcccaacacttccaaaagtaacaattgattaagtagcagttaatgcaactgcttaaataacaaggcatgtgatacctcaagaaggtgacaattttttcttttggaaactctattttgatgagtatcttgacatgatgagttgtgttttattctttctctatctaggtaagaggatatggtttgattaaagtattttttttcctttgtcatatttgatgttctttatttgaacatcaaattggatataaaccatcttaataaaaggagagcaaatagaactagcatcaaatttgttttttaaaaggcataaccaagtgacactagaacaatcataaataaaagaaacaaactaacgagcttcactgatatttggaatgcgagagggtttcaaaacattagtatgaattaatgtaaaaggctaagatgatctattgttgtttaaaggaaaagcaatatgatgatgtttggttaagtgacaaatttcataataaaaattgttaagatacaaattttaaaataataaaggaaacatagtttttaacaaagaaaaggcaaatgtcctaaatgtaaatgatgtagccaaatttgatttttttatttattattttttttaatggaaaacttgaaagataagataaaggtatgtgactattgccattgtcactccaaacatcaagttaattgggtctttcctattatgtagtatgatcaatcatcattccttctctatctatgtaagaggatagggtttgattaaagtattttttccctttgtcatatttgatattctttatttgaacatcaaattgcatattgatcatcttatgaaaaggagagcaaatagaactaacattaaatttgttttttaaaaggcataaccaagtgagactagaacaatcataaatcaaggaaacaaaccaatgagctttattgatatttagaatgcaagagggttcaaaaacattagtatgaattaatgtaaaaggataagatgatctattgttgttcaaaggaaaaggaacacgatgatgtttggttagctgacaaatttcataatgaaagttattaataaattttgaaataatgaaggaagcatagtttttaacaaaggaaaggcaaatgctctaaatataaatgatgtagccagattcaattttatttttttattttttatggaaaacttgaaaaatgagataaagttctacgagtattgccattatcactcctaatatcaagataatcgagtctttcttattctatagtatgaccaatcatcatcactatattaaggtcttggaaaacacaatgagatgagaaaaatgttacttttcattttttatttaatttttatatttttttattagaaactactttgcaaaacacaatgttacaatttggatctttgataacttaagggattgactagagatttgtagggagtataggaatatatagtacagatattaaggaaagagtcgtggtaaggactagtcctttgtcccggccacattagctaaacaacaatcaacttttttttttaataggacatgggttgtaagatgagaaatgatgagagttgtcagtcatgtgatctctagcacctcaatctaacccaatttccatggcaacaatttttggaggcactaaaagagctagttattaccttatttgactaaggagcatgatgcgttggtcttatctaaagaggtgaggaaactttgaaatcttccttttttgagtctctcaaatgtcgagcgattagaattctcaccattgggtttctcctccaaaaatgtcatatttctttagcctccttgctatttagattgttgttagttccagtttcgaccattcttacaaaggggcagagccatataaggtctaggaagagcaaatgctccccttgaacttggaaaaaaggaaatcttcattcatgatgttttgatcctttcccctttgatttacaagggaaccttagttaccacaaagctacgtagttgatttgtgcctttttttactccctcttatataaatatttgttcttcccctcaccccttctgttacttagtcacctagatacctctcctctataagaatttgttctagggattggactaatcatagccaaaacaacccttcaatgtaaagggctgcctcatgaagggttgaccttgttacttggccacttggatacctctcctctataagaatttgttctcggaattagactcctcccttcttcaactcttatgactgagaatacctcattcaagcatgttcatgattccttcccaagtacttgaatacacacttgattgtattccatgttaactctaacaaggaattcaaatattctctctttcaataaacttaagaaacaaagcaacatcctcactattcttattctaagattttggtaatagtttgtttctaatcacaatcgtttaataacattatagtactcaatatcaaataaaatgccttgctttgtagagtgaatcttggcctttacctcgtaaatttaacattttggactttcgaataggtcggtttcattaactcttactttttttttccttggtcaagaacatacacactctattgattttgggttgcattatgttccataatcaagacgtgaccattgagtcctcatccaaggtaacaaatttaatgtcatcttcactcgacattagtccaatcaagtgattgaactttccttttccctttaagaacgtttgtgcatgttgagatcatataaaatagtttcgtgtatcaagtctaaatgagggttgaagcttttgacaatcactagaaggtggttacttagtgtttaaggttagattttataagatctttgacatagtggacaacaaaacaaagagccataacagtggtaaagaaggttgttaagaagaaaataaatggtgattgagtgattcaactcttgccataagttttgtaaaatcggaacatattcatgatgggaaaaaccgggatctctccgttttccaagcccggatcaagttaataacatgcacaactatcctaagctttttctaaatcctatgcacaacggaaaaatagcatttttatactttaaaaggattcagaaagtgttaacgaaaaccatatctaagattcaaatgttcccgaatcaaatccacatggtgaatatgaagatcgaaatcgtagaagtcttgtaaacccgaagtcttttgcccgatgaattgaaccttgatcttggcatacttccggtggggaggaaaggagggttcagactatgactctctttctctctggatgatggaaaacaaaagttatggaaaccctaatccctagggggtatttatagggttcctaattgggcttaagtgacttgagcccacatgggcttgggtcatttaatctagtccaaaatgggtcataattgattaattaacccaatagagcctactaattaatcgattagtccaattcaaagaccttgtttacatatccttatacaaccttgtgtaattaccaaagcacccttatgcacaaaagtgaacctccaactaatacgaccctcataatccatgccaataaggtatatgagctttaagcggggaccactaggacccataggagtactggctccttcataattcaatatcccattatagagaatcaagtgaactccggtatcctatgtaaataacaacgagacactatgtgctcgggtccgtgacttgctatccattgtgttcagtctttctatgaactggtgtccatagtctaacaaagtgaaagctatcagcttttcaagactacctctaccatccttgagttatagatcctcttattatgtatttaattgacacatcttagctctcaaagagcttatgtcaagttccactgaagaaactactatagtcatagtttccataaacacacctccttaggatcacctaagaggacacactatctcaatcctaagatatatcatggtgcctctattgagaatatctattgctactggcttccatcaacaataacctaatccatagggaatatatgatcagcttacgctctcacccataggtcaaagccactgttaatttcaacacaagcttaatattctctcaaggttgagagacaacacaatgaagcaacttggtggagttatgactacttgatagcgccttaagtcataaattaccataggtcctatccaatgtgcaaccatacacactagtgcactcaccataggaaactcatctcaatagccaagaccagtcatccctccaattaggaggtggtgcactacactctctaatgggttgcttaggctcatgaaccgactgtgaacaagtcatctattttcaagaaacttatgacttaaatcttctgtgcaactcctaatgcacctaagtcacgtacaatgcaaaagatatgaacaagaatgctcataaagtataatacatggaataaggatagataaaagtgaaactgaaatatcattaaataaataatgaattccaaatttattatatcatgtcatgcttttaagggttctatcctaacaattcagtaatcaaacgattacctttcttggtagatggagtctttgtcttaatctcattgatttgttaaacattttggactttggaataggtctgcttgcaagactcccaaatatcctttgttgttgttaaacacatgcaagtatcactgacttttggcatcaacgaatttcataattaggacataaacatagtcttcatcccatgcaatgaacttcgaatcatctgatttcggtcccatcccaagtcggtttatccttctctttcaagaaggtttgaacaaattgagaccgcttcaaataatttttgccattgaaacataaacctggttaaatattctgcagctctcctactacaatgttgatgactccatttgttactactggattatagacttgctcattggtagattccaaaacctcagacttggacagaagtcaaagaaatcaaataaaaggttgaggaaggattgcaacaatgcaagccacaacagggaaatagaacataagtggaatactttttgcactgttttcatattaaaaaatagagcagttatgctaaaatggcagatttctccgggtttttgaaaaaaaaaaaaaaaaaaacccaaaaataactggaaaatcggcgatggagtttgaaaaaattagaaaccctaaggagcctaattttgccttgataccatgtggagaaaaattatatttctaattcatttattgaaagcatacaaccaaagaaatatatatacaacaacaaaaaagaaagaataaggaagaatcccttcaaatcaaggattatatgcacaaatatacacaccgctatatatatacagttatataacttacatagctgtatattacagctatatatcttctttagctgcatattacaactataacaatcttcaacacatagctaaagaaataaaggaatttcttgacctcttcctacctataatcaagtttacttgaaaatatttaataagagtgagttcgaaagcccattaaagggtagtgatcaagtaagtttatttttcaaaaatgaaatagggaatgtttgtttgtaacacgagtacaaacatacaacacaagtaagtttatttttcaaaaatgaaatagggaatgtttgtttgtaacacgagtacaaacatacaaaataaacttgtattacatttgctattatcaaaatagtctcaaactaaatatttcaataaacttgcatatattaaaaaaaattaattgttaacagaagtattattcatcatagtgggatttacaaaagtggcttagtattccttatatgttagtgggcgaaactaaaaccaatctaatagtataccattccctacaaactaggtttttagatcatcattacccacaccaaaggtaacaaaaatcaacattcccttgttgactgaaaacagataaccagaatgcccatgtaagtcaaaatacagtcaaataaaaaagtgattcccaatttcaaaattttaaacttatttaaatatttttcagaatttacaaaaaatataattgataatttatgacaaaaaaatatatattcacataattctcttatataagttggataatcccaaagaaacaaagttgcagaattttcctattaatcatttgtttaataatcattatactctttagtatatatttatttattatttaaccctatgtcaaaattagatgaattaattcatctagggaaatattcaatttccattacttaggttgacttgactttattttcttagagaatcgtccaaatttcttccctaaggaattttagcctacttttttttctagcatccaaccatctaaaatttatttaactttttattatgattaattcttcaatacaacgaaggtgcaatcttataaaagaaaacttattatgtacagatattgcataggatgcccataccaaattcccctatgtttaataccacaccaaaaacacctttgcaacctacaatcctttaaaacaatacctactacttccaaacatcctattattttccaatctcaatacacgctacaaaaattctcataaccacatttagcatataaccacattgcactcttcgcaatgttcaccacaatagtcctatagtctccacatgtagtgccctatggattcacccataagaagacatcaatgggcatgagatttgatcttaccatttcaaccccttttttaactctttaaaaagtaaaatgcatagacccacaggatatttccaccatatccaaactttcatcctagggttaatatctttttctcaaatcttcattaaaataattctagatttaagatttatggattctagattcgcctaaatactgatttatttatttacatacttctctattaattatttctctctcttttaaaaactaaaacaacaattgcattctaaggagatgggacctatgtacttttgtgtgctatttgtgctaattaatacattctattatatataaaaaaaattattactattattaattaattaattttttttttctagcatctagcctaaaattaaagcccatggaatttacttattgagtttgacacaaatctagaaatttccttttttaaggggctagactattaagcataaaccaaacttttataaaatatgtattgtaatataatttataatgtaaaatgaaattcacgataaaacaaatatagtatttataagaattggtggaaataattatctttgtttcctctctaatcaaatacgacataaatatgaaaaaaaaaacaaaagaaaaagaagaaagaagaagaaaacacaggtatgtacacacttaaaagatgaaatatctttttcatcaaacttgtgttgggctttagggaataaaaattatttataataatataatttaaagttataattttttattttgaatttccctttatttaaaagttcaattggccccacctagacaacttgtaagttgagttagttgatatctttaataaagctctttctaaaaccaccttggaaagtacttcgttcaatttaggcttgattgatatatctatatactagctcaagagggagtattgaagatatagatagcttgtgtatctttgttatcctaatataaggttatggtttttcttcttaataatcctataaataaagttatttgatagatggtgaagttatgcttaatttcaactctcaaattttcttataaatacgaggaatcaccagatgagtaagatatgttgattagtattttcatagccataattaactacacatacaaaggataacttcaattttttcttatccactctcttttttaatttagggtaaaactggcggtccaatctttgctggagcttg

SEQ ID NO: 12721 - DNA, 5102 bp, Vitis vinifera
  Intron number 2 from transcript GSVIVT01005755001 (locus G SVIVG01005755001) derived from phytozome v7.0 (chr-ID chrU n; pos 21851896 to 21856997 reverse strand)
aacttatcaccatcaccaaccaggtctagaataaggtacttgtttaccagtgcttcattacttctcttactgtttccttttgtgccctactcatctcaacatgtttgaggtctgaaattcttggtgtttagacatcctcgatcctgttataattgattgcatatcgtgtgttttacagagcattggaaagaactggttgataatctaaagtggagatatcatgatataaaccaataaaatagcaaggagatcatttattaaagttcatttgaactaaatgggctcacttaatttttgtgagaattaagaaacatcatggactcattttaaatcctacttacactcggtgggcttggttatttttaaattatttaaataacaactggtgctttcttttttttttaattcgttttttggcctcaatggatagttgcgggacaatgatttgagaccatgcagtgaattagggcatatgttggttagatgagattgcattgatctttttgcatcttgtttctgttttttgcatctttcttttctgcattgcccttttagtgatttaaaaattctagtcaaatttccagcattgaagttctcaaatgctttcttaactgagtgacttggctagctaatgtataaataagaagaaaagtcatgtttttgttttttgctctgcaattgggtcttgatctaggagaccccattatgcaagcgtgataaactgataatagaatcaggagtctagagtttgaaacatgtgtaggattctgctgtcaacatatttgaatggttgtacctactttggatttattaaaaattttgttctccatattccataaataagtagtagttcttgtatgaaattaaacatgctgtgtggcaacatctggaacacttaaaggatggatgagaacgaagtcaaaacccttgcattgttctattattattattttttccttttatatgtcctaaaagatttgtgcttcaaggcctcggtttgtggaaagttttgaggaaggcattgagatgcagattttgttgcttaaggtcgatagaccttacaacacataatctttttccgtcagtgggtgtttatctgaatgagattctttagtataattcttcctcataagcatgtcttctagaatttatgttactgtgaaattgtacttgtggtattttgctacttgcttgctgctgctaagtttatttattctacgagagaggaaatgtgtgtgatgctcgtctaccattacacattgctgtttttttccttgatgcaaagtatcatgcatctgaggctactgaagcacaaaatttaggcagtcctatgatagattgccaagcctaaattcacatatgtgggaataagagaagaacagtttgcctatgtgttttgctgcattgccatgctgaaaatattggagaggacattcattctacaactatgatgctcttttggagattgatccttggaatgagagcatgacagatgaagcgatatgtgtcccagacaacaatggtcgtttattccagaatccagcatgtgcctgatgcgcactgatctctggatggaaacaaccaatgtggtctaggatttcttttttccaaaagcattctatatttacaaaactgcttctcatatgcatagatggcattgcttatctatcagacatgttattcttcttcttcttcttcttcttatattggtttccttaacatgtcatgttcacttttgagaacttctgaattttatggcttctttctttataatcatacttgttgaatattttgattatacacaatgcaaaagccaaatatttaaaaaactttgaaggcttatgttgagccaaggctcaagaaaaatccccaagcaacaacctagagctctaaggtctgaggctttctttagatgtttacctcatgactttaatatacattttactttagaatatgcacctcatatacaacacaagaaatagagatgaattagcagttgaatatgaatgcctttgtggctttgaaatttgaagtccttgaaactgcacaccagtaatataatttccaaacttggattggttgatggtcgatgtgaagaaatataatctaccaaaaattagtttgacacttggaatttatggatatctaatatggtcttttaattaatttttatctactctttgcttttttttttttcccctgtatttttatcattttttttctataccccttacttttattattattttttaaatgataaattatgataaagccttggttctttctttaagatatgtttaggagtcaaattaaaatagcttttccattccataagagaacttttggcacactgagtccaagtatttttgtaagcacctataaattttttattagctaattgcatatttgcaagattgccaaactgttctgaaatttaaatagatctcaaatcccattctagtaaatctggtttctatggagatggtttgttggcttcttcctgatattcttttaaccaattctcaagttctttgtcctggtgcgagataaatcccaaatcccagtgcctccgtccctcgctccctcctctctctctctctatatatatatatatatatatttgagctgaagtataaacaatctcaccaactaaggctgcggaaactctcacctttcttatatcattctgcatgggcattggccattcattctccattatttttcagggtaaggatgggaatttttgaatcctataacacgagcacttcaaactcatctctctctctctctctctctctctctctctctcaagcatttgaaacgtgtatggttgtaaaactcattcatttcctccatcttcttgacaaaaactattaactaagtgtccatttagatacacatcctattttttgttgttaaaattagaaaatagttgtaacttttatgtaagatacaaaaactcttagagacttacattgaaaaatggtggttttaaaaactacttaaaaaaattgaggtatcaaaaatttttttattcttaaaactttaaaatttatgaaagtgatttacaaagacataaggtaaatgtacactttttgtacaagatgttctactttctatggaaattttttattttaaaaatagaaaacatgaagtgtatgacacttttttttatttgtatactccgtgtgtactttgttgtgccttttggcaagtgtgtttaatatatcttgcttatttacttatcagaaaaaaaaataaaaaatctgtgtgctactgttcatgatctaaatatgaaaattattgaattttatctacttccaaatagaaactctcactaccctctttagtgggcattgttaactcaacagagccttgaatgacagctacatggagttagagaaaagaatcattcagctttcttaagcaatattctctttagatgtcctatcataggataaaaaagattcaaaattcatgtccatgaggtgtgacgaggggttctatattttctgtggtcctagtattcatgggaagagtaaagagatgaagctcaccataaataggtaatgcgataatcataacttaattttgaggtttcaaatttgatactaaattttacctaaaccaaaattattaaccacaaagagaatgttcacataagatgtcaatatcctcatcccattgctgtattttgatttattacttgctcaaaattcatgtttggactgcataatgttggacttgttggatgagtgattgataagctctaatggcatcattctccagatacttggacatgtttaaaaaatgatccataaattaacagaataaaatctaattctgtgctccgtgatcttgaggctttatttttgtcatacatatagcttgaatgcttgcatatagcactgtaatgccataggttttagtacctcttatttcattttctttgcagttatccatgaaaaaagggaggatttttttagtagatttgagtttagttttcaatcaatggagttgaaactaatgcctttgcacttagtgtgccattactttttagggcactggtagtagaatgatgcctgtattcttgatatgatagaatggtactataggtgaatccaagtattgtttgggtacccaatgataacttggataatttttgcttgctactactaatggtggcccacatggactgtaattttgtttcatgttgatgtatcttatttttgtgtaatgccacagctgattctcctcttgaaaggtgatatactacattcttctttttcagaatacccaaagacgcctttgataatttcattgaaatcaatgatggttcacatggactataattttttttcatgttgatgtgcctaatttctgcgttatgctagaattgatcctctttttgaaatgagatttgatgattcatctttttcggagtcatccaagcattactgcaacgtattcacttatatgcatttctttgaaaaactgtggataatgaagtatctttacatatgaccattttctattgccaaagatattcttaattttcatggattgctagaaccattcacaaaataggtggttctacccagtcaagttactgttagaccaaacctctaagtttattgaaaggtcttctgcatctcaccaaaaaaagcatttaggatttttaagattaggtaagcatgaatttcctatttatgatcctgattagtacttaaaatggtaaagactctcttgctgtgaatattacaccaagtcaatagtaaagatggaagaatgaacagctatcattatgttatctgttgaagaaaggccagaaaattctttagtggatgaatcttggtgttttttaagattttggtgcttttctctttggttttggttgatacatggtgtttaattatatggatcctttttatctcgttagaagcagaataatttatgcccacagcccagtacttatcgagtctgacactgttcaaggttgagcatttctctcttgaattatgtatagtcaactcaccaaatcagtatgatggatgttttcatttctagacaagtttcgaggtctccacatagcaagcattctc

SEQ ID NO: 12722 - DNA, 4145 bp, Vitis vinifera
  Intron number 1 from transcript GSVIVT01008370001 (locus G SVIVG01008370001) derived from phytozome v7.0 (chr-ID chr1 7; pos 2763422 to 2767566 reverse strand)
gtaccaaaaaaacttgttagagtcaacaaaattgagttttttacatcaataaaacatgcatgcgtgatcatatagattccttcttatcataaaaggtctcacatgcaaaacatttttattaaaatcactctttttatgtcacaattcaactacttatattgcaatattagagttctcattttatggtcagctatagtataagactaaattgaaatattggaggaaattgaacaacaaaatgtaagttacaagtattatcaaatagtaatgcatatctgaactttgttcttttatgctattattactttgatgtataagtttcttcattcctctcccttgttgaaaaggatttttctttgggtaaactatgtaaaggttcattacttataaaatatagaatatttaagaacttttaaaaagtaatccaatgaacatgtatacaaatagtaactccttttattcctttatccttctttaaaaaaaaaaccccttgaaataacaagttaaaagatgtcaattacttttaaggttgacatgtaactaatcaaattgccacattatttttcttttttcttcattttatctagaaaataatcaatattttttaaattttcgtttttttcactcttacaccttttcatagttatcaatttaattatttagaaacactttaaatatataacaatcataatcataataataataacaatgatagtatatgataaataatgaatgagaaaaaattaatgtactaagaggtttagaatataagattttatatatcatattaaataaaatatttatttatttgatatatcttattatagattaaataaaaatacttttatcatattattttattgtttctatttttaaaaaattttaaattttcatgtgaaattgaaaatcaattatcatgttttttaactttttgcttacaattcttacttgaatgtagttttaacttttttttgtagttaaaatgtttaatatttttatttaaaaaaaaataaaaaacttggttgtggttcaaacattttgctttattaaaattctaaaattttaataaaaataaaatatatttttcataaaaattatatttcatcatttatgtttaatttcttttaaatttatttaaaaaaaaatttaaaaaattatgatgaagttgcgcattaataaacataactttcaaaaaagaaaataccactcttttataataataataaaagaaaaaaaagtaattctacaatatattaaaagtaccgtgtgttaaaagtaacatattttactgttactttttattttaattaaaaaaatggtgtttttttcataaaagagtaatacatttttcataaaagaatgatacttttttatggttatgttgatcaatgcgtagtatcactatacaaaaataaaataaaattaaaaaaaattaatataaccaattaaatacatttttttatgaaaaatataaattaaaaattaaaaaaaattaataaaacaaaatgttagaatcacaaccaaattttcatattatttgattaaaaatattaaacattagaaaaatttatgttctaaatctttaaatttgtttatcatgtatttatttgtatattaaatttattatcattaattatttattatatattattattttatgtttaaaatgtccataaataattaaaattaataaatataaaaagatgaaatattaaaaaaaaattgaaattgaaaagaattcatcaagctaacatattttaaaaaacaaaagcaaaatgaagatagagatattatagaggaggagaaaaaaaaatcataacgtatggtaattgtcatgtgtcaaaaagttatgttttaaaaaaaaaaataatagtaatgataactcatttgtcttgtcaaaatattttttttttaaaatgacaaacaaagaaagtgatagttggtgggggtaagagaagaggagtttgagggtaagtttacaatgatgattaatttgattgtttaagagtattaaggattatttttcccaaaatacatattctttgaaaatgaaaagtcaaagttctaaaaaaaattaatttttttgttttaaatgatgcatgattacattattctcatttttcttttatgctattattactttgatgtaaaagttttttcattatctcccttgataaaaaggaaaaggcaagttaattaatgaaaatagtacgaggattaagaaaatgttatcataaagtatctaccatgtaatattgcaaaaatatctatcttgattggatcctaaaattttgttttctttcatatattttgaacataattcttattttggttgattggattctaaaattttgtttttttttttttcatatttcaaatattgttcttatttttttttttttgagattgtgtttgctatataagagtaagaatgagaccggtactcaatgtgtattgtatgagtaagaaataaataaataaaattaaaaaaataaaattattttccatattttcacatacccaaccattatttttatttttgtttttagattctcatataggaatgagaatgacaatagaagtaaattagaatgtaggatcaataaaaatcctaacagaaatagtttttttatttttattaaaatgaattttaatttctatttttatttttatttttaggggtgaaaagggattttttttttttaagcatccaactctatcttatgagaaggatttagataaaaataaatggtttaagataaatttaaatttaaaatttaaaaaaaaaaaaaaaaaaaaggcaagcaagcaagtttgtgacacttgggatattgctttgtcacaatttttaatataattaaattttttaaaaacaaaaaattaaacgagtaggagtttaaaaaattaaattatttaattaattaaacaagacccatccccttctcttcaagtaatgcaaacacaataataaatgagaatttctatgaattctctcttcttattccttatttccatgtgcgaaaaatgtcttcatagtttttaatccaatttaagcatttaaccttgatgagaaggtttgagtaagctcccaaaatgatctcttcatatggcaaccctatctttcacgttatttttaatacgcaaattttaataaactgataaggattaacaagaaaaaaaaaaatgccaagcactccgcaaatctcatatttttattataagaagctcataattgggaagctcagtttactcttggtaatacatgatacgttggatggttgcaggttagaggttttctctttccttcttaatacttcatttggtaatacatgattccgtgaaggaatagagttgtaattccttcggctgttatggtcttagcccccatttattaatacttcatttggttgtcaagaagacaacaaaagggaagtgaaaagaatgccagagttttacaactgccttacattcctaacaagtcagaaattctgaatttgccttttattttatcgtttcttttcctactattgaaatgtgtattgttgaacaatatggagtggtggtcattagagatgatgctcctcctatctggtctccttcctaatccgaatttggagactgcagtgctttcaatcacgtgagctctgaatcagtatgtcattcatcttcctttccaagattttcttgatttccatggacttttaataatttctctaatacaaatccattgtctagcctccatacagctggaacagtttggatgatcccctgtggactcggtgaagccaggagatactcagtcgttctaaactgaacatttaacattattggaagctcatctctaacagctaggacttccatcccatgtggattagatgttcaaatgtaaattcaaaacaagccttcaacattgaatatgtacttttaaaccgattctttctctctgtatagcactcatgtttcaaatgaactcgaggcagggcatctacaagctgcatgtttagcagtactcgtcatactgctcctggcattaatttcttcgatattaaaagaaatacatatcatatttttccctatcataagtattgtctgcagcagctaatttatttgttcatcatgcattaacatttaggcactggtagagg

SEQ ID NO: 12723 - DNA, 8307 bp, Vitis vinifera
  Intron number 7 from transcript GSVIVT01031879001 (locus G SVIVG01031879001) derived from phytozome v7.0 (chr-ID chr3 ; pos 5077258 to 5085564)
tagtgggttgtttggtaatggaaatgtcttttatttatttgtttgacttttttgtgtttttaaacttttctaacatttctaataaaaaagttttcattcctgtcaagtcagatataacattgtttcagactttagctttgtttatatttcaaatacactttctactccaaccttttcaaatccaaccctctttggctaatctgtttgacactggtagtctgccttctgtatgtcctggaagttctgattgagaatcccactgcttgtcattaggataggagattggaaaggcttgttcaaaaattaatttattgatacttcgatttctatcatgactattttgattggtctatttccattatcatatttttgtttctaaagttgcaatggagctcattggaattcatagttgatgtgaggtagggctgagatcatggctcagtgatggttccatgcttcactgcatcatatggtgttcttgttctttgtgctatttttttttttttttgataagtaaacaagatatgcattaaaaaagaggctaagagccacaaagcttacagggagtatacaaggcggctaaggcctcaaaaaagatcaacaagaccagaaaataatcacctccccttaagtggatgctatccactccaaaaagtctataagggagagagactcctcgccaaaatacaatttggcccagctccataaattacaaacaaaaaaattctttaatttctggatattcgaccccccccaaaagctagtctattcctctcatggacacaatggtatgaattttcaaacctttttcctttttttccccacaaaggggcccctccaggtagttaagacctcctttacagtttttggaaagacccatttaacatctactaacccaagaataatgtcccataaagttctaaccactatatagtgtataagaatatgatttacattttcttcttcacaaccacataaaaagcaacaattaggaagttgcacccctcttatttggagcctgtcatccaactcccaatcattaaagtctctccaaaagtttaggttccagcctctttgaccagaattttgatcccacatctcctcaatcgttgcatccctatgcacagccatgacaaagaggtgagtgaagcaatgggacagcggagtatcagtgcaccaaatatctttccaaaatatgattttggtgcccttcccagctagaaacagcatgttatcccagcaccaatcagattctttcaagatctccttccaaacccttactccaaccaccccattagccttctttgacctccaaccacgatcctcttgcccatacttcgttgtgatcacttgtttccaaatattatctttttcgcaagtatacctccaaatccacttaccaagcaagactctattcaacatgactattttccttaggcttagttcacctttgttcttgtttgtacaaaccacatcccatttaactagatgaattttcccctccaagtttcctcccccccatagaaaatccctttgaactttctctatccttttagcaacaatcttaggcattcggaaaatagacatttggtagattggcatgcttgccaaagtgctttttatgagagtgatcttccctcctttggaaatgtactgccttttccaaagcgcaagtctcctccttactctctcttccaccccatcccacatagaaggagtcctattaggagcccctagtgggagtcccaaatattgagagggcaaggatcccactctgcaacctaactcgactgccaactcttcaatctcctccacatctccaactgggatgatttcacttttggctaaattaatccttaggcttgaagccacttcaaaccagagtagaattcaacttgaatgagttaagtgctccttgcttgcctcacagaacactattgtgtcatcaacaaaaaataaatgggatatgttcaaagtgggtctactaccaccccgaatggtacaccctgataagtatcccccctgcacagctctcctaatgaggacatccagaacttccattcccataacaaagagatagggagataggggatctccttgtctaagccccttagtactagggaaaaaaccaattggcaccccattaaccagaactgagaatttggttgaggacaagcaactccacatccaccctaaccacttagacccaaagcccattttttgcaggaccttcaacaaaaacttccaattgatgctatcataagctttttttatgtctaatttgcagataagtcccttcccttttcttttctgccacgaatctatcacctcattagcaattaatgacacatcaagaatttgtcttcccgttataaaggcattctgggcagtggagaccacctttccaatcactttcttgagcctgttagctagaaatttagccaaaagtttatagagcccccccaaaaggatgataagtctaaaatctccaatatcctcagccccacttttcttaggaatcaagaccagaaaagtattattgaggctcttaaggaaagagctatgctcatggaactctttaaacatatccataatctcctctttagtaaaatcccaagcgttttgccaaaatgctacagtaaagccatccggactaggggctttgtccctattcatttccatcaaagtcgtatgaatctcagcctctgtgaaggggacctctagattctccgcttcttgctggttgatgtgatcaaattgaagtcttccaatatccgccttcctccccatatcttcagaaagcagctgctgaaaagtgttaacaattccttccctcacctcctgctcctctgaaagccacttcccattaatctttactctgtccaatgcgttgtttctacgatgggcacttgccattcgatggaagaaacccgtgtttttgtccccctcccttagccaaatctcccttgagagttgtctccaatggacttcctctaaaagcacccactttttataactttcttttgtttctttttttaaatctgtctcctccacaatcaggcttctctcactttccacccggtcttagaaatctacttgctgatttattgcattccagcctcccaaaaacctctctattccatactttcaacttctttttgatttccttcatcttagcagccaatctaaaactagcactacccctgacttcgatcccccaccaccagtttcgaacaaggtctttgaatccctcaaccttaagccacatgttttcgaatctaaatggagtagggcctcttcttattccaccccctgctagaacaattgggaaatgatcagaaattggccgagacattctgctttgagtaaccccactaaactggtctaaccaactaggggacacaagaaatctatccaatctagcccatgcctggttattgagacccccattccaggtgaactctcctccatgtagtggaagatccactagccctagatcatcaacaatctcagcaaatttcctcattgctgaatttattttcctctgactgctcctttccctttggaagaaggtgatgttaaaatcccctcctaggcactaggggtcttcccaaaggcctctaatcgccccaaattcttcccacatgccatccctttccactttggtaaacagaccataaactctcgtgaacacccaaacaaccccattttctacaatcttgaatctgcaagacagagtgaattggccctcctcccaatccaggatatccagagacctcttgtcccagcaaatcaaaataccgcccgcagccccctccgcattcagagctctccaatctaaaaatctcccagagcctaaacttctcacaatgccttccgacatagattgaatttttatctcctgtatacatagtaaatccaccatctgattccttctaaaagacttaataattttccttttggagctatcgtttgctcctctcacattccaaatcagaacttttagcttcattggacaactacaatctgattccctttgccctgtgatgggcctttctgcttattctccccctcatagtttacagaacattccaacctctttaattccctttcgaactttgacttctccagaaggtctttgttatgaatcttctcccgtctctttctgattttaatcagaaagctcaagatttccttttccaaaccctctgctgaaaatcccaaaaattggctgaattttgccaaactactttcctcccatttttcctctttctcctttcccatagcttggttctcaggcgtgctagaatccctcttcgtacccctgactttatcactgattctattggcttctcccaagtcccaacaaacattatcattctcagcaggcccctcatacactgctaaccatgttgttttatcaccccatgattcctcctctatatctcctgaacgatcgaaagactccccctctgaagcccaatcagaataaagagaaataagatgagacgtccccaatatccgttttccccttgaatagaaagtcgaatcatacctcaaagcttcctcttcaagcgcccggtctgtcattgagaagcaagcgttcatttgctgcttcctgagatcctctgaatcccaggccacaaaaggctccatctttgaactggacccatttctagaaatgaggcagtccagaaggcagactttctcctgagagcccttacttggggcttgggggattgggccagccctttccataccttcaaaaccactcagcctttggcagcccatttctgtagcccatctccttgacgatgggcctatttttgatccatcatcatccgttgccgcttcttttgattttgagcccaagtatccattagccacaacaggcccattagccctcctcgcctctttaaggcccacgattaggcctaatgaggacgaccaagacgctagcccatctatgagggcccaatcccgggtcaccgggccttgaacccggtttcccaactcccggcccgacccattctcccgggcacccctcacatcagctggtaggttcaatgtctcgagccttgcgcttaccagctccttctccacgcgctgctccgtgcgtgaaatcacatcacccctaacctcatcactctttcgaccagacgcttcattgtgtttcatcctcaccaccggtctgacctcccaccataacgacaagacatagacatcctcctctacttcaatttccagcacactcggcctaaagtctcctctcgttttaaccaaaagcctagaccattgaatctcccccatcgtctttgtccgatcatcaactgctacaaagcccccgcattcttcccctactcttttcaaaatcatcggactccacagcgagattggaagcccaatgattttgacccagacttcgctttctacctcctcttctgtccagcagcccgtcctaggattccattgttccagccctaactggagccctcccaactctctactccctgaggatatgacgcgtcttgcttctttcagctcttcaaattctagcaagaccctatccttctccaatttagccagccctaattttccttttaggcgctaagaatttgcccataaacttcccaatctctctaggtcctcttctctctccgttctggatttccaactcgcaacaatgcagtgctccaatttctgcaaatttcctagagtttcctcgcttctaaccttcactttgattgagtttgaatctctccagcttggtctcttaactaccgtcacatacgaactctccaaggcagattttcccacggcccttacttcctgcatgtttgcttttctgtcaatagatccttccatttgatggattttctccgccatagtcacccaaccccttttgtcttctctgcctctcggtataaagatacagaatctcttcctttccaaatcaacaacccccagccttagaaaccatcccactctgttaaaccctcgtgttagggaatacgatttccccttatccttccattcctttccccatctcccttctttctcgcccttgatgcagtggattaggccctccatgaaaaaccttagactttccaatcctaatcggacccatgacgaaacccctctcttcttctccaagataagaaactgaggttttccttttctttcatcgaagacgatctcgaacatcttggagtccaccataaaactgctctctttccttctttttcgaatcgccgcgctaatctctccttcttctccatcgcacgctctctcactctctcccatagctctcttctttgtgctattttaaagttttattttattttattgtaagacaaaaaccattttttaagggcattgtaagtgtgtctctttccgggacaataattcattacatgcattctccttgatgttttgtgattcttgtattacaccaaggaagatgagaatgaccagatgtattgaaggtaactattagattgccgcatgttagtaatgggtcgtaagcttggtgtatgggtggcttctcatatgatatgcttgacttacaatgctaatgcatgaataatgattaagaaagccagtgttggttacattaggtgtcaggcctggatccaaatccatgttgctctaaataacttgttgaaatatcttttattggacatggtttttggaacctcatagttgtatatatttacttagtttggaggttctgactttctttttgtgatcttttggaggatttcacatccttctattgtaattatttttactatactgttgtttctcataaataaaaaataaaaattaacggaaaacaaattggatagagtgttattatggactgttgcttgggcaccctagcttggtgactgaaatattcttctaggttgtgctgtaaccttcttgacaggtttaatttgaggataattctaagttcatatgatatagaggcatccttggacagttgaccatgcttttcctgaaatcgatgttggagcaggaatatatattgttttgttgtgacagtcaaaatgtctttcacttggcctagaattggtggtccatgctagagcttggcctttattttgtttccttagtttttttctttcttttaaggtatttgctttgtatacttttctgcacagggttcaggccccttattttggcattttagggtacttattgttaggctagtagacattatgggcccaaatcctaatatcttaagaaggctttcattaacaaaagaattttcaatgaagaagagcttttagaggttaggttgaaggaggttttcattaaatccccttaggagtgctcccaagcttctttgcaaatggagggtttttctttggtggagttcttagattctctgttctgtggttaggttgacttgttaggtctcttgttgtattggttttggcactttttcatagggtgcttggtgtatgctgcctgtgtacatagggtgtgccccctcttttcatgcttttaatagatgttgttttgtctatcaggaaaaaaaaattaaaaaaaatcctaatatcttgatctttaagggaagttggtagcttaacatgatattaaagcttggggtcttgagttcaagtctctcctactgctactggcccatttatttatacattgctgctgatttgtctttccacatgcagatgtggggccacacctgagaatgggtgttgacctggtgtatattggcagcccaaatcctaagagcttaaggttttaggaaatttggtagcttagaacctaacatttcttattaaataaggtacagattgctgtagctttcctatgggtttgccttgagttctcagccctggggttagttcccttaccagaggactgtgatttattcctattagagagtggggttgggctggatgcagccataacatgaaaaggagaggtgagagttagtgaagagagaaagattgagaaaaaggatgttaaagagctttgggaaagcagcagtagaccccttgctgaattcatttctttcatctgttggaatagtctccggaaatctcccctgatgtagaccatgatgttgaatcaagtagaaccattctctctttcttgtgcccacttttattttatgttctttattgcttcttaatgcatgatttaaattttgatctacttggccatgttttttattgtaaccttttgtgaggtacaaccaaaaaatttcttcagagcatatgaaggtaatgggaaaattttgttttgtgcagagtaagctttacccaagactaattcagg

SEQ ID NO: 12724 - DNA, 1981 bp, Vitis vinifera
  Intron number 1 from transcript GSVIVT01003140001 (locus G SVIVG01003140001) derived from phytozome v7.0 (chr-ID chrU n; pos 7578353 to 7580333)
gagatctcggaggtctcacgtcagccaaggccgaggtattggtgaatcaaatcatactctttttaactgtaataatgaataattttaacactaatccatcagttcgtttgcttagaaagtgcgaggaaaataaagataaattaagaggttgggttctgaaattctctcatattcatctgtattatcaattggatgaaacagaattctcttgctgttaatttatcaatttgattgtcacgaactcataattgagaagcttctttaatagagttttaattttgagagaatgattaattttgttagcagtgaagtgctattaggtcaattgacaattaaactttttcacatcaatatttcactcaaataataaatttaaaaggaagtaataataataaatctaaaatgagtatttttttttataattgaaaacaagttaacaaaaataaaaaataattaattgattgaaatggataaaaaaattcaaaatttataaaattaatattttccatttttgaacttaaagaataattaattttttagataaataccatttaatattttaattatttacatatgtgtcttaaaataaataattatttaaaaatatatatttgtgtctacaattagtatttttttaaagtgaaaaaaaaaaaatgacaggaaacattttgttatttacatgttatatagcagaagggcttggtggttgtagttaattttaattgaagtgagttcatgcattttttttgttggaaacaacaaaacttcattgaataatgatcaaaaagtacaagaatgactagtttgtccttcaagaaagatggatgccaaaacactgagacagctataggatgatctcaaagccaaagtgcagagctgagggaatttaaacttccccacaaagacctctaagagagaaaaaaaaccttgtttagcaagtctagccttgtagatccacctaaaagaacagcccaactctgataaaagatctaaaattttgcataaccagctatgccattcttttaggaacgtcactgttttttaatgataaatctggacaataaataatgccaaatcaccttcaacaaaatctttgttcaagcccagagaaaaagctaatgcaagacctccaagcaatgggaataactttgcctctatagccgacctccatcctaaaaggcttgggaaaagctttaaccatctttcttcacgcaagtgtttgcacatttattttaagtgtatttatacttctttactatcattcattaagagaattatcatgaattttattgaacaagagattttccatggttccacccctcctctctatatgagccaatttcacatggaacagatcaagataaaatgggatcttaaaaaggaaattatggatgaaggtggtacttacaaaatcatctcccattttggttggttacatcttcttaactcagtacacaaccacctctctcaatgttgcttgcacatcacatatgccacctgccatatgatcattacttttgtagttcctggtacttcagattttgaatttgatggcatcttttgaatatctcatgggaattcaattgtctccttgtgctgtgtgtataattttttggatttgtcataatgaatgggaaaattaccaggatggtagctggcaaaacacaatatggtaaatgaacccttgtctacagagatgcgttgatgcatcatatatccatcttcaacttaatgagtctgtatggaaattggatttgattattatgctcataattgttgttttgatgtttctattggtcttgctgctactttgatcactattaactcatgtatgatgtaggaggccttgtacatgaaaatgaagttcgtttcaagtgattctttgtagaatttgatcagaatgatacatctagatgggacaattttttcttgagggtcttggagtcatggaacttgtattaatcagtacttatttttcagg

SEQ ID NO: 12725 - DNA, 4434 bp, Vitis vinifera
  Intron number 8 from transcript GSVIVT01034015001 (locus G SVIVG01034015001) derived from phytozome v7.0 (chr-ID chr8 ; pos 15852379 to 15856812)
gagtctcagcggctcctgggcatgtatgtaattccttggaagtataatttttagtcccttgtttctgatgtgtggaatatatattcttttggtttggctgcttggaaagttttcatttgtttgttgtggtgtagagatgcaaagggaagtaattgtttcatataagacactgaattttggtgcaaaacgatttgaatttgaaagtagctaatgccattcgcagttatcttctaagtcatctgctgtgtccaccagtttgtgcacaaatctatgagtaatgcttttgtcgcctggtttcgttagctataatctcttattacataagccttatctttttctgattccaaccctgctatctgattggtagttacagttgggtggttttttaacctctgcaagaagtcacttgtttaattcttctgcactgaaaatcagatttggcatctgatatatccatgaaactcatactctaagaaattcctgtgagctctttgacaataattcgttctagttcttcctttgtttcctttccaaagccctttgatattcagatttagccattttattctaatggaaattaggccactgaagatccccttccagctcttcgatagttttttttcttttattaaaagcagatgatttatcccattgttttccactatggcagaatgagggcaataagttatcctttcttaaaacaaaatctgacaagactttggtcagatatttttgaaagattgctttccttctttgttcaagttagccactcatagtcataacagcacttgagtggatgactgttgggaggtagaagggcccagagggtgctggatacctggttttctgagaggcttctttaattgggagttaagaggggttggaatcttgcctggaattattactagtagagacatcagaagtgatgtgagagacaagctattgtaagaaagagccttcaaagaagggggtgttctctgtgaaatgccactataaggtgctggttacagatgagataatctcttttcctgccaaagagaaatggagaaccaaagttccttccaggacaggtctcttttatttgcaaggcaacacatgaaaaaattctaataggggatgaacaagtaaagcatggttgggtcattgttaacaggtgtatggaggaatctgccaaccataatctggtaccttgcaagtggactaccagcttagggagtttaatttttgcattgtttgttttcttttgggttgtcccctgttcggtgaaagatttgctgtttcaatggcacagtggtttctttggcaagaagatgcaaagaaattttgagagcaacttccatttgatcatgttggataatttggaaggaaatgaacagaacttttaagggcgtggggcaataattgctggtggctaaaagagcttcactttgagagcttattgttttgggcttgtgtcatggagtaaactaacatgtctttgcatgattttagatagcctaggcctgtgttagcctgtgtcctcactctgcatcctgtttttttttttgggttttgatggtccttgtgtattctttgtataccccacataaaaaaaaaagggtttttgttgacagtgatgcaaaaaatgggttttggggagaaatgggctggttggattaggtggtgcatctccactgcttctttttcagttatgattaacggatcgcctttgagttttttccagaactctagggggggggggggggggttaaggcaagggggtcccttatccccttacttatttgttttagggatggaggccttaagttgcctcattaacagagcaattagggagggtttccttaccggttgcaggataaggggaaggggtggcagtgggatccaagtgtctcatctgccgtttgctgatgacacgttggtcttttgtgaggattcccgagagcaaatggcttttctaagctggttgttaatgtggtttgaagccatctttggtctgagcatcaatttgaataagagtgaaattctgccggtaggaagagtagagaacgttgaggttttggcttctgaactgggctgcaaagtgggatctcttccttccacttatttggggctccctttgggtgctcctcataagtcggtggcagtgtgggatggcgtggaagagaggatgcggtagagacttgccttgtggaagaggtagttcatctccaagggagggagaatcactctcattcggatcactttggttagcatgcctatccatctgatgtccttgttgtgtatgccaagagttgttagattgaggcctgagaaaatccaaagggatttcctttggggtgtgggagcgttggagaagaggccccatcttgtaaagtggactgttgtttgttctcataaaaagaagggcggtttggggattagaaatctttctattctcaatagggcccttttgtgcaaatggagtttgcgctttgcggttgaaagggagtccttttggaagcttattattagtaggaagtttggggaagaaagtggagggtggaattcccgtgaggttagggagggctatggggtggggttttggaaggaaattagaaaggaaggttctctattgcttaaaaatgtttccttcgctatgggggatggtaggagggtgagattttggaaggacatttggtgcgggaatattcccctttgtgaggcttttccatctttgtttgccttagcggtctctcaagatgcgtgggtagtggattgttgggattctgtgggggatgtggggggttggattccctttttctatagatcttttaatgattgggaggtggaggcggtggagaggctcctttcgtcccttcaaggaaagaggctagttgctggtttggaggatagagtgttgtggaaagcatcgaagaatgggattttttctgtaaaatccctttacaatactcttgaatctagttgtgcagtcccgtttccgtggagcatcatttggagcccttgtgtgcttacaaaggtgggttttttttgcttgggaagcttcttgggggaaggttctaacccaagatcaactcaagaggaggggctggattttagcaaataggtgcttcttgtgttgtgttgaagaggagacaataaatcacatccttgttcactgccccaaggcaagggttttgtgggatcttgtgttctctttgtttggtgttaattgggtcctcccgtttatagttagagacactctctcaagatggtccgcttcctttgtggacaagaagcgtggaaagacttggcgggcagctcctctctatttattttggacggtttggaaggaaagaaacatgatagtttttgataatgaggttttgttgattcaaagaatgaaaaattcttttgtttgtaatctcttttcttgggctaagtcttgtttagatggaggaccctgttctttaattaactttgttgattggttggttctagttgagggttggtgagtgtttgcctttttgttttttgtcttttggtttctcgtttatactccctgtatgcttcgggttgccttttaagctccctttttctaataaagcttttatgggtttatctatcaaaaaaagaaaaaggcacaaaattaataattataaaaaaaatgcttttgaagcaaatgcaaaggcttgtgctcatggaggtaaaaaatttcccactaaagtatatatttatgaggccccccctagtttggctacataatctttgatttgattgagcgagcaagaaatccaagcgaaaggacaccctaaaactttgacaatgttcaatattttgatgcaactactaatgataattagagataagttggtcattgcctttttggttaatttccagcacacataattggttatggttatggttttaattatttttagagttaagaacctttctatccaaatttgcattcatccaaacacactaaggtaggttatagtgtttattttggttatagaaccaaaaaagaaagataaaatttcgaatatacagcattatatgaggaatttgttcttattgtataggcacagaatcaggagcctgatgctaagtttgcttaaatggcttgtactatttgataaaaacttaaaagctgcagaatgatgaatctgattcctagtttgtctgaatacttggtaatgatatgtcatttcatagtcttgttcttgactaatggcactgtcatagtttagataatgatttgccttgtggagaatgtcatatttttttataaattggtggtaatcaagatctctgacagtatgcttgagatttacgttaacaaattcaaaatactctcatctgtggcttcaattgaattttccgcaagaaaatgtttaaaatggtaagttctattttgcttttggttctaattacctccattatttcaggaaaagc

SEQ ID NO: 12726 - DNA, 6482 bp, Vitis vinifera
  Intron number 1 from transcript GSVIVT01038193001 (locus G SVIVG01038193001) derived from phytozome v7.0 (chr-ID chr5 ; pos 24242852 to 24249333 reverse strand)
gctccactggccctgaagagatcgaagacggcgtttgtgtccttccatactatcaatccatttcaattcctccttccttcaatacccagattcaaatttagattaattttattgtttttcttcttctttgaatcaatcttgattggttttgcgttcattcaatttgtagggctaatgggcatgctatgtttctgatgtgtttgtgtgaagttgtttgtgattggtgaactgattcatgttttcttttgatgggtttctttgttttgtgaatgttctgcaaatcacttgtcttaaaattcttgggtttgaattgtgatgtcgtaaaatttggtatttgtaattgaatttattctgttgtcgtggaatgtttagagtgggaatgggaaatagttatttcttttattatagcctttgattcaatagcaacaatttttcgatttcttatacggaatcaataagatctctgtttaatacgaggaagagttgagtattgtaggtattatggtgtactgtatcaattaactagtccaggggaaatcatgttgcagaacattgcagtcacaattgggtattttgaatagcagggttttgtttctttttaagtttggggcagactttttagtattgtttgcctttgtgaggctactgagaatttttacatgaactccaaaaattgttaccccgtaattttctataccttaggactgttccttcattgatctgaaaggttgaattcttattgtgataacttttattgttactgctccttcattgatttgaaaggttgaattcttattgtgataacttttattgttgttttattcagtacgcatgcgcattatctgactcatattgggcaggcttcattgttttgaaagtgttgtatgctatcctgtattgcacatatgatacagaagacatgtgctacttgtgcaccccaaaataaaccactgtcaaatttcaaaattctaattcgagcaaaaacgattagaatattgtttgaattagtatcctgcaggagggtcttcccaactcgtccccttaaaggtcctaggtttgagcactcttcaaagaaatactctatgccatgtttcttttggaaagttggacaggtttttatctttacgaggtgccctaaatttgccagttgctttttttgctttgccatctttcctgtcaatggtttgttctttacttgtattgtacttgcctactctgttccttaagtgtcattcatcaacagtcaacttttatccatatgtcagttagggatatccttcagatactcaaccattgttttatcctatatggagatgtttctctatatgtatatgctgataagttgggtgcggttaagctaaagagtggaaacctctcagttaaataaaaaatctttctgtggcgtttttagtccgagggagcaagtcgttttctttggtgtctttgcttgggacgctgcctgggaggaaatcttcatgtcagatcagcttacaaatagggttgaccatcagtgagttggcttttcttaagcaagcaagataaggagtcagccaatgatgttctaagccattttgggtggcttgtactgaacacatcctggtgttttctttgtttggggttttgtgggtgttcttcctttaggtcgaggaatttttgttatgttagcatgttatttttgtgggaggagttaaagagggactattcctctttgtctatgttggtctacttggagaaagagaaataaagatgtttttgaggagtggagattttgtaagtgatgttgaataatatcttgtcaaatacttcgttcaattcttaatttttttaaccctttaggaaggatctaatgagttcttttagtttttgttcccttaggcgctctttatattttctgtatacataggttgcatccccttaaatatctttgtaatcaaaattattaaagctagaatggctcataaaattgtatgcagcggtatcatgaaatatgttataggcctggctttcatacccttgaatatcttcttttagtattgagccacagctgccatagatattgaatacttgttctggtctttttttgtttttatccgacaggaattgttccaagtgcagcctagccatttacttaggctgaatatataatagttaaacatgagattctacacatatttctcaagtgttagcatgctcacccatataaacagcttatggttttttcatttttctgacaatgggactgcatcacatgctcatccatataaaggcttggaaggttgctccgttatgtgtgttctagaccatatggagggagagaaataggagagccttcgataattgtgaaagtatggatcaaacaattaaaaattctttcttgtttcttttttgtgattgggttaagttgtatactggggatgactctttgtctatgttaggatttgtggattggttaggctctatgtagggcgagtttgctgggttttgtgttttcacgtttccttttgggtattgtgactactttgtatacattgtatatacctttttttatttgtaatacttcttctttatctataaaaaatcaatgaagcaaagtttgaccattttcctggaggtcatgaaaattattaattttagccacatcagatgctcaattgtcatgatcttgccctccatttttgagaacaatgccattttggaaattcaaagacccattttccaagcgtttttttttatatattctcttaatttacccatccaaaaaacattttgaaaattcaatgacaataaaaacacagaaagatctgcagagctgtgacaaattacatgacaagcattgaccttctgccttctccttttctccttcatctttctgtttatgcaagaaaattttgaatacagcttatttgcactgggtgtcttcaaaaggctcccgttctcttccactgtgactcttatctgatgcccctcatcaattatcaacgtgatcaaaaaatgttttttacatttcagttctgtatgtttttgttattcttgatgcgcttactcattcactcatgcatatctggatgccattaacctccttatatccattgttttgtattcttgagccttcaaccattttggtaacagagccttggccctgtttagaaactgtttttgaaaacagttttctaatttagaaaatttgtttgaaaaacttttgacagaaaatcgttttttaaaatttattcttaaaataagttggttttttaacaaattttaagtgttttcagatttttttagtaagattttttgagcaacacttgaaaatatggagaatactttgaaaaacatttgtattgtacataagtatgcagtatcttcacaaagaacaagcaaagcaaaacaaattttcatatttgagttcccaaacagaattttgttcctaaaagcaattaagaactattttaaaaactgttttttgagcactacttttgaaaacatttccaaagaggtccttattcttatttgatgataatcatgatagtgattggaagatgttgtgagcctttgcttctttgagttatattttacaggtcgattggtccttgtgtacaagagtgtgcctgaagtcattcccaagaagccttcttgaaaaaaatttatactttattggtaataaatattagcataggttgttgaataaggtgtataggataatcacatgagggtatcagttagagtgcaacttcctgctttcataagaatcagccccccataccttggtctgatcccccttcagatatagggtcctagagagaaagcaatccaaaagcagctccctgcctaccaccagcaattgcatgataaaatatatcatttgtgaatggaaagcatggtataataagagcccactcacttcccaaatcaccatcttcaacaattgtgatgttcaccgggttccttcactgcaatggtgaccaaatatattgttttggcaggctcaatactgactgactatgttgtaagagtagcactatgcatcaagccctaaactatgaaacttaaggcctccctattcatcacttccaaaggagctattactggtgagacatgctgttatctccacttcctgcattcacctatattatgttcttctaaagctatacattaaggttatgtttggttcttgaaaagtgccaaggaaagaaaaaaaatgttataaagaaaatgattttcttatgtttggtttctctatggaaaatatgaaacaaaataaaatataattaaattatttatttatacattttaaaattatttaatctttacataaaatatttgaaatgagtttgaaatagtatataaaaataactcaattactttaaatctattttttattttccttcacatttttctttatttctacttttactttctatattcttttccttctcattttctctcaaattttttgggaaccaaatatatacctaactaatctggttatgtgggttactcccttgaatctctcttcttactagctttgatgctttcccaagtacaccaaaatgataaagagtactttgtttagcttgccgatttatttcatgttcctttttgttatctctaagagggtagtttttagattgaaaaagattcaaagggactttctttggggttggaggagggagctttggatcaaaagccacatctggtaaattggtttgttgtttgcatggaaaaattaaaatagagcttggacataaaaaacttaaccatctttaataaaactcttttgaaaaaatgatcttggagatttgtgagtgaaaggaatcctctttggaaacgaagtgagagaaggtatggaatgggggtgtggaagataattagaggtggttgagaggttttcaaagataaaacatgtttcaaggttggttttgggaacaaggtgaagttttggaaggacaagcggtgtagggacacgcctttgaaggaatcgtttctggaactttatgctatagccttttcaaaacatgcttgagtggttgatgtttaggatagtgatggttgggccctaagtttattaagtagttgcatgattgagaattagatgaggtagatgtcttttttgggaggttgtgtgaccactccattagtttgggcattgaagatattatggcgtagttagatacaaagaatggtaacttttaattgagtctttgtactatttggcaagtaggaaagctgagtcattcccttacaacataatatggaattcttgggtaccaattagagttagtttctttgcttaggaagcaacttggggtaggattttgactctggatgaactcaaaaggaggggttgaaaaattcctaatagatgctacatccgcaaagtagaagaagaaacgggtgatcatattctccttcattgtatgaaagaatgcattttgtggtaattgatttttgctctatttggtatacaatgagtaatgcactcttcagttggggttcctcttgaattggaacagatccgttgtaggaaaaagaaagaaaaaaggcttgatcgttgtggccatgtgggatctccatatatactttgtaggtcactctctagatatctttccatatctttggtgctttcccaagtacaccaaaatggcaatgcttccatgtggaaatgcactttgagtatatgaatgatcatcataccaggatgcatttcaaacacaataacttccagcatgggcacagaaccgtgtgtgagagaaaaaattatcattaccgaatgtggagacaactatgcatgtgcatatttgtgaattttatttatttattttttgtgtttgtgcatgaatcttttcatgagctacaaagggttgtcttctagagttgagcatctatagtcacaattgttgaaggcgaccttaaagtatgcctaggcccaaggttcaaccattccctagttatctagttatagcactttccttgctaaggcgtgtgccttgttggagagctgtgcctcatttacttcattttcccctttttagctctcttattcttgaaatttctagttgtatattgaaatttatataatttcagtacctttttgttgaatgctttttttaaatgcttgaattttactttttgttacttcgattggattttggatcataatttataaaattgatatacatcctaaattgtgtttcacttcgttcaggcaaatgccttgtgtcgcaccttgcgcctaggtctgaggagacttttgtgccttgagtgcgccctacaccttttaaaactgtctaattatctataatcttatactcgaagacaatttctgaacatttattatctgttttggtgtttatattcaatattactgctattcttattgcaagttttattggattagagagatttgattgggtaaatctggcaagtagtcatgcctagatgaatttcttccctggacttttactgatgaggacagtcgcaggtgg

SEQ ID NO: 12727 - DNA, 2548 bp, Vitis vinifera
  Intron number 2 from transcript GSVIVT01003601001 (locus G SVIVG01003601001) derived from phytozome v7.0 (chr-ID chrU n; pos 11166930 to 11169477 reverse strand)
tggcttttgagtttctggataatctcaatataaaggtttatttcacaataagttatttaatttatactgtcagtttggtagtgatatcttgactccaatttgttgcaaataattggattccttacaaatagagaaaggggttgtagttaaaatgagtggttgcaatgatgagtataggaacttattgaaagtgtctcaatacttgatgagattgtcgacaaccttgtcgatcctgagcggttacctgagcaacccatgtttcacttgtttcataactctatctacacccctttttatccatctttctttgaccagtttcttcgattttcttgttttcttaagttttctcatccctttttatccctctttctttcaccagtttcttcaatcttcttattttcttaagttttctcggataccaggtatgttacttacatgggattgaatttattttatatcaactagttttcagattattctttttttgtgaacagaaactcttcactcggcttccttcttgataaatagaaatattctaaatggtcattcaattttcttacagacatgagaaccaggttttaagtagggtgggaagttagtgcatttgaatgcatattggcaagaatgttagaagttaatgaaagtttggatgacacatttatccttatccttatcgcattgtgtgttttctcagttatgaagcattttgatgaaacttgaattttggaaactgcaaggtttcatgctgaatttagggagctgaagagtttaagctactgaatttgcacaaatgaaaatattatttgagtataaaattttaaagctgcaaccatagagcatgctcagcatttgttttctgtctctctgactgtaaatcggagtccttttttctcggaaatttcttcttaagcaattgttgttatcaaagacaacaaatgcacatgatgatgatttattttgtatttttagcactaaatatgattatcaaaggacccttagttcctcacagtagctaaatcatcttttggttctttttatacttctggagccaaattctactgatgggttttatggcatgttgactacatccacacttgaatttctcctctttctatcaatttgtttttagattctttagtctttcgcattctttcctaaaatttctttagtactggaggacaaggaggattaaaattataaggttcgctcgtcgcaatggcttattagccttgccgaagttgcaatgatctgagtccccttaacttatcaaaaaagaatttgaattaaaatgatcagaatctgcttatgatgcattattttctttccgtgtaaatacttttctttgtcttgtttgtggaccttatttagctttttggttcacataattatttatatttttaaatggattatctggaaaaccttactggataagcatgcatttgcatgctggttgctatgaggattgctagaaaattattgaaagtttacatgttcattgatgatcgactatctgagcaactcaagctttttcactcatatctagagacacaatttgcttgtttattatttttttttttcaagtagcatgattgctgggatagaatttcttccttatcaattctatttaaatgtttttatagatatatttatgtttctgtgttggagaactgagagtgtttcttatcatgaggcatataccttgctgtctggaagaatatggaactttggattaattactttattaagtttagtaatatattttgttaattgtgttgctttgtgctttccttttattttattttagtaatgatgattctgtattattaggttcgctcatcagaatggcattattttccttgccggtgattaataatccgagtccactttgtgcttttctcctctctctgccatttcttctcatttatttaacacgcttctcattcttgtttctttttcatttcaaaacttgtctactgagtggtcaattttccataaatgcttgagaaggggggacggtatttgaatatccaaattggttgctatgatgatgaatggaagaaatctattgaaagttcacacaaattgcttgatgaaagtttatcctgagcggttacctgagcaacacaagcatatttatttattttcatcttgtaatcccccattttattatcttctttttttctgtcagttcgtccatcaagttcatcaatttctactggttcaaattttattaataattccttgtaccttcttttggaggcaaaacttgcttgtttcttctttaaactttgacttcaatgtgtacgattcagttggttctttaaatacgcccacaatttgtgtttaatttgaaattttctgagtaatttttgaggtgttcctttcccttacagactattttctgaattattttatctataaagttcagacacttacaatcattctggttaacaacttggttaaggatgctatagaacatgctatcttatgacgtattcatgaactacttgcagtttgactcagaagatccatattctattttcctata

SEQ ID NO: 12728 - DNA, 10065 bp, Vitis vinifera
  Intron number 4 from transcript GSVIVT01024238001 (locus G SVIVG01024238001) derived from phytozome v7.0 (chr-ID chr1 6; pos 120310 to 130374)
acttttcaaggtaagatttatccttttcattataattgttgctgttgttgatcttgttgtcctatctattagtggtttttttttccctgttacatggaattgaacatttttttgataggcaaatagcagtaatattaagagaaaaaacacctgtaataggagtttttgtcggtagtctgaggtcaattaggaacaaggagtgggtgaccctttcctaattgtggaactttagaaggagtattgataatatgggactcaggcaagtacaggtgctcatagttagtgctaggcgcctcagttacagtcatgctagtttcaaatgatgaaggggacctatggcgtgcctcaatatatgttccaaatgacaacattctaaggaaggatttttgagtggggctaatggatctaggggatgaggatttttaatgtcataaggagaattcagaacagttggggagctctactatagcctctagcatgagaaactttgatgactttgaactagtgggcacccctcccaagaatgcttcgttcacatggttaaatttgaaagaattccttgtctgtaaggggttggacaagttcttaatcacagacaagtgggagtaaagatttcctcattgtttcaaacaggatctttggtcatagccttatccaaagggacctttggtcatagcctcattgtttcagacaccaacccgttcaaacaggatctagcccctttcaggtatgaaaacatgtggttacttcatccaaaactcaaagaaaaaggggaaaagggtggaaaggtcataggttcatgaaacaattgcaatatgtgaaatcaaaattgaaagaatggaacaaagcatcctttagagatctaaaggagagaaaaaagaaattcgtggaagatacggtcattattgaaggttgtgagtagaaggaattttgtctcctaagctgtcaactcttaggaccatcggaaaaaggaactagataatctgttgttaaaggaagagtttcattggaggcaaaaagcaagggtcatatgggtaaaagaaagggattgtaattctaagtactttcgtaggttggtaaatggaaggagaaatagaaagttgatcaaatcctttgtaaaggaggaagggctctagacaacatgtaaagcatattggaggaaatagtacgattctttggaaatttgtactctaagcctcctgaagactcttggaggatagaagggttagagtggtctcccattttgaaaaaaatagttgtttggttgaaacactccaaaggagagaaaaaagaaatttgtggaagatatggtcaatactgaaggttgtcactagaaggaattttgtctcctgagctatcaactcttaggaccatcgggatgaaccgtgagagcgatgggagagagagagagagagagcgaaagagagagagagggcgagagggagcgtgagagcgcgtgcgacggcgacgacgaggagaccggcgaggcgagccgacggcgaagcttcacggtggaatccaagaccttcgaacttgccctggatgataggaaagggaaacgccagtttcgcattgtggagaagaaacgtggggtctcgacatgggttcgattagggctggaaagcttagggcttttcaaggagggattaatccattgtattcgtgacgatgaagaagggcgatgggaaaaggaatggaaagaaggaggtaagctgtataccttggctcggggtttcaacagagcgggtgtttatctaagattgggggttgtgggtctggaacgaaagaggttttgcatattcttaccgagagggagaaggggcaaaagagggtggacggctatggtggagatggtacgtcaaatggaagagatggccggtagaagaacagaggtgcaggaggtaaggactgtcggaagagctaatccggcgaaatcatacgtagaagccgtcagaaggaccaattgggatggcctaaacgcaattaagatgagggttacaagggaggagattgctggcaacttacagaagctggagcattgcctcgtcgtgagctggaagtccgaaaaagaggaggaagacgacttggagagattgggtagtctctgggcgaattcttggggactaaaaggcaagctagggttggccaaattggaacgaggtaaggcttcgttggagtttgaagatctaagtgaggcacgccgtgtggcctcctcggggagcagactgctgggaggagcccatttagggctggagttatggaatccaaagacgggatgtcgggtagaggaggagatggagcagatagcttgggttagaatatacggcctcccaatctcgctctggagcccggggactttgaagaaaataggggaggaatgtgggggcttcgtagatatggatgagcgcacaagatcgatgggggagattcaatgggctaggattttggttaaaacaaaaggcgatttcagaccgagcttgttagaaattgaggtagaggatgagatatactctgtggctttatggtgggagatcaggccggtggtgaaacggcccttctctgcgacggaaaacaggaggaataaggaggtcaggggtgagttgcattcacgcgcggagaagcgcgtgggaaaggagttggtaggtgcgggaatcgaggaactgcagacgccagttgatgggagtgatttgcaggagaatgggccgggtcctgcacccgggttacagttccagggccaagagaatcgggattgggcctctccaattggtagaatggctgggccggctgcaagtggcccaaatatgggccttagtgggttaaagaaggatggtgggctgaacaaaatggatgggctgctgggccgaaagttaaaaaacaagcctaaagtgaatgactattcagaggcaggcccaagttgggttgctgaaatgggctgcaatcaactaactgaggtggaaggtccggaaagggagggcccaattgctccattagagaaggctggctttctgggtcgctttagctccagaaaaggacccaattcagaggatcctttgataagctgggtgatagaggagcctagaagggaacaaggggatgttggtctttcaatgactgaccgagcgctggaagaggaagttaaaaggtatgctttaaatccctatcctaaaggtaaaaaggctgtgggaacacctcttcttctcttctctaattctgatcgggctccggagggggagtctttcgatcacccagggggtattgaggaggaattaaggggggatatgtccacttggttaacagtatatgaggggaatgttgaaaacgaaaatggtttctggaagttgggagaggacagcaagaacagagacaaggctaaggataaggaagggaacaatggtggctctgcttctcaagatactgaaaacgagaaagaggatccttgggaggaatgcagtctagcaaaatttagtcaattcctgggattctctacagagggactggaaaaggagatattgagcttcttgattaaaatcagaaagagacgggaaaagattcacagcaaagaacttttggaaaagtccaaatttgaaagagagctgaagaggctggaatgttccgttaattacgagggggggaataggcagaaaggtccttcacagggcaaagggaaccagttgatagttgcccaatgaggatgaagatcattacctggaatgtgaggggagctaatgacagctcaaagaggaaaattatcaaaaactatataaggaaccagagggtggacctaatgtgtattcaggaaaccaagattcaggagatgtcggagggtattgtgagaagtttgggattggggagattctcagattggagagcccgaaatgcggaaggggctgcgggtggcattttgatatgctgggataagcgggtcctggaaattctggattgggaggagggtcagttttccttgtcttgtagattcaagatcacagaaaatggggctatctgggtttttacgggtgtgtatggcccttttaccaaagtggaaagggagggtatgtgggaagaacttggggcaataaggggactgtggggcgatccctggtgtctcggtggggattttaatattactctgtttcaacacgaaaggagcagccaaagaagaatcagctcagccatgcggagatttgctcaaattgtggatgatctagagctggtggatttgcccctgcaggggggagagttcacatggagtggggggctgaataatcaggcgtgggcgaggctagatagatttctagtctcccctagctggttagatcagttcagtggagtcactcagggcaggttatctcgtcccacttctgaccattttcctatcgtgctagaggggggtggtgtaagaagaggcccaaccccgtttagattcgaaaatatgtggcttaaggttgagggatttaatgacattatcagaacctggtggcaagaaattgaagtcaggggcagcgctagctatagattggcagttaaaatgaaggaaattaaaaagaagctgaaagtgtggaacaaagaggtttttgggaggctggaaactaacaaagcttcagccttatatcaattagatttttgggatcgggtggaaagtgagagaatcttatctatggaggaagctgaattaaaaaaggaagctaaagattcctttaagaaatgggtcctgttggaggaagcccattggagacagcattcaagggagatttggctaaaggacggggatagaaatacggggtttttccatagaatggctagtgcacatcgaagaaacaacactatggacagaattaaggttaatggggagtggctagtagaggagcaggaggtgagagaaggtgttgtgaactcgcttcagcaattgctttctgaagatatgggttggcaggcggatattggtagcattcaggtgaattgcatcagccagcaagaagcagagagtctggaaaccccatttgcagagactgagattcaatcggctttgatggagatgaatggggataaatcccctggcccggatggctttactgttgctttttggcaaaacgcatgggactttgccaaagaggagatcatggagatgtttaaagaatttcatgagcataattcctttgttaagagccttaacaataccttcttggtgttgattccaaagaaaagcggggcggagaatcttggagactttagacctatcagcctggtgggggggctctataaacttttggctaaagtcttagctaataggctcaaaaaagtgattggtaaagtggtgtcttatgctcagaatgcctttgttatgggaagacaaattctggatgcgtctttaattgcgaatgaggtgatagactcgtggcagaagaagaaagaaaagggccttgtttgcaaattggacatagaaaaagcttacgatagcatcaattggaatttcttaatgaaggtccttaaaaaaatgggctttgggaccaaatggatgagatggatgtggagttgtgtctcctctgctaaattttccattcttgttaatggagtgccagctggtttcttccctaatactagagggcttcgtcaaggggaccccctatccccttacctctttgttatgggcatggaggttctggacgtccttatcaggagagcggtggaggggggctacctttcagggtgcaatattcggggcggtagtagaacatccttgaatatctcccacctatttttcgctgatgacacaattgtgttttgtgaggcgagcaaagagcaagtttcccacctaagttggattctcttttggtttgaagcggtttcgggtcttcggattaatctagccaaaagcgaaatcatcccaattggagaagtggaggattctcttgagttggcagctgaattagggtgcagggtggggtctttgccctctcattatttgggccttcccttaggggtccccaacagggctacatctatgtgggatggagtggaagaaaggatcaggaggagacttgcgctttggaagagacagtacatatccaaaggggggagaatcactctcataaaaagcaccttggctagtttgccaacttaccaaatgtctattttccggatgcccaagtctgttgccaaaagagtggaaaaaacacaaagagatttcctttgggggggaggaaacttggaaggaaaagttcacctggtcaaatgggatgcggtctgtacagaaaaatacaagggagggctgggattaaggagaatagccactttgaatagagccttgctgggcaagtggatttggaggtttgcttgtgaaaagaataacttttggaatcaagtgatcactacaaaatatgggcaagaggattatggttggaggccaaagaaggtccgtgggccggctggagtaggggtctggaaggagatcatgaaggaagacgattggtgttgggataatttggcatttagggtcgggaagggttccaaaatcaagttttggaaagattgttggtgcacagacactccgttgtcccaatgcttcaatcaactctttgtccttgccgtgcatagggatgctacgattgaggagatgtgggatcatgatgcgggccaaggagattggaagcttgtttttgtgagggacttcaatgattgggagatggatatggttggggagctgcttcatactttgaggggtcaaaggccctctctggaggatgactcagttgtgtggaggcagggaagaaatggtattttcaaaatcaaagaagcctacaggctgctagacaagcctaatgccacagtttttcccgcaaggaaaatatgggtggatagggtgccaacaaaagtctgtttttttgcttgggaggctacgtgggggaaggtgcttaccctggatagactccagttaagaggggtgcaactccctaattgctgctatttgtgtggttgcgaagaagagaatgtacatcatatacttttacactgtatagtgactagagccctatgggaaattatttttgggttgatagatgttaagtgggtccacccagaaactgtaaaggaggctttaatatcctggaggggctcatttgtagggaagaaaaggaaaaggatttggaaatccattccgttatgtattttttggacggtttggaaggagaggaataggttagcctttagggggggtgagttgaatattcagaaattaaagaattcttttgtctgtaacttgtggaattgggccaaagtgtatttaggtgaggagtctttctccctcataggctttttggagtggattgcttccacttaaggggaggtagtttctttttggtccttttcctttttttgaggctttagccgttttgtatactccctgtatgctttatggcgtttagccttttctaatgaatatcttgtttacttatcaaaaaaaaaaaaaaaaaaaactcttaggaccatcggaaaaaggaactagacaatctgttgttaaaggaagagtttcattggaggcaaaaagcaagggtcatatgggtaaaagaaagggattgtaattctaagtactttcataggttggtaaatggaaggagaaatagaaagttgatcaaatcctttgtaaatgaggaagggctctagacaacatgtaaagcatattggaggaaatagtgcaattctttggaaatttgtactctaggccccctgaagactcttggaggatagaagggttagagtggtctcccattttgaaaaaaataattgtttggttgaaacgcccttgctgaagagcaaaggaagttgtgtggaaaaattctcatattgattttgataattacaaaggaatatatacaacttaggatataaatagaaaaggaaaataaatatttacaattgttatcttctttgggtatattctatgtaaagtctttccttttagtcttgttcaatcagttggacccatctcttttctctcctacgaaactcatggaaatctaaaactccatctaaggtaagccttttacatggctagtggtaataaaaaggtcaataccaacaacttgcaacagataagaagacctaacaaaacttttagttctgaatactgccttatgtgtatgaaaagttgtgactcaattgatcatcttttttcgtactatctaataactttggcatcatggtatagattattcaaacaagccaagctagatcgtgtttctctaggagcatcattaacatgatgaccatttcttttatagatttggggagtataggtagaggcaaaattccatggcaaattacatgcctaactttgatttggatggtatggtgggaaagaaatggaaggactttttaggacaagtggataagctcataaacgatatgggacttaatctacttttattccttctttgggcctcaactaattcagctttcaatggcactctaactattatgtaaatcaattagattttggtgtgtaattccaaatcctttgattttgtaaatgtattgttccttattgaaagaaggaccacagttcctacaaatagttttgggtggtatatgggagaaatcatattaatctattctttttatcagaatatgtaaatctaggagagatttctcatccttcacatgtatctttatttagcaaaaaaaacagctaacaaaaagaggtgcacccaatgtacgtaagtggaatacaaaaggctcaacaaaagaggttacatggaattgaacttagaagctccccacattccgccccagccccttgccattttctttttgttattattacatgataggattcacttttcaattaactcttctttttctttaatacaattattactaagaaagttgaaagaataaaagggaatattgatgaaaaaattaaagagccacacccaaagtaaaataggatggtccaacaaggatcccatagccatccatgccatgtcgtgaatttgaagaattcgggtatcaaagactagaaatgtgtcctcaaagagaaaagtggcaaacaaattacatccgcacatgtattcactacagttcttatatcattcttttactcaatagctcaaaccacaatcaccaccaagtctgccatttccaaggttgtgaagatatgcttctaaagacaaaaacacaactttctaaggattagttgctagactaataagtacccggcagtttcaagacataacttcaagataaagaactaaatgtctcctgccatgtcccagaacacgtattaaaatgtcagcctttgtgattttcaagtccttagatgcccatgagacaaggacttcatgatggggcatggagcctaccaagtcacaaagccacaaactatatcagttaaaacctagctccaagttgggtcggttcttatctgatcttatggtggtcatttaattaatcagtcaacagagagatccatgaccatgatcatgtatgactcatataattaaaaatatgtatgtgtctcagtaccagagtggtctggtttaatcctccaatattttgattactataattttagttttagtctatgtaacaaggtcttgacagtggtatttcggtccaacatatgttcaaggattttgatactgtcacagcaaaatgaactgcgacaaatactgtacatttcctactctgtttaacatgctcaacatgagcatgtgacagtcactgtccatttgacgagttatttcacctcactgatccaatttccattagattagatttctcctaaaatgatggattttatttaccacaaacctttccctaaggatgggcttcaactactactactactaataataataataataataataataataatcatcatgggttttgatttttttgaccctttttattaaccatattgtatattttgaagtttatccctcttattcctgtatttcctattgtagcacattattttctcttatatcatttatgagctggagtttaagatgatttgcaaactatttttgtccagagacatttctagaaagcagaacgaggaagagctgc

SEQ ID NO: 12729 - DNA, 9868 bp, Vitis vinifera
  Intron number 3 from transcript GSVIVT01021396001 (locus G SVIVG01021396001) derived from phytozome v7.0 (chr-ID chr1 0; pos 4879581 to 4889448)
gttttgtgaggtatgcacttgttcttctttgtatttttcgtttatttttattctgtagatttattttgtgttattggcttgagtttaactaagagaattcttgaaatgttatggacacatctggcttctgtctaatgaacttgatggtaggaatgcatttgtttcacttcaaacttcatgttttcaacgaccttgcctagtgatttctagattcttcactggttatggtggatctccacgtgaataaaactgagttactaacagagtttaagaggtcaaatctttgatgatcccaaaacatctggatagttatcttatatattcttacatcgaacttctagataagcaatttatatatgaaccagattctctagttaaataatctctttaaagcaactaggagattttctagaagaaatatagggcaataaatacaaaagccgttgctacttgctttatagcaactgagatattttaccagaagaaacacaggttttttgcttgtgacaacaaatagaaaatttgttttagttgtgtaggagggttttgcttgctttgtggcaatgaatacaaaagttgttgccaataaggtatggatcatttttttgatagataaacaacaaaatatattagaaaaggctaaaaagctgcatgtatacagggggtatacacaaaagcccaaaacaaagagctgaaagaaaagaggggagaaacctcgcccaccctcaagtggccgcaagccactccaaaaagcctaagagagaataggtttcctcaccaatgtacaccctagcccaactccacaagttacatacaaatttttttttgaatttatgaatatctaatgaccccccccccccccctgaaagctaacctattcttttccttccaaactgtccaaaatatgcacaacgggatggaaatccaaatcttttttttttttttttccccacaaaagaacccctccaactaagtaacacctctttaactgactctgggaacacccactgaactctaaaaatggcgagggcaatctcccaaagagtcttaaccactgtacaatgtaaaagaatgtgattcgcattttcctcttcacagccacacaaaaaacaccgattagggagctgccacccccttctttgaagcttatccaaggtgaggatcttcccccacgaagcttcccaagcaaaaaaagacacttttgttgggaccttatccatccaaatacgtctgttcggaaaagcacaggctgaggagccaatcagcattttgtaagcacccttagccccaaaaacaccattgccttcccgtttccatctcactgaatcctcctcaggagaagtcttgaagtccctcagcagattcagcatatctcctatttgatctagctcccaatcattgaaatctctaaccaagttgagattccaacctccttgacccaggctagagtcccacacttcacttgctttggcattcctatgacccgccaaggtaaacagctgtggaaaagtttgtgaaagcgcctcattgccacaccacttatccgtccagaacaaaactctagtccccttccctaccttaaaatcaatgctctcccagcaccaatcagcctccttcatgatctccttccacaatcccactccataagacccacaaacttccttagtcctccacccacacccctcttgaccatatttcacccctatcaccgttttccaaagattattcttctcataggcatatctccaaacccatttgcccagcaaggctttgttcaacaagtctatctttcggatgcctaatccaccctcctccttagggctgcagaccaccttccagttaattaagtgagctttcccctccaagctcccccccaaaaggaaatctctttgaattttttcaatcctttttgcaacagacttaggaatgtggataagggatagaagggtagatgggtatgctggccaaagtgctcttaataagagtaattcttccccccttcgagatgtattgtcttttccactagactagtcttcttctcattctctcttccaccccatcccaggaagaagaggttttatggtgggctctaaggggtagccccaaatagacagtgggtaaagcccccaatctgcatcctagctcagccgccaactcctccagctcatccacttccctaacaggaattagaacactcttggcaagattaattctgaggccggaagccgcctcaaaccacgccaagatccagcttagattggttaactgctctcttctagctttgcagaaaatgattgtgtcgtcagcaaaaaggagatgggagacagtcagctcctcaccccctctcccccgaagcctacaaccggaaagaaaatccccctcaccagcccgtctaagaagggtgctaaacacttccatacccaagacaaagagatacggagagagagggtctccttgccgcaactcctttgagttcgaaaagaaaccggcaggcaccccattgattaagatggagaatttagcagttgaaatacaccaccacatccaatccatccaacgagacccaaagcccatcttcggaagcaccttcataagaaacttccagttgatgctatcataggctttttcaatgtccaacttgcatatcagcccgttctcttttcttttgtgccaataattaatcacctcattagcaactagagaagcatccaaaatttgtcttcctctcacaaaagcattttggtctactgagaccaccatatctagcaccttctttagcctattccctaggactttggccaagagtttgtacaaacccccaagcaaactgatgggcctgaaatcccctaagtcttcagcacctcctttcttaggaataaggactagaaaggtagtgttgagacatttggcaaaggacccatgctcatagaattacttaaacagatccaccacctcctccttcacaaaatcccaacattcttgccaaaaagccactgtgaatccatccgggcttggagctttgtctcccctcatttccatcaaggcgaaatggatttccccctcagaaaaaggcatctccaagtcttcagcttcccggaaattatgttgattgagatgcagcccctcaatatctgctctccaccccggctcttctaagagtaagttctgaaaggcattcacaatcccctccctcacctcttgatcctcagtcagccactccccattaatcataatcctatccagggaattattcctacggtgggcattagccatccgatgaaagtaaccaatattcctatccccttccttgagccatagctcccttgacttctgcctccaatgaacttcttccataagcacccatttgtagaaggcatccttggcgttttttttctgctcagtttcagctatagacaggctcctctcgctctccactccatcccaatactccaattgctggagggcagaatttttgttaacttccagccttccaaacatctccctattccaaactttaattttttgcttcaatatcttcagcttagaggccaatttgaaactggccctccctctcacctcaatcccctgccaccacccccggagaagaccattaaagtcgtctactttcagccacatattctcgaatctaaacggggtagggcccctcctcatcccaccacccatcaacaaaataggaaagtgatcggaagtaagtctatgcagtctgcattgggcgaccccactaaacatatctagccactgctgagtcacaagaaacctatctagtctagcccaggattgattattcctgcccccactccaagtgaaaacacccccttgcataggaagatcaagaagttctaactcatcaacagtttggacaaaacttctcatagcactagtcaaccttccctgtctactcctttccctctgggacaagatgacattgaagtcaccccctaaacaccacggatcttcccacaagcctctgatcgcccctagctctttccataaacaatctctatcttctttggagaaaggcccgtacacaccagtaaatatccaggttagcccatcttccacattcctaatcctacatgagactgaaaacttccccacctccgtctccaccacctccagagaccttttatcccaacacaccagcatccctcccgcagagcccaaggcgtccaaggccacccaatttgaccacataccagaacccaaacttctcaccagatcctccgacaatgtctgaattttggtctcctgaagacaaaaaagatccaccctctgacttctgatcactgccttaataacccttcttttggatctgtcattggctccacgaacattccaacttaggagtcttagcttcatttaactttcataatctggaacccccttacttgctctccacaataaggtatggatcattaagatatcaaatcatccagtgcaaagatggtttcaagtgctggttatctagttatagaagcataccttttggctttctctctgtatttctcaaaaaggattgtcatagtaaagtgttggttccttttaccttttttggatgtggtggtacatgttatgtatgtgcatgatcattaacaagttgagagaaattatgttgtcaaaaaactgaaaagagtttggttggaaattttgtaagttaagagattttagagatagaggaagaaatcaagagctggtgatttacttctttgaagtcttttccaaaattactctaattattcttaaatcaaatttaagaataggtagagcctaaatctatagaacctctagaggctctagagaccatatcctagcttataacagtacaaattggtaaaacatgagataggtgcctctgggcatgcagaaagatgatatatgggttaatcaattatgactatttttaatagatcaggagcttgagtatatatatatgtacatatctgtagaattatatgaagatttgttattatgctaaatgtaaaaaatttgatcaatctaaaagatcaaatcagaattgtggtagttgatgaaagttactatagaaaaaaagaaaaaaaattcatttccatttttgcagaaggccacaatgtttccctttgtaagtcaatggcaccatcatctggttttaattcctccaaaccttattatagaagagtttaaatcacttgattgtttgttaatgagatttatactgatggatgcatcaaaattgaatcctttgatttattgattcactcctatctaatacacaaattttatgggatgatgatatcaggttttagtgacccacattccaccaaaatgaattaagaatgttttgttttgatgtctctgcatgcatggacagagggtaggtctgcagataggagaggatgttttatagagttcaattagttgtttgtgtaatagcagagtctagggtgttttggccctttttctcttcctttttttgtgctttctttttgcgcattccaagtatacattggttgtgctctctctataaatttttataatccatatagaaaggccttcttatcacaatatcacaataggtaacggtctaaagaaaaagattctttatgtaactccaatccatcttacatgcatgtattatcataagttatgtatatgaaattttgatcaatcccatttgattccttattatggtccaatgagaaataatagttaggaaagagaagattgaacttgtgaaattttgcatccaaaaaattgcgttaccaagatgcactttcattctttgttcattcccaaagttcaatacatccgataggcaatgagaagagtaaatgtaatagataaataatgatgagtaatattacagataagtaggatgtttggaatgaagaaatcctattctggcttataggtatgtaaatggtactctaaatcaacctgtcgagcagtttcttcctataaataacatagtagaaagtgccttgtgttataatttaaaatgcaagtttttcttactgcttggatgtttctcaaatgcatttatgtttaggttagaatccattttccagaaacttcactatgggcaaaagtgaatgcatgcggatagaaaaccattgatagcaccatcaactccatattctaagcagtgaattttcaagaatcaacatattgattatcaaacacatgagttcttatgaataatattcagtcatactaaatattagtttggggaggaagaggaagataggaggttgctctagagaagtgagggtagggtatggagtggaaatgtgaaaagctatcagaagtagtgggaaggctttaaaagtagaactgtcttcagggtgggaaagggtcataaggttcagttttgcactaataggtggtgtggggatgagtccttaagggagtcttgtcccatgctattgtcggtagcatctatcaaagatgcatgggtagcagagatgtgggagcagattgaggagggtggatgttggagcatgaggtttgtaaaatagatccatgattgggaactaggcaatctagaggcctttttcaagaaattataggcatagttgatttgcaatggcttaaaggatgagatgatttggtataacacaaattgtggtaatttctctgttaagtttctttattcctccttttccactgatagtttagaggcgttccttgcaagcacggtttggagtacttgggttcctgtgagggtgggaagctacatgggggagaattttgatgctggaatcccttaaaaggaaggaatgtggaataccaaatagatactatttgtgcaaaggagacgaagaaagagttgatcatatccttcttcattgttcaaaagcagtcatgttgtggcatcttgttatgctctttttgggatagaatgggtgatgcattccattgtgagagagaccctcttaagttggcatgaatcttttgtcataagaagaggaagaaagcttagagagctacttctttgtgtttttattttggattatccggaaagaaagaaataaaagagcttttgaaaacaatgaaaaagaggaccaagcaatcaagcaagctttcatgcttatcttttgggagtgggttagaatgtacaaaggtggtagctcttttccctttgctttgtttggccttttggtgcctttgtatacgtgtatatctttgtgcacccttttattaggcattattaacatattctatctttgcctatcaaaaaaaaaaaaactaatatgcaaatttgttgtgcctacaacttgagtagtcaaaacttaatcatgctatcctaatgataccttaaatatgggactcaggactcttaagtttggttggtatttgcagttcttacacatcctgagctttcattcgtggcctctttggttttgtgattacctatggaaaattccctatacatgtccataaataattgtatgattgaaatgccaaatgttgttcatctgagtatgatttcttcattgcttgaggggtagtatgtgggtagatgcatgatagcttcagagaggacttgttcgtagttgcttcctgttcaatgtaggagtgaatagttacattaatttcatccctttgtattactttcaatatcttgatgggttattttataaattatctattagggaaattcaactctaactattaaatacagttctggatgtaaaaaattccctctcagaaatttgcacactgcaccttactgcttttgtcagatgtaaggtcatttcttttcagcttccccattgctttgcagcattttgaatattttgttttgataagtattaaataatatttgaatatatacatcataagtaacattttaattctcaatggctaccatacacaggtatatcaatatgttgatattattaattgatacagtacattgtgaaggttattttgctccattgtactttaacagaaaatacttggaagaccctttcttctttctagaagattcttgtatttgttctttgtggtggaagctaattgactaggcactacccaattaagacatcctaccaccctgatagctctggacctaaaataatctgctataagattagctgatgggattggaatgtcttaggttggatgatagcttttcacttcccatttttctgattccttgtcttttccagaaataagtaaatgcctgcagatatgagaggctaatcattatttggtgataattttataatatagttttacactgatctgacagttcacctcccacctcacccaccacctccttgaaaatttgtctgccaccttgcttggaagaacctggcacattccaatcagggaaaacatgcataccacgggttatgagtgacatgatgatggattctttccaataaagaaagtaatttcctttctgacagcattgatatccatcacaatatgattataaacctccgtatcaggggccttggccaacactcatctcatagagcctgttttcatatctgctggtgaataatgtgaaatgcttctttaaaaggatatattataaaaaataggttcatatttaatacgtaaagaaattttcacattctaaaacctcttcttggaaggtcttttccaaagcatcttttgctttgaagtgtgtgtacaaccaaacaccctgtaaagcttttttaacagtctgaaaggggttttaggcagtcaaaatggtgctccaaaatggggcttacaccctcaacctgatctcactaatgaacttccactccaccttctctcccaagccattcctttgcaccggacctccaaggcttcctaccaatcaagtgtcttccatgttttccctgggtatgaacctacttaaacaccaccaaaataaaatgctgcctcaggcatttggaaaatttaaagcatcatgtaagattaccattaacaaccctaaagaaatggattgaaagccaaaattgatttccttcactgaacatgaatgctgcttttccttagcaagtaggtaactcctcatcaacacgatcaggaggagccttttctgtatctaattcatgaatcacctttgcaaccacacttctcattcttgaaccaaagcttgcaaaaattgtgtttaaggtttgctttcatcacacaaaagcaatttgatcttgagacgcattatctaaagagaccaccttcaaccttggtgttggctgctttacagagtggcatggacagaagttattttctgcctatatagctgcacaaatatcacagcctaatggctgtacattaccattgttcctatgatttaggtggttttttcaatcaatgcttgtctatcatgatgaggagatccctgtggaatctagttatagagtggcccatatatattcaaatcaagttggaagtgcttatcctgtactatgaacttcagaattttttatgtttggattttatttgtattcatgttgttgacttctgtggaaatgaatgccctaacattctgtgtccacttgtgtgactgctgatgtgtatttaggcttcacctaatttgtcattcaatgccttctagaattttttctgtcaggtggacaatctcactaatgcaaatgtgttaaaatcactaaatgcattgccatgtgctcgtcgaattgtcattttccggatccgttatagactctgttctttaaatattgtgtcattttggctttgctttttgctgccattttactttttctggattcctttattatcagatatatgatcctatattcttaggctgaagccaaccctagtagccgggatgagattttttatttattttttattttttgtgttttttccgagtatttatgcttgttttatatatgcagtaaatcagaat

SEQ ID NO: 12730 - DNA, 1489 bp, Vitis vinifera
  Intron number 12 from transcript GSVIVT01038529001 (locus GSVIVG01038529001) derived from phytozome v7.0 (chr-ID chr 3; pos 11119523 to 11121011)
gctcctctcctgctgatagaatctgttcaaaaccggtaatttttaatcttattgtgtccagaaattactcacatatacctgtaacatttagatcaataactatttatttactttctcttgctcttaagggtttgttttattgatataaaaccttgaaataaacttgggagctcaatctgttgtcaattaaaagattaactgtttccatccaaaaatctgacaacctaaatgatagttagggacagaaaatctcctctagtgtaccataccaaacagaagtcttttaccattctgaacatttgtaatcctggtgaagtgctttgtatgtttggttcaagtaattattaataatataaggctcttgattttccccataaaggtattaaaaccattttgtggccgtctttttattttttactttttaagaattatacagggaaaagaacggacagacaaataacttattactatcttataatagagaaagaataacctagattgcacaaagactgtggctgatcactttccttctgatgttatgctttgtattggtgagaagaaaaaagttttcttttctagtagaaaacaagagattttttatgccttttgtcttcaacattacattgctttgatggtgaaagagtgagaagattgcttatcttttctttgtgtttcagcgataaggacaaaagcggagacaaaatatatattcataattataagttagtttgccaagtgacttggctgtaagaagatttttcccaaagccgttgctgtgatatcaagagaaaaggataacaaccaatagtttttattgaatcatatttcataaactagctaatgaccttttgtatggatagtgacgtattgtgctgatgaaggtgccaataaacagtaagttgtctttatatttttggaaatgcagaatcaggaagtaatctcctaaaatgaactataacattaaattgcagtacaagaagatttaagtttattgactatgtaattctttaaaatgaagtgtggcacaatttattgtagtttttgccatgcatctcagatttttcagagacttcaacagcaccactctgcccattctgtgatcatagtgataaaatcctcacttataacaatattatcttcttttttcttgatttcattttaatttgaatccaacagttctttttcatcctaatctgcaacacatgattgatggatattccactggtgggatttgttttacacttactattactaaaacccatataaaattgttatcatgtgtggaattcctctaaatgtctaattatttcttcacatctggttggagttatgctagttagaacccatgcactcttatgttcaggtacattttgaaggctatttcttcttcagtataacaaagtacccacatcccatataaatagactatcaatcagtattctctttttgattaggcacctccttgtttgccaaatttatcatcatctga

SEQ ID NO: 12731 - DNA, 8307 bp, Vitis vinifera
  Intron number 7 from transcript GSVIVT01010703001 (locus G SVIVG01010703001) derived from phytozome v7.0 (chr-ID chr1 3; pos 12074869 to 12083175 reverse strand)
ttcttgatacttggttttcaaggtttgttatccatgaaatttagcatttgttcgttcttgttatggtttacttgcgtgcaaaaatcctaaagtttatcttattagcatccttgtcgtaattatgatcaggtggtggatgatctatttattttctcatggctttagcatatagctacaaatgtttacttatttttcaatttaagaaaactgtgtcttagagctattacactaacatttttcagattttttccattttttccattttttccattctatatatgtcccttatactgatttctgatatactatgattctgtgcttttcttcaaattctaatttttgttgtaatggaattgaaataattattgaagtcataatttctgttgaaatttcatctaggtactagaaattttgcctacattaaaagtacagttccttaaatattaaaaattaaaatggcccagtggaggtgcatttaacgaagtacgtcattttaaaattttgttgaagttaataagaaaataaaatgatggtttggcacctctagaaggccttgtcaaagtgcctctctttaattcttcttgttcactcttgcaaagattgataaccagggctgaggaaaatagttgagggtggttttcaagttggtagagatactgtgagagtagctcaccttcaatctgcagatggcagcatgtttttaagtgtattcacaacgttaagcttattctcaagctttttctatttggtgcatatctgcaacctactatctgctaatgtttaaaattcttatgcaagtacaaagtagaataaccctaggatagttttctacaatcaaataagttgtgctagggcttcaatcttttaggattaaggagagaaacaatgaaccagaattatggcagtagggggggaaaaaaaataaagtatggaaccagaacaaaaataaagaaaagacaggaaaccttggagtttcattaaagccttctaagagtcttatttagaagaaaagtaatggagccctcaccattgaaacttgcaaaaacatgcaaaacaacttagtattattcatcatcaatttcatttcacaataaatagccttattataggctttagaaaaccttaaaaactcaataagaccaagtaaaaaacctaattgatatagtaactcgttaggactcttatttatttcttatcactcctaaatcttcccaaattggaactaaataggaaatagaaactatatttttgaactaaaaacttaacattataaaaacttttagaaacttctaataaagaagacttttagattctaaaaaggactcgaatatagaaactttatttaaaaaaaaaaaaaagacatttaccaaatcaaaatttagaaatatacaaatttcttttaaggagaaaatttcaataaaaagcttcttaaatagtaaatgaaactcaaatttcaacaacttatgttaacttttgagaacctaaaatactgcaaaattacctaattgcctgtatcatatcttaagcagagcttatgacacacaatacaatatgagatctaatgatacaacaatgcatagacctttaattatttttcataatttttaagaaaaatcaaattaaaaaatttcctgttaaaagaattattatattaattgtttaaaatgtatggtaagattagaaattgatcataaaagggatagaaaggtaaaataggcttatatgaaaagctacattctttttttcaaaggtcatgttggaagttaaataaatttattctttgaatgaatattatagaatttttatttgaatgatttgaattttaatattaaaaatgatggtaattgatgaataaaagcctttttttttttaatatattagttttgaaaatataaaagttggaggtttaaagattacatataaagacatatatgcttacatatacttagtaaaatttggaactaaaactttatctaaaaacttaaaaagtttatttttgtgaattttgtgacgagtgtgaactacattaaattcatattttgttaaattaaatttttttaaattctagtattcaatgttttcatatggtgatatagtttgaacatctttaaatcctattaactttcataaaacaattatatattgttctatagtttattttttcaatatacatgaggaagagtttgtagtttcaaagaagatgtggaccaccctcttcccttcaagttccgatcgccgacaaggtcttcggagtcgcagcaagcctattttccccgtgaaatcatcgtcagttagcgaagctcctcttttggaagaggatttcgggacggtatctcatatggagcgaggagtcagagcgagtcctctctttcgctatcatttgtcaaggatttgaaagcggtgttcgagggaagggacctcgtcgtcaagtggcgtagcagctttgcgcaatccccattccgaagaagacaaagaaggttctttgggccaagtggggtcaaatcttcgtggtcttccagtcacggattcaccttctggtctagaaatcagaggtaaagggttcatctttgaggggatttgtgaaattctgggagtggaaaattcggaggtatgcttgtcttctccttctcagccacccgagtcttcttctatcccttcttatggtctggcacttccttcgccaagtccctctagtccagatctccttacctcagtctctctttctcagtctcctatggaaaattgagttatttctgaaattttgtttaataaagacgttgttggcacttttcttcaaaataatgttggcattcctgtccgtgatgaggaggcgaactagcttgctttatcaaaccagttgtcagagtgttttaaccctagtaagtctaaacccagattgcctaaggaggtttccaacctggttacaggtagccagggtgatactgtggtctcctcatcaagcgagttccatatagatggcctgtcccccaggaaaatggctaaagtgcgagaggttttattctctctggatattaaggtttattccaggaggaagaataaatgctttactggtaattgagacctgttggaactggtttggttggttagggtccatgagtttctccatgaaaattatcaattggaacactaggggtctggggtctaggaataagcttagggtggttaaaggttttctaaggttagagaatccggatgttgtgatgattcaggaaacaaaaaaggagaagtgggacaaaaggtttgtgggtagtgtctggacggtcataaataaggaatggactgctattccggcgtgcagggcttcaggtgggattttgatcatttgggattctaagaaactaagtagtgaggaggtggtaataggatctttctcggtcttagtcaagtttgctatggatggatgcagacctctttggatttatgcagtttatggcccaaacagcccctcacttaggaaggatttttggatggaacttttagacatttttggcttatcttttccgttatggtgtgtgggcggtgattttaatgtcataaggagaagttcagaaaaattggggggttctagtctaacttcatgcatgaagaactttgatagttttatgagagaatgtgaattatttgatccacctttacagaacgcatcattcacttggtcaaatttacaagagtctcccgtgtgtaagagattggaccgttttctttactcaaatgaatgggggcaactctttcctcgaggccttcaagaagcccttcctagaagaacctcggatcattggccaattgttttggataccaacctgttcaagtggggcccaacactttttaggtttgagaatatgtggttacaacatcctagtttcaaggagaactttagaaattggtggacaggttttcaaggaaatgggtgggaaggtcacaagttcatgaggagattacagtttgttaaagccaatttgaaagagtggaataaggtttcttttggagagctaaatgaaaggaaaaaaaagcattctcaaagatttagccaacttagatgccattgagcaagtagggggtctcacttctgatcttttaattcaaagagccttaagaaaaggggagctaaaggaattaattttgagggaagaaattcattggagacaaaaagctagggtgaaatggattaaggggattgtaactcaaagttttttcataaagttgctaatggcaggcgaaacaggaaatttatcaaggtgctggagaatgaaaggggcttagtgttgaataattccgagagtatcatagaggagattttactttactttgaaaaactctacgcgagtcctacaggagagtcttggagtgttgatggattaaattggtcccttatttcggaagagagcacgagtagattcgattcccctttcactgaaaaagagatttctaaggccattttttagttggatagggataaggcgtcggggcctaacggctttaccattgcagtattttaggattgttgggatgtgatcaaggaggatttagtgagagtgtttgcaaagtttcacaggagcagaattatcaatcaaagcactaatgcctccttcatagttttgttacccaaaaagagtttgacaaagaaaatctcagattttagacccattagcttgatcactagtctctacgagataatagccaaagtgctgttagggcgtctaagaggggttttacatgaaaccatccactttactcaaggcgtttttgatcaaggaagacaaattttggatgcggttctcatagccaatgagatagtggatgagagaagatgatctgggggggaaggcgttgtcttcaaaattgactttgaaaaggcttatgatcatgtatgttgggattttctagatcatgtgttggagaagaagggattcagccctagatggaggaagtggatgagtggttgtttgtcctcggtttcttatgttgttttggtgaatggaaatgctaaagggtgggttaaggcatctagaggtttaagacaaggtgaccctttatcctcttttttgtttactttagtcgcagatgttctgagcaggatgctattgagagcaaaggaaagaaatttgttggagggtttcaaggtgggtagaaataggactagggtgtcccatttgcaatttgtaaatgctaccattttcttttctaacactagggaggaagaactgcagactctcaagagtcttttgctagtgtttgggcatatttctggcctcaaggtcaaccttgacaagagtaatatttatggcatcagtctagatcaaaatcatctttttagattggttgagttgcttgattgcaaggcttctagttggctcatactatatctgggtcttcttttgggagggaatcccaaggcgtgtggcttttgggatccagtggttgagagaatctcaaaaagattagatgggtggcaaaaaaacttacatatcttttggaggaaggataactcttatccaatcttgcctcacccacatgccctgttacttcctttccttatttaagatacccgctttagtggctgcaaaaattgagaggttgcaaatggattttttatggtcagggattggggaaggcaaaagagatcattaagttagttgggatgtagtgtgtaaactgaaggcaaaagggggattgggttttaagaagatttctctaaggaatctcgctctgttagggaaatggttgtggaggtaccctagagatggtctagctctatggcatcaggtcatcttaagcatttatggttcacactctaatggttgggatgctaacactttagtcaaatggtcacattgttgtccttggaaggctattgcacaagtctttcaggaattttccatgtttactcggtttgtggtaggaaatggggaaagaattcgtttttgggaagacctgtggtggggggaccaaccttttggatcccaatatccaaaagtatttagagtagtcttggataaaaatattcatattgcttcaattcttggttcttctcgtcctttcttttggaactttaatttccgccgtaaccttttacattctgagatagaagacttagaaggcttcatgaggtcacttgatggtttgcatctatcaccttcaatttcagatgctagattttggcctttatcttcttcaaggccttttttagtcaaatctttctttctatccttatcccattttgctggttctcctcaggtttttccttctaagtttgtttggaaatctcaagtccctttcaaagtgaggtcctttgtctggttagtggcacacaaaaaggtaaatactaatgacatgctacaactgagaagaccatacaaagcccttagtcctgatatttgttttttgtgcatgaagcatggggaattagtatatcaccttttcctacattgctccttgacgacggggttgtggtacagattatttcagttagccaagatggattgggtccccccgaggagcatctttgacatgatgtccatcaaatttaatggttttggagcctctaagagggggagagtcttgtggcaagctacaagcatcgctattattcgggttgtgtggcgggaaagaaacgcaagggttttttaggataaagtaaggaattcagagtatctttgggattctattgttttccttgcttctctttgggccttctgttccaaggtttttaagggtactccccttaatgtgttacaacttgactggttaatggtgtgtactcattaaggagtggtccaatctagagtgttcgcttgctttattgtgtactttcttatgtttgtattcttgtagtttagtttctttggtggggggatttctcatccttctattgtacttcttttatatatcaatatatctctttgtcgtttcctatcaaaaaaaatattttcaatatacatgtacatgcatgcatattttttctttttaattttcaatatataaaaaacctatgataaatcatatacgatacacaacaccaaaaacaaaaaaggatacatgatatgttttacaagttaacaactatggttaatcctcctcctttgcctcaaggtgaacctaactacaaccctaaaattcaaaagatttgggtcttttttggcgtgaaggccagtaagaaggtaaaataccaatgatctcctcgagccaactagactctaccaagcttttagttagtatgttgtgcttgtgcttggggattgggcattctggttatctgttcttccattgtcccatctacccttgctttggagctattatatagattggtttcattagaaagtatggcctagtttacttcctgggcttgtgaggaacttaataggaaggaacgtgaaaatttttttccttgaaaatagaacaaaagaacaaaagattggggtatgtttggaagctttttgcaaaaacatttttttgtttttaagggaaaaaaggttttctgataacatattttaattgttttcacttatttttcaagtgttgttttgaaaaataattatagaaatatggagaatgattgaaaataaagcactacaaataaaagttggttttataagaaatatttaaaaatatagaaaacaagttaaaaaattcctaaatagacttgttctataaaacatcagagaacaattttaaaaaaaagtcttaaaaattattttcaaaattgttttcgaaaacacttttcaaacaaaaccttatttttctgcgttttatatactcctgtacattttctttctttcttcttcctttatatatgtatatatttttgaagaatttctcatccttcattcttttacacaattttttctttttgtttaaaatacaatacatgcatagttttaattaaaaaaaaaagaaaaaaaaaagaagctaaagtatagcattcaagatggctcagaattctaaatttcttattgtattaaatccttctttctgtggtttaaggagatgctgcaacaaaggtgtctaattcatttttaaaattcttttatgatagttaattagtagatatgactgaaactttgtagctgttgaaatatattaattgtattatatgtattttttgctttgttgaaatgaagagagttaaaacatgtgaggacttggacttgttccatttgacatgaaaacctactctacatgcatgcataaagatgatagtatatccatataatatgaatcctatgtatgttgactagatgtatcttgtttgtttttcttcagtgcattgtggcctttcagcactcttgg

SEQ ID NO: 12732 - DNA, 1698 bp, Vitis vinifera
  Intron number 1 from transcript GSVIVT01019067001 (locus G SVIVG01019067001) derived from phytozome v7.0 (chr-ID chr4 ; pos 17152524 to 17154221)
gagacggcagaattgtgaattcggagctttctcaggttcgattatcatatttttcggcttttcttttggaaaattttgatctaaattgtcgtaattctgtatacatttgatgaattttgttcatttaattgtccaattttttttagtataatttagcttctttatacaattttgatctattttggaacttagaatgctgaaattcatggtaatgtgatggttcattgtaaatttggtgtgtgtctttttatttattttattttttagttcaagtcatcgctttttttaagtgccattggggtttcttattgggttttccgagatttttggttgatgattgaaacttatctgtgcggaaatttgtgggaatgtgatgatccagtgtaattttggggattcttttttgctttgcagttaagttcaagtcatgctccttttctaagtatgatttagcttgttgtttttgaagaattttgataggaagcttttgggaaagtgatggtttttgtaaatttaattacatctttttatgggctagcttattgtttaggagaattttgatttgtgggaatttggtagtttttgtcaatcctttccccccctcattgcagtgggtttaattcattgtagtgtagtttagcttattgttattgaagagtttcaattaacgaatggaacttcacaatgttggaactcaggggaatgtgatggttttgtgtgaatttgtgttgttcctgccatgcctttttagtataatttaacttatttggtgggaaatttgtatcgatatgtcaaacagtcatgattcttcatgaacatgctgaattttttgtttttggttcttatcatgcctccctttagttcaatttaggttttattttatttaattaatttgtttattatggtgttgtggggggttgtggggtgttgttgggagtattgatctgataatgaaatttagtaaaacaaaattgatggactgtgattgtttggtgcaaaataaaattcatggagtctgattgtttggtgtcagtatgatgatcttttgtttccatcaattagttcatatcatgcccctttttggaactactttggcttttgttttaatcagaatttaggttgacctggaacttattaatgcttcaactcatgggaatgtgatggtttgtatgaatgtgttaaactttttgtttcacgattagtctattagattatatcacaccccttcacttagtataacttagcttatctttcgagaaatttcaattcttatatgaaaattagcagtgctaaaacttgtgcagatatgatagttttgtgttaacatgattacaaaacagtatattttcagaacaaattcttaaaaaaactggtttcagtctaagacttgttacaagtgtttttaagttagaaaactgttcaatatttcaaagaacaaaaaactattttcataaaccgtttccaaacagactccaaattatgccattcagaatttgtatgtgataattctgagtaaatacccctagtttcatttatagtttctggtcttgaacttgctgatggttttgaaacaaattctatggcatctaatattattttgctgtcctctgtatcttcactcaaaatctttttattcaatcatggaggtgctaaaaattgtttcccttccatttcagagtcgacccggaaagcttggat

SEQ ID NO: 12733 - DNA, 6794 bp, Vitis vinifera
  Intron number 11 from transcript GSVIVT01013612001 (locus GSVIVG01013612001) derived from phytozome v7.0 (chr-ID chr Un; pos 1436308 to 1443101 reverse strand)
agttttccttcttggctaaactcagatttacaattgtatgtctcctgactcatgatgcatttttttgtttcgtcttaattttctagatatatactataacttgctctcttaattagctaggtattgtgtgctgatgtagactcttattccttagttttattgcactgattttacttgagacaagagcatcttgatcttcatcaagctgttttacctatcaatttactggcttgcaaagcttaaaattcaatctcaaatcttaatcttaatgaagaaggcgtcatccagctatagttgatgaagtggtgagctaaaatccatggattttacagttgatgaagtgaaattcactagttgtgaaggaaaatatgaagctcaccgctacacgtgccctcttctctctcactgctcagcacttactgagtatcatcttagttattatctaaatgtgactagaaatcatagcttgtcgccccagtgtagtagttcacctcctcaataattgaatgcatttaacattattacattgtcaattgttacaattgtgccaccatcttctactgaccaacatatagaaggacctagcaatcattgattgcactctgtagaaaataaacctaacttgctatacacaacaattgaaaatcataataagaagggaagatcactcaaacaagatctcgtctgggttggacaaagatcataggtcctcccttaggtaagtttgatcaatgaagaatcattagcttatatctaataataatctgagagttgagaaaatgttatgcaattcattcaatgatgcctagatgtttatattaaagctatagtctatttatagtaagcctttgaatacatgcctaaagactaggaaattagtttacaaagaatatcacatggactaattcgaattaaatgtaaacacaattgaattaaaatcaaatcaaatcccttgagttgaggaactagaatgagagtctctaaaatgcccttgcaaaacattactcccattagcaatattgatattggtgtgtaaaaactagaacgactgagatgatagaggctttgtgagagcatttgccatgtgatctttgtaagagatatagggcaagccaatggagctgcgagcaacattgtttcatacaatataatagctatcaagatatgattttcattttggaatggaacaccaagcttactaatagataagtagcaccaattttgtcacaatggatgatgggtttttaagttagagacacatcaagttaactaagaagattgtgaagctagaaaacttcactagcacatgaggttagggcttcatattcttcttttgtagaagaccaagcaacagatttttgcttcttttggacaccatgaaagaccattgccaccatggtaaacaatgtatatagttgtcaaggcgtcatcatctcagttgccacccaattggaatctaagaaagcagcaaggtgaagaccatgatttcttttgagaaattatccatgttggaatgtatgcttcaaataccatagtacaccttttatttcaatccattgagtttcaattggtgaaagcatgaatttggaaagtttatttactctataggacatgtaaaggcacattagagtaaggttaaggcactggttacttgaaaaaactaagtagcatctgaaagaggtcatccatcatgaagcgtaagtggcagggaagtagacatgggtgttgtgactttgttcacacgtaacaggttagttttttggagcaggtcatgaatatagttatgttaagtgagaagaagacaagtgggtgtagagaacacttgaatactaagaaagtagtgaagatcagtcaagtctttgataaaagatttggtgtaaggagattttagaaaatgggtagtgaaccctcatagtttcctttgataattagatcattgatataaacaagaaagtagactgtagcaatagtaaatctataaataaataaggagacatcattgcttgaattaataaattaaaaagagagaagaaagccctttagtttattgtaccactcctcaatgcctatttgagaccataaatggttgttgtgagcttgcaaacatgtaatggataggtggaatccaaaaaactaggagcttgttcgatgaaacattccttagataaagtaccatgtagaaaagcattaattgatgatgtccaattaatgaataggccaaccattagagagtgaaatattgagaataagccatcctatgatgggcttgacaaatggactaaatgtgttgtgatactttaatcctagatattgatgaaatcctttttccattagtagggccttgtactagtaaatggatccatcgagatttcatttgatacagaagacccacttacaaccaacaacattctgagtgggacttgaagcgactagctcccaagggtcattgtgaaagagagaattgagttcttttgccattacttgacaccaataaggggagttgagggctagagttgcataagtaggttcattagattccaaaataaggggttcaggagcagtgagagttttaggtttgaaaattgttacttttaggtttggttaccatgccatggcttggtgaaagaggtggtggataggtgcaatgggaaggtcttggattggatatggtcttagtaggtatggtaggtttagagatggaagaatgagcaacatggtattaccttgtttgggagttagaggagcaaaggatggtaatagtagcaatgtcactgagcatggaaagaaagagactggatattcatgggacatggctgaggtgcctgccacacatgggatgagaaagatggttgagataagagcaataagagaagaaatgagagatacatattgaggagaggaaagagacttgggaaaaagattagatataggaaaggttatttctacaagttgggcatgataggatgtaaggttatgatttttgttcaagtttgtttgatgtgtatggcttcagccatgaaaagcataagcaataaaaaaccttttaatttcccataacttagatgtactttggaacaacctttgaaattgtgaggagctatgaagaatcagaagacaattaattagataatgccatttgaaatgcatagatccaataatgagaaggaaaagagccattgtaaaataaggtgagaccaatttcaataatatattggtgatgttgattggcaaattattgtgttaaggaatgtgagaggcaacgttttaagctgttaaataccaagtgaactagaaaaagaatatttaagtgtagtgtattctctttcaccattagaatataagtagaaataataaacattttgaaataggtttcaacgatggatttgaattgatgaaaagtcaaatgtacatctgatttaagatccagtgggtacaaccaaacacaatgggtacaaccaaacatattttgtaagatgatcaacaaaaataacataataactaaacctatggactaaatcgataagaaagggtcctcagacatacatataaataagatcaagaggaataggcttggaagactactgaccaaatggtacatgatggcccttactacataggcaagattgacatatatagctttgatacgatgtcaaaagtggaagactgaggggaatcacaaacctattgctgaggaagtcctgagtatttttttctagcatgattattatataagaatgggataagtgtaatctgattagttgtcacattacaaatatagaaagtttaaaataaaaaataagatatggaaaagtcatctaaaaatatatagccccatgtgaactattgcaaataaaacaacccactactttggtttcttgtcccgtggtggacttctctaccacctaggctggagtcgccttaaccttgtttctctttctgcctccattcttcttagagtttttggatttcccttcttcgctttgtctctactgttgtcctttctctttgtgacttgtagaagatgaagcatccaatcaataatcaactaggcaatcttttgcctccatggatgtaggtaggttctatagctcgggaatgaattcgaacagcttatcaacttctaacatgtccttgatattgaggattaaagagctaaactctttgacatagtccttaatagttcctatctgttttagccttttaagggactcccaagccatccaagccatattagagtgaaggaattgacccttcaactcctttttaagtgtctcccatgtgtgaatccttggccttcctgattcagcatcatcgtttgatcttgtatgctaccatagcttcacatctccagagagatacatggtggtgagggtcacttgctctttcgaaggaatatggaaatatcaaaatactactccatgtcccgaggaaagttctctgaatccttagcattttacaccccgttaaagggttcgagttcaagaactcgcaccttaggtagggttggttctgaagcaataggtgctctttgaacaacaactcacttcaaaatcataatctccactttaagagactcaatcttgcccttgaacccttcaattttgttgttagggtcatcatttgttcctctaacaacttatttcagttcttaagcatatcccgttgaacactaagttcattgaaggcattagccgttcttaccaatacagtggtgtctctatcaagagattttcccacgtatgcctccgggtgtgcaatctatttatgaattgcctccatggcactactccttgcatcatcaagctctgataccaactatcatagtgtaaaaactctcctataattttttgagtttgtgaaatgcttagacacccctctaagctagccttctaatacccacatgagattaaatcaaggaaccagcacaagcacacatcaaattataaggcaccaaccccaacttgtattttattgcttcattgaataagaatacaagacagattagcaagattcccacaatagcgttggtgagttcacgctctctcaagatctccctttctaaagccctttgattgtgtgtatgtgtgaatgtacatgttcgaggaggctctctcatccccttttataaagtggctaccacccaccctttgttagactaggactccttatcctagatcaactaggactcttcctcatatgttgtgtcaccaaccactctcatttggactttgagtaggattagaaatctcgttcatcaagaatctctctcatgctattgcccatgcagatatacatagctcgtgcaccttccaagttcccctttggttcacacatctgagtcaaagctatgtcgaggcttctatccatctctatgcctatgccctatgtcattgcactcatgggttgcattgaatcctggttccttgcccatgattgcgtgctttagcaagagtctctaccaccccttgcttgtaaatcaagcccacactccttcatgttgctgctatggcactatgccatgttccttctttttcttggtgcacaacaacgattgattgcattgagcccatgaatcttcgtgcatgaggcattatgccctcatgtgtcacatctcacatcatgtctcgactcggcttcgttgttgctgcatctccatgccacatccaagcaacagatcatggcattgtgcccttgtgccactattgggaggggagtctacatcacgcctgtgccattgtggtcactggttgtacaccaccatatgtcgtagagcccatgtgtaggttccaacaagtcttgccctgtgtgccttgcttgtgtcgaaggccttgcatcgaggccccttggtgtggtcacgcccagaccacaatgcctcaccttgagtcagctacccctctccccaccttaaagatcattttaagtcgttttggaaattttcggaggagtcatcatccgtgttcaaggaggaataatggatttatttaataattccccaaaatccataattttcccaaaaagcctcctgttgctatgcgtgcatcctaagtgggcactcaaccagttgtgctcacaacctattgtgttcgcgccccgtgcacacggtctattcatgtgctccatgtgtgtggcctgtgcattcagctccttgtacccgcccaagtgttgaaacgcttttgtctatttgatgccacaaacactccaccatctgaaacgagtactgacaaacccacccacacctaaagaagtcgatgcccttgttgacataagctaccttcaattccttggacagccatatgatgttcctgactcctctctaaactagaacttccatgccaagcaaagccttccatctagttggagtttcccctctagtactcctgtgcaaccagcaccatctcatctagctggtcatggtgcctttcattagtggactcctgcaccccttgtggaattgcattaggaattcccttatcacaatcggacttgcttcccatcaatgtggcagcctttcatatctaattacttttgatttgtcttaataaattgtaatgctcttgccaatatgaatatgaaatttcttattttaccctgtggaacttatatataacctgtaagtagaacacattatgatttgaagcacaatcaaatcatgttcctatctatggctctaactagtatctctaattaattctttttgcttcaatatatgttatggaagattcactaggtgctgattgactactaatgtacattatgcaggaatttagtagccaacaacttcacatttgatagct

SEQ ID NO: 12734 - DNA, 974 bp, Vitis vinifera
  Intron number 22 from transcript GSVIVT01012031001 (locus GSVIVG01012031001) derived from phytozome v7.0 (chr-ID chr 1; pos 2009343 to 2010316 reverse strand)
aggtaaactttctgctctgtatgtcatgcttattgttgcaagatgattatatgaggaccatgtttaattgttaaaatacttgtttacctgtcgaccatgttttttgtatgctgctatactcacctctctcttttttctgtctaaattcctcaagtctggtatctgcgtcaaccattttgcaatatctagtgatcttggcctaaatttatatcaacaatatgcattacttatcaagagggtttattatgaaatgctacccaaatcacccatgaaaagtgcagtgaccttttgataactcaaaatagtgctttcatgcaccaagatcacaaaaagctttgaattgactattggaagagattctcaaggcagggcccataattgcttgaggtatatttggtgggttttccatggcggacaatggtttaggcaattctcatccttccaaattccaccagacctactcaaatccaacccatgtgctatagtctgtatcctcttctaagacaccgaaacaatttctttgttggggtttcaaataataagaattatgattgttggtaagtgagcatctattctgagttttgaccatagaaatgttgatcgtccttagatgctaatatgattgaaaactatagttttatgggcatatttttcatttccacaggagaatgttaactacatctaacttgaaatttaaccatacagctacctataatattttgtcacatgtttttctctttcttctctactaaatgattgtagggaggtatgtgctttgagctggtttttgtgggtttggtttatctcagcttgacaacttctatgatatagcatcttattgatctatcagagttgaaaatttggttgttaaatgtctgaagatggctgattcttcacattgtactttggtttaactttttttgaggccacgatttagatgcttcctcataaatttcattttctgaaggtcctct

SEQ ID NO: 12735 - DNA, 10671 bp, Vitis vinifera
  Intron number 4 from transcript GSVIVT01035925001 (locus G SVIVG01035925001) derived from phytozome v7.0 (chr-ID chr4 ; pos 5982947 to 5993617 reverse strand)
ctcagtggcgtaaacaatacttccagaaatttggggtaagatatgcattaagtgttgatgtttttcttccatataaatacttcattaccaaaagcatggtgcaaacatggtataagcgtgcacataaactaatgttggatcaattgtttcattaccatctctgtcagcattttgcttgtttttaaggagttgcattctcttcttttgagttccatagcctgcatattgtcagacagttaaacctgaggtttctcctacattctgttgttcaagtaggtgcagtccaaggcagaacacatgcacataggttccctgcacatgtggcacaaacaagcaggggtgccaacctgagcttcttttaatttttgttttatcttgtaacaattactctagctatttggtttggactggccacatgttttgttttatcttttaaaaaagaaaagaaaaacaaaataagaaagaaaacattataagcatgtacaaataaaataaaaacctgaactttgtgcgcgcttgagcaaatatctcattgcttcttgttgaggtgtcaagtaggatctttattttagtgggtaatgggcggagtttgagcttttggaaggataagtggtgtggtgattctcctttgtgcttgtccttgtcgtctttgtttgctttagctgactcaaaggatgtgtgggtggaggatatttgggacttctcagcagaaggggggagagggggaatggaatccttgcttctctagaccccttaaatgattgggaggtggatgttgtggggagctttttggtgtggttgcatgagaagagagtgtgtggggatgtggaagacatggtgctttggactgaaaaatagtggccagttttttgttaaatctctctacaacaccatagagctgggcaattctgttttttttccctttaagaagcatttggaactcatgggtgtagcctaaggttagcttttttgcctgggagacaacttagggtaaaactttaaccttggatgtagttcaaaaaagagagtggaacctagcaaatagatgttttatgtgccatgagaatgaagagaccatagatctcctccttactcacagtgttaaaacaagggttcttgggtgcttccttcgtcggttagatagactctactgggttggcatgattcttttgtgggcaaaaagagtaagaaggtttggaggacaactcccttacacatcttttggatggtgtggaaggcaaggaatataatagccttcaatgatgacatactttcgatccaaagactaaaaagttattttgtttactctctttggtcacagataaagttgtttatagatgattatcctttgactttagttagttttgttgataggttgggctcttgttgaggttgttttaacgccttttgtttggttgttcattatcctctttatgccattttggtggtagttgcataggtattgtataccttgagtcgctcttttggcgcctcttcttaatatatcttttgatttatctatcaaaaaaattatggtgtttgtgtttatatatagtcggttttgtcacttcatatatctatcacattctaagagtgtgtgagagagaggcaacattttgagagagagagagagagagaggaatgatgtgattatgttgaggggaaggacgtgttagtttggagtggattcttttgagtagaagaggtctaaggcaagctgataggaagggttttggaaagagacgataagatttaaagagctaagcttacttcatcatttgaaaggagtggagttgtactgttaggatgaagtggggaagcctttttgtaaggcatggatggaaggttggagcatttataggatggagtaccacagtaacaaggcaagaaagttcatcctttgttcggtgctctccgtggagtcaaagaagctattatggatcaagttatacatagatgaaaactctatgccttaaattgattttgtagattggttgggttcttgttgagggaatgaatagttttttgcattctcctttttttggctttgctttttggcacccaatactttagtgcactatttcttttgacattttttaatatatattcttactttatttgcctataaaaaaaagatttaaaggtggtaacaagaataaaattatagtggaggggaaaagagtaaaataaaagataggaaaaaaaaagataaagaaagtaaatataaaaccttactaagaccttctaggagtcttacatataagaaaaataatggaatctcacagttgaaaattgcaaggtatgcaaaaaaattaatatatatatatatatatttttttttgattggaaacgccacaaagaaaaaattaatattattcatcatcaatcccattttacagcaattaaccttatttattataagctttgaaaaatcctaaaggctgaatgaaattgttgaatataatgaatttatagtgtacaatctttccttttttaatataggtcacatgtatggtagttaggactcctagccttgtatatatatattttcttaattgtaagtagacacaatgaatgagaatcaaggttttcttctctctctctcttaacatggtatcagagccgagggagaaaacctaattctttctagtttccccgtgtcatcaattccgggaaaccttcctgtgaccgtgtttcattccggtcaccttccccagaccctaaagctttccggtcggtcgaatcgtcatcaaaaaacgctttctagttggtcgaatcgtcatcggaaaacattcaccgcgggcgacttttttggcgaacttttccggcgacatctttttcccacaccgcaaggagcgcctggagatctccaatttttcccaaagcaccagagccagaaaaccacccatgcgccgtccacgcgcgtttttccggccggcgactgcatcttacgcgccggcgcatgagggcgcgtgagccactttctggcgatgcgcttcctcttccagcctcgcctgacgtcgactagccacccttcatacctgtttctgccatccaagccctgcacgtgcctcttttggggttcttttgcctccgtcgaccctccgaacagtttttccggcgtccttcggctattttttctcaaccccaattcctgcacatgccttgggaagtgttcttctacctttccggtggtgtcacggttgttttttcttttccatttggtctctcacacgggcgattcttcggtttttccttcttcagccgcatttgaagtcgtattagggctctcttcgatccaaatatacttcattctccagataaatggatatggctactaaaacttccatattttcctctgtcatatctggatctcctatgattacttccgagaaattggttggcagtgaaaattatctttcttggtttgcctctgttgaactttggtttatgggacaaggatatgaggatcacttggttacataggagacagatatccctgaggttgagcacgtacagtggaaaaagataggtgcctagttatgtagtgtattatggcaatccgttgatcccaagatccttcttcatctttgggcctacaaaacttgttttaaattttggactcaggccaaagggttatacacgaatgatatccaacgtctttataaggtggcttctgctattatccatatcagccaataggacttgaatctatctacttatattggccagattgcctctcttaaggaggagttcttgactgtgatgcctcttactcctgatgttggggttcaataaacacaacttgataagttcttcatggtccttactcttattggccttcgtccgaatcttgagcctgtctgcgatcaaattcttggtagttcatcagttccgtccttggatgatgtgtttgctcgcctccttcgtatctcgtccactcagactttgccatctgataacatttcagattcttttgtgttagtttctcacactacctctcaaggaggacgcagtggtaactgaggtagaggccaacgtcctcattgcacctattgcaataaacttggccacactcgcgatcgttgctatcagttacatggacggcctcctcgcactgcccatgtggccgagtcctttgattctcaactgcctcagccttcgagctcctccgcatctcaggcttctgttgcctctgttgcccagcctggtaatgcttctgcctgccttacccacacatcttctcttggaccctggattctagattctgaagcttctgatcacctatctggtaataaggatcttttctcctctattactactacctctgatttacctactgttaccttagctaatggttctcaaactgtagctaaaggtattggtttgacccttcctctgccttctctacctctcacttctgtcctttatactcctgaatgtccttttaatcttatttccatcaacaaaatcactcgtgcttttaattgctctattacattttctgataaatttgtgaccttgcaggaccggagtacggggaagacgattggcataggacgtgagtctcaaggcctctatcacctcacctcggattcatctcctacagtttgcatttccactgatgctcctctcctcattcacagtcgtttgagccaccctaatctctccaagttccagaagatggtccctcgtttttccactttgtcatcgctttcgtgtgagtcatgttagcttgggaaacatactcgtgtctcgttcccaaaacgtttgaataatcgggcaaagtctccttttgagcttgtccacactgatgtttggggtccttgtcggactgcgtctactttaggatttcagtgttttgtcactttcattgatgactattctcgatgtacttggttatttttaatgaaaaatcgagctgagttattctctattttccagaaattttatactgaaatccagaccagttcaatatttctattcgtgtgttacgcaatgataatgccagggaatatttttcagctccatttacttcatttatgtctcataatgggattcttcatcagtcttcttgtgctcatactcctcaacaaaatggggtagctgaacgcaagaatcgacatcttgttgagacagcttgactatcctcctccatagtaatgttccttttcatttttggggggacgctgttcttaccgcttgttatttaattaatcgtatgccctcctctgttttacatgattagattcctcatttcctcctcttccctgaccaaccactttatttccttcctcctcgtgtctttggttgtacttgttttgttcatattctcactcctggacaggacaagctttccgccaaagccatgaagtgtctcttcttgggatattccagacttcaaaagggttatcgctattattcccttgagactcatcgatactttatctccgctgatgtcactttctttgaggactcaccattcttttccaccacttctgagtctcttcctgtttctgaagtcttgcctcttcccattgtctccccatctgatgttgtgccttctcgaccacttcaggtttatcatcgtcaccctcgtgtcgctgctcctctcccttttgctgaggcacctgctgactcacttcctatcccttcggcttctccttccccggctctgccttctcctgatgatttacccattgctattcggaaaggtactcgctctactcgtaatcctcatcctatttacaattttttgaattatcatcgattatcttcaccctattctgcttttgtttctgctatatcctctgtttctcttccaaagagcacccatgaagctctttcccatctaggctggcgacaggcaatggtggatgaaatggatgctctgcactttaatggcacttgggatcttgttgttttaccttctggtaaatctacagttggctgtcgttgggtctatgcagttaaggttggtcctgatggtcaggttgatcgccttaaggcccgcttagttgctaaaggctatactcaggtttatggttctgattatggtgacacattctcccctgttgccaagattgcttctgtccgcttgcttctctccatggctgctatgtgttcttggcctctttattaattggatattaaaaatgccttccttcatggtgatcttgctgaggaagtttatatggagcaacctcctggttttgttgctcagggggagtttggtttagtgtgcaggttacgccgttctctatatggcttgaaacaatttcctcgagcatggtttgaccgttttagttctgttgttcaagagtttgacatgcttcgtagtacaacagaccattcggttttctatcatcataactccttggggcagtgtatttatctggttgtttatgtggatgacatcgtcattacaggcagtgatcaggatggtattcagaaactaaagcaacatctttttacccactttcagaccaaagacttggggaaactcaagtatttcttgggaattgagatagctcaatccagttcctgtgtggtcctttcccaaaggaagtatgctttagacatcctggaagaaactggtatgttagactgtaaaccgatagacacacctatggatccgaatgttaaacttgtaccaggacaggggagcctttaggagaccttgggagatatcgacggctcgtaggtaaattgaactatctcaccattactcgttcaaccatttcttttcctgtgagtgttgttagtcaattcctacaatcatcatgtgatagccattgggatgccgtaatccgcatttttcgatatatcaaaagtacaccagaccaaggtgtgttgtacgagaacagaggtcatactcaggttgttggttacacagatacagattgggttggctcacccacagatagacgttccacttcagggtactgtgtttttattggaggtaatttaatatcttggaagagtaagaaacaagatgtagtggctagatctagtgctgaagctgagtatcgagctatggctttggcaacatgtgaactcatatgattgagacatcttcttcgagagttgagatttggaaaggatgaacagatgaaactcatctgtgataaccaggccgcattacatattgcatccaatccagtcttttatgaaaggaccaaacatattgaagttgactgtcacttcattagagagaagatcgcatcaggatgtgttgctacaagttttgttaattcaaatgatcaactagcagacatcttcactaaatctctcaaaggtcctaggattaaatacatttgtaataagcttggtgcatatgacgtatatactccagcttgagggggagtgttgaatataatgaatttatagtgtacaatatttcttttttaatataggtcacatgtatggtagttaggactcctagccttgtatatatatattttcttaattgtaagtagacacaatgaatgagaatcaaggttttcttctctctctctcttaacagaaatcatgaaatattttctatgagaaatatttctctcttagggaaatggctttggaggttccctagagaaaggagtggtctttggcataaggttattgcaagtatatatgggacacatcctaatggatgggtcgccaacacggtggttagatggtcacacagatgtccttggaaggttattgctcaagttttccaggagttttccccttttgtccgcctagtggtgggcaatggggagaaaatttggttctgggaagatctttggtggggtaaccaaattttgtgctctcaatttgttgatctttacagagttatttctgtgaaaaacctcattgtctcaaatgtccttggcaattccttaccactgtcttggaattttaacttttgccgcaatctaacggattcaaaaattgatctccttcagagattaatgtcctcccttaattctgtgcttttctctcatttttcatcagattcaagagtgtggtttttgtcttcgtcaggtttgttttcagtgaaatttattttcttggccttgtcaaaagtctcaaatccttccggccaagtttttatggagctcaaaagtcccttcaaaggttaaggccctcgcttggttagtagcacatgggaaggtaaacactaatgacaagttgcaattgagaagaccctataaagccctctatcctcaatggtgcattctttgcaaaggaaatggagagtcgattgactacctttttcttcattgtctcgttaccattggactttggcacaggttgttcaatctagtagggttggtttgggtccctccaaggagccttgaggacatgttggttattacttttaaagacttggggaactcattaagaggcaagacactttggcaaattgcttgccttactttgatttggatggtgtggcaagagagaaacaataggatctttgaggataaagggagaacggaagagatggtatgagatttgatccggttttattcttctgtatgggcttcttgtactgaagcttttagaggaggtcctctaaacattctacaactcaattggattggggtttgcgtttcaaaagtttgaagattgatggggtttccctttgtttttagagttttattgttgggagttttatcctttgttcaatttgtgtaggaaggacctctcatccttcccttggtttttttctctttctcttgtctcttttatctctcctgtatttgttcttatattaatataatcttcttcgtttctgataaaaaaaaaaaaaaaatcatgaaatatgaacctaacctatgtagtaccatattagatcctcttattcctttcctaaaactattaaattttgtaaaaaaaaattaaaagaaaatacaaacttctttttcaaacaacaagaattcactaaaatagaggtatcatccctactatttcatagggatttggatgcttcttcatatttagatttaagcttctcaacaggttccttggaagctatgttggaacttttaactccatgaatgatcatattgcatagtcttcattagaaagcaacacaagtttggaagatgttagtatgcgattaatcctcttcttcattgcctttgaagcttggcttaagtagtaaagggttggagagagtttgtgggaggttccaagtctaagttccactggggacaaaaatttgcctatgaaaaaaattaatcctcttcttcatttgtctttggtatggttaccaatgactgcattaaaaaaatttaaccttcaatcatggttttataacttgttacactccttaagtggtatacaccttcaaatcaagcactttcgctttgataccaaaattgatataagacaaccctagaatcgttgtctacaatcatacagggtgggctggaatttcaattgtttaggatttaaggaggggaatgagattaaaattattgcagtgggaaaaaggtaaagtaaaagataggaaaagaaaagataaggaagaagatatgaaaccttagaatcttgctaaggtcttctaagagctccacttggaaaaaaagtaatggaatctcattattaaaaatcgcaaggtatgcaaaaaacacttgatataattcatccctaatcccgttctacaggaattaggcttatttataggctttgaaaaaccataaaaattgaataaaatcatgaaaacattatctaacctttgtagtaacttgtttggactcttattcatttcctaaaactattaaatcttttttaaaaattaaaagaaaacaaaaatttccattttagaattaaaaacttaactttatagaatcttcttgtaataagagtttctaataaagaagacttctatgttttaaggacttacatagaaactttagaaaacatacttttttttttcaaatataaaaactttttttaagaagaaatttccaatatatatatgttttttcttttttcaaattctaaatgcaacttaactcaaataaccactactaactaattatgagtctatgacattagagaacctaaaaactggaaaatttcctaaacatccttggtagagtaatttaacattatttatttcctttcattcctttcattcctttcttaaatagatgttgtagattcattcccatccacatgttaggaaacaatagttttgctttgatatggtaaagcatataggttcaaaggaaacatcatgataaaagaggtgtgtcatttgtggcatgtataatttgttgttgagctttatttccaggttatgcaattgctagttgagaaacccagaaatcaatcaaatttatatgctgcttgtgcataattcaattatatacatatctatatattctagtacccttgtatttttcaggatttttctgtgtcagtgtatttgtttcatgtctgtgtcccatgtactgtgaccgtgtgtgctatatacatggttttgagaatgtgtataatttgaactaagtatccacagagacatattggctatatttggctgattactcttccttctgtttctttggaattgaaagttgtatttcttattggcatgtgttttgaagcatcgagaacactggatggtgatatttttatgatgctttagattagggttccagaagatcagagtgg

SEQ ID NO: 12736 - DNA, 1194 bp, Vitis vinifera
  Intron number 14 from transcript GSVIVT01032568001 (locus GSVIVG01032568001) derived from phytozome v7.0 (chr-ID chr 14; pos 28453558 to 28454751)
gattcatttcctgatattgtggatgcggatccagattctgattcagaatgaagtgatagttctagtaatatacttagagcatgatatgacatgaaaaggacttaaagatgttatggagcttcccattatttaatgtagttctcaaatcacaactgagctgtggctcaatagaatgactgagaatagaggttggtagttgaaatccaccaaggtagaatggaacttatttatatgatgaagttgtaaaaaaactgaagtttttagcctatttcttgattggttatgagaaagggtagtttctttctgtttatcttatatactcaatgcagtctttaagctgaaaacgggtgcaaagacagggttttctgagatttccattactcaaaaggctaaccatgataccttcttagctggcctagattatttttgaccatgtagaaataaagctctactgatattgactacacggcaattacatgttatcatgtaagacccctgtgataccgcaacccttcttattcttcaagactccatggcatattcttcttttttcctagatttattgatgtaaattataggtggtcggacttggtcttccgcagaataataaacagaacaaaggaagatgagggaaagaaaatggttgattgacaagtgggaaaaatgggtggatggtcaaaacaagatatgtataagaactttacaacacgtatgagaaaggaaaattataaatgcatccacttaagcttgttttacatccaccttatttacacatcaacctgaaaatggaaaacttattattacatcctcataatttaaaaaatacccaaaacatttttctcattattctctctctaaactcatcttcttccacctttttctgtgaatttgtttcttccaacccacaaactctatttacaattcattttgcttgaattttatttgatgttataaaactattgtaggtatgtccataacttatttatttatttatttttacattttgtttcaatccatataacacaaaacatgaaaatcttttaaggtttatttatatataatttttgacaaaaagcttgtagaaatagttgaaaaacaattaagaagaatatggatgtgatttaaaagtaagaaattatgaaaaattgcaatttcaaaggaggaaaaaaatttggaacccttggtgttcgaagt

SEQ ID NO: 12737 - DNA, 15936 bp, Vitis vinifera
  Intron number 1 from transcript GSVIVT01029232001 (locus G SVIVG01029232001) derived from phytozome v7.0 (chr-ID chr1 1; pos 18232579 to 18248514 reverse strand)
ggtgtgatcttccgaggtacgaaaatgctgggctcccatgatttcatcgttatacataattcttggaattgtttgtggtggtgtttagttttttctattgagtattaaattactagtcttgttatggttgagtattgtctttgtttatttaatatgatggctctgatgggatcactgagtagacttttgcatcatgacagccattagacttcccatgctgggatatgtttcttaagaattttgaaattctttgacatgatgtcacaaaatgtgattggcagatgatttaaattccagtcagtgtttgcgttgggtattttgataaggttgcatttataacttcagtcaagtgtcgttgccagtacagataagcatctttgttaattttgggtttttcttttttaaatttttttataggtaaacaaagtgaagtgtaatataaatagagctccaaaaggagtacacccaagtacacaatacgcagggtatacacgactactgcagaaggcataagcaaaaggaaagagggaccacacaaactctaaagaaaatcgcttttctttcttcgattagaaagctactcgttttcaaaaactcttctattcttttccttctaaattcttcaaaatgtacaaaggagctgcttgcctcgtcatttttctttttttactaattaaagagtcatgacatcaaaagagggtctctctaactgaggaagataacacacatgtcaaaaagaaaaaacaactactataaaatccttattgtgtcataataaaggaggatgtgataaaaagattcttccttgatatgataaaggaaacatttgtttgccaatgatcaccttctcctttgaagttgttccaaagttaataatttttcccatatcacatcccaaacaaagaagcttgccttgtgtggaatcaaggaattccaaagaacacccattaggaaaggaactaaacttcccagttctaggacaaagcaaaggagtttgatggaaaatgctctactcttaaatcatcctatcttcatcatccttattcatctccatcccttgcggtcttgaagagaatggctccacgttttcgatctcccaattgttcaaatgtctagagcagtaagtattccaaaaacccctttcatttgaccaatcctataaatctgttacccacacttatacaactatggcaaataaagaagggaaagatactcataaatgctcatctcgacaacaattatccttccaaaactttagcccccctcccattgctcattgaagaggggactctacaactaaaagctcctaatcattcttgatggcgttccataacccaacctcatacccatctctcacttcacaagaacgccaccccccttcatcttcccaatatttttcaagtggaagagagacacctaacccctaagtgccccttcctcttatttgaacaaacagttacgtgtttttactaaatgcagttttctctctagagccttgccttccaaaaggaaatccttttgaatctactccaacctcaatctgactatccttgccacgcaaaaaaggaaaaagtagacaaaagatagatagacaaactagataaagtgctctatgttaaagcgagtcttcccttcttgaagatatattatcttttctacaatgccaatcttttatgagtttctcttccaccccatcccaagctgccattgatttaaaaggggctctcaatggagcacctaaggaagtggatgaaagatctcccactttttgagaagccttacaaaaaactaaagtatcatcaataaataacaaacgaaataattccaccccttctccacctttgcccatcaccctaaaccctaacaaaaaaccaccctccctagcttttttaagaaggcaactgaatggttccatgttaactcaaacaaatagtgcaagagaggtgccattaattaggatagagagcctatttaattcatcttattcacttttgaccaaaacccatcttatccaagaccaaatgcaagaagtcccaattagcatggttgtaagttatctcaacataagtcaatagtctcattagctataatcattacatccagaatttgttttccctccatgaagacaatttggaacttggaaaccactttaattaccatcttctttagtcaattggccaacacttggtctaaaattttataaaagccacccatctaaaaacaaaaaatgttgcattgaggcttttaacaaatctaccctgttcatggaagtctctaaaatgcttatcatctttttcttcacaaagtcccaattgaactgctggaacatcatagagaaactatttgggcttggaattttgtccccatataggtccgaaaaggcattgaacaattcttcctccaaaaacgacacctccaattttgttgcttctttcacatctaaaatgtcaaacttcatatcaatgattctaggtctccataggagattctaaaaagctcaatccaccacttcctttatctcattctgttttgttaatcaaatccctttaattttaatatgggccaaaaagttccttcttttgttctcattaaccattttgtgaaagaacttagtatttttattacctttctttaaccataactcccttaagtttggattaacatgcataatcttcaatggtgccatttttttcttatcaacaatggcatatgcaagatatgaatgttatttttcccaaccaatttgggcctatggactacacaaaaagggtagccctcaaagacttgattaagaagggtgtagattccaggtccatgggacgatcatagagggattttaccactttaactagttagaaccttcagaaaatgttgtttctttaatagctttgttaatcctatatattcaaattttaaatgttagaaaattctatacctcatccttgaaaatactgctcctatattgatgtggtattagtaatttaagagcagtgtgttcatattaccaatgccttttgttactatgttggagattgactattattatttctctccttctattgaaaaagaagagtgaaaattgaaaattgtttcatgtttgatcaaaagttaaattgtttcatgcttgatcaaaagttaagtgttttggtttttttagttggaggatttcaatcatgtgggacaagttgtccactttgaagggagaatggaatcaagtgagaagtgaggggtttggagcgaatgttagttgtctcatataaaaagttcacacatgggagaatgtgatatccaaaggaaacttgagaatcaaaaagaataagagcctatttgggtacattttcaaaaaaattctcaaataacagtttttgataacaattcttgaaaacaatgttcaatcattttctaaaaaaaaaaattctatttgggaacttaaatatgaaaaacagttttctcgacttattatctatgaaagtactataccctaataaacaatgtaaaagttgttgtcaattgttgcttaatacactgtaaaaaaaacaactgaaaacacctcaaatttgttttaagaaataacctgttttcaaaacaaattcccaaagaactgttttctattagaagtttgtcaaatgtgttttttgagttacatcacagttttctgttcaaaagaatagaaaactgttttctagaatagtttccaaacaaggcctaagcttcaatgcttttttctcatgtgttgcaaaaatgaagcctctcgtggtgctcttgaaaaataattcccattaattagcatatcacaatgtaagagtttttttttttttttatggggagatgtgtttgatatacatagtcttctattcctctcattctagatgaaatgcattcaatatgtgtcaaccttatcttggtgaatctccaaatccagtagccaaaccaaaatcttcaaacaagttcaaatatacttggtggtggggctgttattatgagattattctgccttacgttattattttgagatgattgcaatgttgtagagatatgagagagagcgagggtgaacatgcaagcgaaggcgaggaaggggaaagccgggcggagaatcgtgggaagaggaagggaagtagattcgtggtggaatcaaaggtgttcgaagtagaagttgaggagagaaatggtaagagccatgtcattatctcggaaagcaagggagggttagtgtcttgggtccgtctggggccggcgagtgtggggctgctcatagaagggttgattcaatgcatgagggatgggaaagaaggaagatgggagaagggctggaaagaaaaagggaggaactattccctggtgagagaggccaacagggccgggagcttcatccgtctaggggtgacggacttggagaagaggagatttggtatctgtataccaaaagggaaaggggaaaagggaggatgggtttctatggtggagtccttacggagggtaggattttggctcgaggaaaaggaaatagatcaaggagtaagggatttaggtaggtcgtatgtggaagtggtcaagggctcagagcttagggatactacaagggtcagagtggagacaaagaagaaggaaataaggaacaacgtgagcagattgaagcaatgtctgataggtaaatggaaccctaaatcagcatgagaagaggacctagcgagattggggtggtcagtggcaagagcatggggattgaaaggtaaattaggcttggctagattgggtaagggttgtgcccttttggaattcgagacggtggaagaagccaagagggttctagcctcgggggtgagatcagtgggagggacctaactgggattggagatgtggagcccgaggtttggatgttcttcagagggtgaagataggaaagaagcttgggtgaggatcttgagtcttccaatctcgctgtgggtgccgtcgattctgaggagagtgggggaagagtgcggcaggttcttaggcatcgatcctctaacggaaaggaaggaggacttggaatgggcaaggatccaggtaaagctgaatggaggggtcttgccgagttcgatggagatcggggtggagggggaggtatatgccgtgtctttgtggtgggagattccgccggcaataaggaaaaaatagggggatggccgagatggctttgggcggcagagaggggaggtcaggggtggtggtgactcacgtgcgggatggcgtgtgggagaaaagccgggcgctggacccaaggaacaacgtcgatcagaggacgtgacgggagagcaggtgggagggggggagggtgggggcgagtttgaaaactgggcccatctcgggcgggtgacccggcagagttttagcttcgcgggcaatgggtcaagttcgtctggatcgggttttggcctcgtgggcctgaagcgggactctgggccaactacgcaaggcccgcctctttctaagggggctgaattggctgcaactgggatagagcgtgggccggctgagggacgggccttcgaagggctggagctcctatctcatgggcctactattatggttgggggctgtctaggccactcgtaggccaaaatcattggcacaggcactgaagatgatctgggccttaagctggaaatggaattcatcaagtgtcgtgagaaggaggttagtgggaagcagctgccggctctccagtgctcaatggcagagagggtgatcgtggatgaagccttaaggtatgggtctttttcaaacctaagggttggggaatcctctttctcttcttctactctttttggtcggactccggagagggagttttgcgaccactctggggaaataagggcgagcctccagaaagaaaacaagatggagctcgcagctatagggggggctacagcgagtagagagggctgctgggacctgattgagatcaattgtgatgctttagaggttcaaaacccagaatggactccagttctgactaggtcccaggttctaaggagcgagaaggagactaattgggaggaaagtagtttggctaagtttagcaagcttttgggattttcaatagaaggcctggagagggagatactggactttttgtccaaaattagaaaaagacgggaaaggatacataacaaagggttattggagaaatcaaaatttgagagggagctcaaaaggttggaatgttcagtcaaatataaggggaaggacaagaagaacagtcatctaaaaagtagagggggccaattattgtttgtttaatgaatcttaaactcttgagttggaatgtgaggggtgcaaatgacgttaataaaagaaggattattaagtctgtggttagaaaacagaaggtggacttgttttgtatctaggagacaaaaatacagttaatgattgatggggtggtgaaaagtttaagggtggggagattcttagattggagaactcttgaagctgctggagcagctggaggtgtgctgatttgttgggacaaaaggtccttggaaatgctggagtgggaggagggccaattctcaatttcctgtaaattcagaactgtggaaaatgtggtagtttggggtgttcacgggtgtttatggccctttcaccaaagaggatagggagtgtctttgggatgaatttggagcaattagaggtctttggggtgaaccatggtgtgtagggggagactttaatgttattctctctcaaggggaaagaagcaagcaagggagggttacctcagctatgaggaggtttgatcaggttatggatgaccttgagctatttggccttccccttcaagggggctctttcacgtggagtggggggcttcataatcaagcttgggccaggctggatagatttatggtttctcccagctggcttgatcagttcagcaatgtgactcagaagagattatctcggcctatatcggatcattttccaattataatcgaggggggtgacaaaagaagaggccctttacctttcaggttcgagaacatgtggctgaaagtggaagggtttaaagaccttatgcggagttggtggtaggggatgtcagtcagtggtagggctagctataagctggctacaaaactgaaggcgattaaacagaacttaaaagtttggaacagggaggtgtttggaacaggaagaggtacaatggagacaaaaatttagggttaagtggattaaagaaggggattgcaactctaagttttttcacagagtggccactggaagaagaagcaggaagttcataaagtctctgatttttgagaggggggagactttaaataacattgagattatttctaaggagattgtaaatttctttgggaatctctattccaaacccgaaggtgactcttggaagattgaaggaattgattggcccctatttctgaagagagtgcaatttggttggatagaccgttttctgaagaggaggttcgaatggcagttttccaattgaataaggaaaagtcccctggccctgatggctttactatagcagtttatcaaaagtgttgggatgtgataaaagaggatcttatgagggtgttttttgagttccacactaagggggtaataaatcaaagtacaaatgcgacattcattgctatggtgcctaagaaaagccaaacttttaaaatctcagattatagaattattagtttggttacaagtttatataagataattgctaaggtcttatcgggcgtttacgtaaagttctacatgaaacaatctttggctctcaaggagcctttgtggaggaaattttggatgctgtattggtagccaatgaagtggtggatgagaaaagaaggtcaggggaggaaggggtagtcttcaaaattgattttgagaaggcctatgatcatgtggattgaggctttttagatcatgtgcttcaaaggaaggggttcagccagaaatggagatcttggatgaggtgctgtttatcttcttctagttttgctatcctagttaatgggaatgcaaagggttgggttaaggcctctagaggtttgagacagggagatcctctttctcctttcctttttactctagtagcagatgttataagtaggttgatgattagagctgaggaaactgggataactgagggtttccttgtggggagggataggactagagtgtccttgttacagtttgctgatgataccatatttttctctaaagcctctttggacctttttcaaaaccttaagattatccttttggtttttgggcaagtatctggtttaaaaatcaacttagaaaaaagcaccatttcaggtattaacactaggcaggaggtgttgtctaatttggctttggttttggagtgcagagtgtcagagtggcctttgtcttatttaggtcttcctttgggagggaacccaaagacaataagcttttgggatccagtggttgagagaatttcgaggaggctggatgggtggaaaaaggcctatatgtctttgggagggaggattactttaattcagtcttgtctgtctcacatccctagctacttcatctccctctttaaaatccctgtatctatagcttcaaagattgagaagatgcaaagggattttctttggtctggggccggggaagggaagaaagatcacctaatcagatgggaggttgttagtagaccaaaggagatgggaggtttgggctttgggaagacttctatgagaaatattgccctcttagggaaatggctttggaggttccttagagaaaggagcggtctttggcataaggttattgcgagtatatatgggacacatcctaatggatgagacgccaacatggtggttagatggtctcacagatgtccttggaaggctattgctcaagttttccaggagttctccccttttgtccgcctaatggtgggcaatggggagagaattcggttttgggaagatctttggtggggaaaccaaactttgtattctcaatttgctgatctctacagagttatttctgtgaaaaacctcactgtctcaaatgtccttggcaattccttaccattgtcttggaattttaactttcgccacaatctaacggattcagaaattgatctccttcagagattaatgtcctcccttaattctgtgcttctttccccttcttcatcagactcaagagcgtggtctttgtcttcgtcaagctcgttttcagtgaaatcttttttctatgccttgtcaaaagtttcaaatcctttaatgttccttccggccaagtttttatggagctcaaaagtcccttcaaaggttaaggccctcgcttggttagtagcacatggaaaggtaaacactaatgacaagttgcaattgagaagaccctacaaagccctctgtcctcaatggtgcattctttgcaaaggaaatggagagtcgattgaccacctttttcttcattgtcccgttaccattggactttggcacaggttgttcaatctagtaggtgtgatttgggtccctccaaggagccttgaggacatgttggttatttcttttaaaggcttggggaactcattaaaaggcaagacactttggcaaattgcttgccttactttgatttggatggtgtggcaagaaagaaacaataggatctttgaggataaagggagaacggaagagatggtttgggatttgatccggtattattcttctctatgggcttcttgtactgaagcttttagaggagttcctctaagcattctacaactcaattggattggggtttgtgtttcaagagtttgaagattgatggggtttcttttgtttttagagttctattgttgggtgtttttccttggtatttgtgtaggaaggacctctcatccttcccttggtttttttctccttcttttgtctcttttttctctcctatatttgttcttttattaatataatcttcttcgtttctgatcaaaaaaataaataaataaataaaataaattggctgccttacaacaagtggactattgggaccaagtggaaagtgagagaagtctgacagaggaggaaaaaaaagaagcagaagaaggttatgctaagtgggttaagctggaggagatacactggagacagctctcaagggagctgtggctaagagaaggggataaaaatacggggtattttcatcgaatggcaaacgcgcaccgaagaaggcataccatggaaagaataaaaatcagtggggtctggctgtcagaggagcaagaagtaaggaccggaatagtagacacctttcaacggttattaacggaagactcggagtggaaggcagatataggggggttaaatttgaattagattagccaacaagagccggacatcttggagctgcccttcatggaagaggaggtccattcggccctaatggacatgaatggggacaaggctccaggtccggatggctttacgggggccttttggcaattctactgggagtttgtgaaggaggaggttttggagatgttcaaggaattccatgagcataatgcttttctcaagagcctcaataccacgtttttggttcttatcccaaaaaaaggaggagcagaggagctggggacttcaggccgatcagtctcttgggcgggctgtataaaattttggctaaggtgctggccaataggattaaaaacgtgattggtaaagtggtctcttcaaatcaaaacgcatttgtcatgggtaggcagattttggatgcgtctctaatcgcaaatgaggtgattgactcatggaaaaaagaaggagagaaaggtctgatctgcaattagatattgaaaaggcgtacaacagtgttaattggcagttcttgatgagagttatgcaaaaaatgggatttggggctaagtggagggagtggatatggagctgcatctcgactgctaaattctcagtgttagtaaatggggagccagctgggttcttctctagctctatagggcttcggcaaggcgaccctctgtccccatatttgtttatcatgggaatggaggtgctgagtgccctaatttggagggctgtggaagggggctgcatctccgagtgtagaatccagaggggtagagggcaggctgttattatttcccaccttctctttgcggacgatgccatagttttctgtgaggctaagaaagatgacatgacatttttgagctggatcttatgttggtttgaagtcgcttcagggctgaggattaatctggctaaaagcgaaattattccagtaggggaggtggatgagatccttgagatggctgtggagttgggatgcaaggtaggtcagctaccatcaacttacctgaggctgcctctgggtgcgcccaataaagccgtttgcgtgtgggatggggtggaagaaaggatgaggtggaaattagccctttggaagcggcaatacatctccaagggtggtagaatcaccctcataaagagtactttggctagcatgccattatatcaactgtccctctttcgtatgcctagggtagtggcaagaagactagaaaagttgcaaagagatttcttgtgggaagggggaagtacggaaagaaaagcacacctagtcaattgggagagggtgtgtgtgggtaaggagaagggggggcttggtttgaggaagttagtccatttgaacaaagccctacttgggtgtggagatttgctcgtgccaaggaggagatgtggaaatgtgtttttgtggcaaaatatgggcaagaggaatttgggtggaggactaaaaaggcaaatggggcgtttggtgttggggtttggaaggagatactgaaagaaactgattggtgttgggacaatatgacttttaaggtaggaaaaggcaccaaaatcaggttttggaaggacccttggtgtggggatgtggagctggcccggaggttccctcaactcttcaatgtggctgcccaaaggagtgccactgtgggggatttatgggactagaattctggccaaggaggttggaacctaaggtttattagaggcttcaatgattgggagctgaactcggtagacgaattgcttcaaatcctaaggagtcaaaaaattaccttggaggaggacttgaccttatggaagggaggaaaaaatgggaagtttgatgttaaggaagcatatgggctgatgatcagccatagtacccctttgtttcccaaaaagggcatttgggtggagaacgttccttccaagctagcgttttttgtgtgggaagctacttgggggggttcttactcttgataggcttcaaaagagaggatggcagtttcctaatcggtgttatttatgtggtagtgatgaggaaaacgttaatcatcttcttattcattgtacagtggctagtgtgttgtgggggattgttcttagtctgtttggagcccagtgggtctttccagaaactgtaaaggaggcggttatcagctggaagggttcttttgtgggtaaaaagaggaagaaaatttggagatccataccgttatttattttctggacggtttggaagaagaggaatagattagcattcaggggggggggggagttagctatacagaaagttaagaattcttttgtttgtaatatgtgggggtgggcaaaattgtataatggtgcggagcctcgttcccttataggtttcctggagtggatagcctccagttaagggttggtgggtttttgtttttttggcttttttgttgtgaggccttcatcgcctcgtatactccctgtatgctatgcggcgcgttgccttttgctaatatatgtgtttacttatcgaaaaaaaatacttggtggtgggagggccaaaaccactgaggtagtccaagctcatattgctcctctgaccttgctcttgggcatgcatacattagggtgctatcttggtggcatctctgagaaacattgacactaaccttggtcatggaggtgaggtacttccatccttggacctaaaggtgccatctccacccagagatgaagttggagaaccttattggcagactccacaggtgagtaccaacatatagtaagcatttgaagtgcttaggtatccatgcccccatatttcaatacttgggcaggaagaggcatggtgattgatacatgatgttctcattcagagatagaggacattcagtgcctgtgatagtggacatctgcttagtttatgtggcattggatcaaaggactgctggagctttttatttgtttaggttatttgatgtttatgtaccacaaactagacatgtagcatacagtgattgaaccatgtggagtatgccaaaataagatactaacattatgtttggaaactctttcttagtcaactgcaaggtattaatctctgttgtgcacttattgaatgtcttctttcctcctcatgtatcctccaacaattctcattattgctctttatctaggacagatgccgtctattgtgataaattttctagattcatgcatttggatgagaatacatggtttatcagctacatggggttttacctatgcctctaggcttctcaaaccttgcaaaagcttcttatgtcttatgccttatgccttacctttacctttaactcttatgtgagctcattgagctgtcttacctctttcccttagcttctgtcaagcaatgcttaggcctctcacctctttcgtttaccgctttctactctcttccaatcctcatgctttgcaggttccttttgtctcatccctttagcatatttggagctttgttgagacctcttccctctttcaaacttctcttcagctcatcctaagtcccttcttctttttagcttttctcaaactcagctggggccttttacctctgcttgtttaattcttttcttttggagctcaaaagaaatcaagacctagcccagacagttctcttgtgcaagggtccaacctttttccatacaacttctcagtttcctgggcccccacagctctctctaagcttttgagcatctgagcttttacctacagcttcctatgagtctcaagggttcaatctcttcccctacagtttttttaagcttctaaggggctagctcttcctctgcagctgtttttgagcatccaagggtcccatatcttgccgtacagtttcatatgagttttcagtggtccaacctcttcctctactgttctcttttaactttggaggtctcacatcttcccttacagcttagtttgaccttttgggtgtctataacctcttcccatgcagctctctatgagtttctaagggtctactctcttccctgacaactctctctaagcttacaggtctaacctcttcttctattgcactttctgagcttcctctaagattcttttgctacagctctctctgagcttcttagggtctcactttatccttacatctctacaagcttccgagtgtattgctgcttcccacaactctttgacattctggggatttaacatcatcccttcagctcttcctgaggtttctcattcttctctcctccctgtcaatgaggttttaattgatgataattctattcaaatttgaatattcaataagccactgctgcatttataaccacattcagaaaatgttatctacattcctaatgagtgaatattagaatataaatatgagagggaatacagacattttgaacatccataatgtcggaaagttccatttgattacttgaatagtgcaagggaattgacttcaattgataacgactctaaaattcaccatctccttgggaaatgattagaaagaaaccacaagaggactagtcaaggagctctgttgatcttaaaatctgttggctatgcccttttatatagataccatcatgtaattgattttttagagggggctgcacttcaatatgatgaacttagttaaacctttttttgagaggcatcaaacaaaaaatatgtgatgtagagaagatgattgttgaacttcaaacaattgagatgaaatgcagctgcctttttttccaaataacataatcagctgtcttttttccaaataacttaatcagctgccttttttttttcagtatccttccatgctatagggagcttacaacattttgaccaatctaccttgccatttcccatttgattgtatacacctgggtgattttggtggttggattgatggattccaagaacctttgttccttgattgttatagttgtgatcatcaccataagcatgaaattcataaattggccaagtgacagcaaccaacaacaaggaataaagtattaaaagcacttctattagttttttttttttttttataacttttgaatcatgtgtttgggttggggcccagttacaaatatttctctggagatgttgggagctagccaaagcaattctaaagttaatgatgtgatggatgataataatttaaacattcaagtcagatcttagaaaatccatctaaacctgtgaacccaccaggcaaaggtaggttggctttacacatcaaacctatttattatttgaaatatgattctatgtacttctacaattttcaaatgtttcttgaacatgaatggattgctggggcttggtagttttagaggagtctgtacttgtacttcatgtgtgtgctgtgatgaatataatgtttggatgtcaaggggattactgaattttaattatctacattagcatcaacctttttactgcatttgtttaacttccagctttttctttatcatgtgaaactttctccctaggctacattttgaaaccatgatgaagttttgcctcgtcttcaatttgagtgaatttattgggaacatattcttttctgctttcgttttcactcgtaggttta

SEQ ID NO: 12738 - DNA, 6753 bp, Vitis vinifera
  Intron number 4 from transcript GSVIVT01013853001 (locus G SVIVG01013853001) derived from phytozome v7.0 (chr-ID chr1 6; pos 5297077 to 5303829 reverse strand)
ataagtcaaagaagtggcagaagttcgttactcaggttagtgatttatcaactgtaatataatttgttgctgtatctcatctttgtttcaaaattcaaaaaatttgttccattatggtaaacaattttgtttatatttctttttgtatcttaaaattaagtacaccagtcattctaactgtgatttgatgcccatttttacatgcctttgtagaacttgtcattcacttgtgaacttgtcctacttatttgcttttggagctaggagtagtttgataatgggtctgtctcttgttgggaattagtttagtcttatttagaatttaaaaagctttcttagcaaaaattttcttcatctttcgatgaacttgtgtttctgaagtagttcttaatttatttaaggttttttttttagttatattagaaaattttgtcctttttttgcgttggtttttccttgcctagtaaagttacgagtctatgaatgtggccccttggcatttgtttccttctttgtttcacttgaaggatctctcttccttatattccttgttgtctttctaatagtgcttctttttcccaaaaaaggaggggaaagttaaggatggtaatgttacagggctttatgtttgaaataaaaccaaagtcgacttatttacaaaccactgtagctgttgattttacatattcttgaaaaattataattagacaagtgaattttttatatcttcattgttgctttcaaccaaaaaggtggagtcaacatcaagagaagttggaaaaagaatttgaaattaaagaagaagacttaaatatgttatagggactgaagtttcttagtcaaaagagggaattatgatttcacggcagaagtatattttatatatcctcaaagaaactagactattagggtttaggctggtagatacaaatattgagatcagccacagacttgataaaggatcagagagtccttcaactgagatagggaggtatcaatgattggtaggtaagctaatttgcctatcacatactagacttgtataacatatgctatgagggtggtaagccaatttatgcacaattctaaagacctacatatggaggtggtcattcagatactaagatacttgaagttaacctctaatagtagtattttgtttcaaaaaactgggaggatgacattttcagtttatatagatgctaggtaagattaggcattgacaggaggtaaacatctgactattgtgcattctggggagggaatttggtaacttggaggagtaagacacaatttgtagttgctaggttgagtgctgaagcagaaattcaagccatggctcatagattgtatgagcttctttggataaaattattcttagtgattctagaattagttgggaaagtgccataaagctctattgtggtaacaagttggctattaatatagcccacaatccaattcaacatgaccaaactaagtgtgttgaagttgattgtcatttcattgaggagaaattggatagtggattagtatgcaccccctatttatccttaaaaagacagtttacatactgaccaacatacttgcaacttaactattcctatctatcataaacaagctgagaatgaagaacatttgctcaccaatttgagggggagtgttgcacaacgtaccggattatacaacttgtataagttgggattctatatagttaacttgatatttatttcctataattagcaactgatttggtggaataattgtaagcctagaacaaaataatttccttttctttttcctattgtaaactttagaaatcatttcctattttcgaacttcatagaaacttataataaaagtttataataaagaagactttctaattctaaaagggctcaaatagaaactttagaaaaagtgacattttagaaaataagagtttagatatagaaacttcatttaaggtgaaatttctaataaaaagacttcccgaattctaatctagcaattttttttttccttccttttcttgaaaatgatttatctcatcaagttgatggtttggctaagaaggaagctaggtttttaaagattttattgtggatacttgccttccttgattgtttctgattacaattgatgcttggccttttttatttgattttgttgttccatctattttttcttttagaaggatacctcatccttcatcattctttacatatgataaaggttttctcaaccgttgcttgttttaaatcataaccttgttgagccaattcattttgtaaccctaaattattcttcttccatcacaaaacataaaatcataaacatttctaaagattttattgtggatacatgccctccttgattgtttcgatgattataattgatgctttgccttctttattttattttattgttccatccattttttattttagaaggatacctcatccttcatcattctttacatatgataaaggttttctcaactgctgcttgttttaaatcataaccttgttgagctgattcattttataaccgtaaattattcttcttccatcacaaaacataaaatcataaacatttctaaactatggttcaacaatcaactaattacagacttttattgcattgacttgacttgaagtctctctagtggaatttacaatttagtttaaatactcctagaagttgcaattgtagaggatttgcctcttttagaacatggtattggaaaaagactatcatacttggtgatcttcaaaaggaagagtgcaaagaacaatctcttcaatgttgattagtgaaattgcatgtcgtgtcttaattaagacaatctctagtagtatagtatgattagtttatagttgcttaaaacaagctcttgattaaaaccatgtaaagatcgtttatgctcatttggtataaatttataggcttagaagaatttcgttttgcttatctattccctagtgtggaacaacatattctacatacatacaatagatgtggagtaaatcgagaaatgataagagtagaactaaactcacttattataaaaaaagttaaaaatattttttttaacaaaagaagaaccatgtgccaacaagtctagggagatttctgccctccatccctttaccacttgaactaggcctcaagggaatctccgtgtttctaaactgtggttcaacaatcaactgattatagactgttttattgtatcaacctgacttaaattctctttagtggtatttaccatttagtttgaatactcctagaagttgcaattgccaaggatttctcttttacaacatggtattggaaaagactatcatacttggtgatcttcaaacggaagtctgcaaagaacaatctcttcaatgttgattagtgaaatcgcatgctgtgtcttgattaaaacaatctctaggagtatggtatgattagtttatagttgttgttaggacaatgagtctatattgtatgttgggaattttgtttaaattattttttggcttaggaaactttttagatagtgacttactttctattgaagattcaagattgttgtttgctcaattgaaaagtcacaggtaagtctaaaagggcttgagtaaagacaagttagtttttctgataagataggattgacttaaaagttttaattgagttaatatgttttaattattttgaaagaattttaaattgagaagttaaaaagaaaaatctttccaaataataaaaataatttggaaatgaattttaaattgaggatttaaaacataagaattttaaatatgaaatgtttccaaatatttttaaaactcttaagtttctaaattgtttttagtaaaatatgattttaaaccctgagttttttttttttaattttattttatatagaccctacctaaatgtgttttttttggaacatatcaagaaagactcaacctaacttgccttaccatttccaatctcttaaaaaggattcaaagtgttgaatcttaggttgtttgaagacttgcattcctttagcgaggctgaggtgtattaattggagcatttggagattgttgcgtcgttgactaggatcaagttgtaggttctggagagtaagtctttagggtaaagtagccaggtaaatctatatgacttgatctcatatagtggatttagatttgaggtcttagattctctgatttttaatctccacagttagtgtgggggttttccacgtaaatttttttttttttttttttgataagtaaagtacttgtatgagcacacataaactattagtatggtgcatactgaagctttcatgccacaggtatctgtaaaagtattccaaacagcctttcgtgataccacgtaaaaattcttgtatcccgtgcatgcttatttgtttatttgagtatttttattatattgaaaatccctgatattttgcaggattaatttgggttaaatattcaactcccaatttaagaatttttttaaattacacccattgacccccctttgggggataccctattgggctttggtttttcagctacttaaaaccatgcaatgatcatttatgcttattgggtataaatttttataggtgtggaagaattgcattttgcttatctattccctagtgtggaacaacatattctacatcgatacgaaggatgtggagtaaatcgggaaatgatagagtagaactaaactcacctatgataaaagagttaaaaatattttttttaacaaaaggagaaccatctgccaacaatctagggagtgttctacccttcccatccctttatcgcttgagctaggcctcaagggcatctctgtgttcgtgttattatcaataattttttaataaaacatgcaccatttgttaacatgtccaagaagtgttcttgttccctttgcgttttgttatttaaagtataacttaggaaatgacatgcctttggtgctttgttttcaattatattgcttcctaaatgagtgcttttggtctgtcccaaggatattacacttattagtttggtcataatatgattaattgtattcccgaagaaaacatggccaagcttaggacatggtcaaggagtgttggtcacatatataagtgacgttggtgttgacatagttgttaaaaacttacaatacatgatgcaatacaacgagacaatacattttttatcaaaattgatacgtgttgtatttagtatcatatttaaagcatatcttatgatatacaagttataactatagaacgatacatacgcctttaactatttcatataattttaaagaaaaatcaaattcaaaaatgtctttctttaaatgattattatattaattgattaaattgtacgatgaggttagaaattgatcataaaagggggagagagagctaaaataattctatatgaaaagctactttggtgttgtcaaggctcatgtagaagaaggtaaatttgttcttacaatgaacaatgagaaattctcatttagtgaatttgaatgttgaaatcgaaaatgataatgattaataaataaaatattttacttaataaatttgttttaccaacataaaatgtggggactttgaagatactaaataaaaacatatatgtcaacaccgcatataggtatatatgcctaacaaaatttggaactaaaaattatatataaacatttaaaacgtttattttgtgaattttgtgatggacctattcattaaactcattttggtaaattgaactttttaaaactttaccattcaatgttttcatatggtatgatagagctcaaaatcttcaaatcgtactatcttttatgaaattgattatatattatttaatacttaaggcttccaatacatatgtacatgtggataattttttatttaatttttcactatataaaaatacttgcaatacacgatacaatatgatacatgatacaaaaaaaaataaaaaaatggcactcaatatgttttatgagttaacaactatggaagagtttgtgtcgcttaggtgtacatcaattgattaaggctatatgacaccacatttgagcatgttttgccaataatagaaaattaaagttggcatgagtaccatgtacaataagaagttttagatatatggaaaggttgaaactaggaatgaaaatgagtattgaagaatttgaattgaaaattgttagattgccaattttcctaaaagcttaaatttgtagaatttaggcctaaactgtatatcatgcactccaataccctccctcacatgtgacctcatatccacatgtggagagagagacacataggcacatatggaccctgcaaataaacaaaccacaaagaacctcttttgggcttaataaagtggagaaataaacatgcagttaggttcgaagacatgacctctcatcaaatgaggctttgatgtcatattagacaactaattttcctaaaagcttaaacttgtaagatttgacccacattttatatcatgcactccaacaaaaacatataatttcaatcatgttttcagaatggcaaagccattactgttgattctttttctgctaaaactttttgacaactaaaatagacacagtttttgtgctgcattgatgcaattgtttctttgttaataaaagttatttctgggattgctgctgtaaaaatgtcccatttcaggctaaagcttctggaaaaactcctgaaga

SEQ ID NO: 12739 - DNA, 10910 bp, Vitis vinifera
  Intron number 1 from transcript GSVIVT01036940001 (locus G SVIVG01036940001) derived from phytozome v7.0 (chr-ID chr2 ; pos 17263548 to 17274457)
gcgtttcgatcggatatctggactctgagatcaaggtactgctccaatctctagtcccaattgaatcaaggttagatacaattggatgctgagaacatgaaggaaaattttgaacagtaaatatggactctttggctgagtcgatcagagatttttttttcttttttttttttggattttggattcttgttagcaaagaagctgagagagataacactggaaacaaaatatggattttcttttatttttcttcattttcttggtaaccaaagggagggctcgggttttagtcttgagtgcttaataacttgggaatgctattgctgtaggttctaaattgtagtgtttctctttgaacagctgtggaactattgcaggtttggattagagctcagaatgaaatttttgttagattgatggtctttgctatttgggattttctggtatgaaaagacttttggtttagaatctctaggtgcgaaattttcaccactgaggattctggaatatagaaaagtgccactttgctcactgattatttggctcatggttggaagcaaaatttgagagatcacataggcacgacaatgttttttcttttatttctcaattctcggtaagcaaagagagggctggggtttctctttgaatgcttctaaatttccaatgatattgctaaaaactttgaactctatttttctggaagcataaaatagagatgatttagaaatgaaaatgcacttatcaaaaaaaaatttaggaatgaaaatgttagtttcttgttttgctctattttcttagtaaccagatagatcactaggaagagggtaatttaaggcaaatttggagaaatagattggggatgacgaatggtgcgtgcatgaggtgagagaggcttttggaatgggtttgtggaaagacatcaaaaagggagtgatgattcagtgttagaaccttcatctaagtcggaaatggtttgaggactaagtttgtttagataggtgggtaggggagtgctctttcaaagtagatttttcctactcttttttggaattgcctttgccaaagatatggcagtcagtgatttttgggagactggagttagaggtggtaagtggtgttttagcttgcagtggcatatgcatgattgggagttagaggcctgcattcatgaggtgagtttatatggtgaaggggaggacaaactttggtggaaggtaaggaacagggacaggttacaggtgaagtctaaatagagacccttctttgagaaagaggtttggggcacttgtgagagtggttttctttgcctaggatgtggtatcagttaagattttaacccttgacaacctgatgagggaaggatcactttcggtgaatatatgtattctttgtaaatctagcaatgaaccagtaaattatccttcaatgtggtaaaacttggttgctatggattttttattggctattttcaggatgcaatgggtatttccagagtcagttaagaagctttttatgggaaagctgcaggcataggtagacagcggagaaatgtctggtggatagccctctctgtttgttctagtgtatttggaaagaacgcactggtagagccttcaagaaggaggagctttcagatcaaaatctgaagttctttatcaagtccttcatggagtggtcaagggcacctttgggaatcccaaatggcacattactatatttcattgatagtataaactggggctagttggctttgtgcagctgtttgctctgtgtctctgtgtgtgtttttccttttttcttttttcttttttcttttttcttttttacatcttctatactccttatctacataagttgaccttttgttatgtgctttctatctctatcttggcttgcctattaaaaaggaataaaaaattcttatagaagattggcaaaactgtgctagttatcaagatagaagaaacaaaaatagcttttgaatccttgagtgcacaccaaataggccaataataaggccaacaacgaatgtgcacccaattggccaatactaaggcagacagcaaactttttaggcattaacactctgaccagaaggaacattgtgaaggcaataaaggcaaagaaaaccccatcaacagggagcaatgaaaagtacatgagagattttcaagagcagcactgctagttgcaaaaaataataaaaattataacaatcaaagttacataatatagaaaaaaacgtttacaaacacttcatagttttatatatagtatagatatccgtatagtattgatatatagatatgaattatttatatatgggatgattcttagggctatcgttagcatacttttgtttgagagttttaacttgttgactatgatgtttataccttgttcaaggacttttattctggtctttttatgttaaagtcattggaagtaagtattcatgctaaccacatttttgatattggtcttttttgtattaggtcttgggcaatgactatgattccattggacccaatttatcaagttaatgacatcatatatgcaccaatgcagtgttttaacctttaatcacatttttcacagttgtcttttatttattgaaaaatcgcaaaaaggaacttccctatcccatcctgataactctttaagacctacctggattggcttttgataaaccaaaacctttatttcaagcagaactgtgtttatttttttgataattttaataaaagatttcttgacttaaaaagaaaaacttaagctttgtttgggttccttttttgttttttggctttagcagggagttaaagctgaagttgaagtcataatcttaaggggacaataatggtattatgaaagtttcattgaaaataaaatagtttcctgaataagccttaaagggctttttatgagaagtaatattttcctgccttccatattacgttatttttatgccaatggctctttaaataaaattacgttgggtaggtatataaacctttattgagcctaaagaagagtttatgatgtctaagaagcctattcaaacagggtcttaatataaaagtaagaacaatgtcatttttttttaacgcaaatcaattttctgcttatgtgaaatttttttcatgtttaatgaaagttgcatggtatcaatgtgaagaaaatgctgctttctagtgcaaagtaattttaaccttggcttatatttaacatctaaataaaggcagaaataaaaagttacccataaagaccaggacttttcttaatttcaaaatttgggagtctcatgaacccttcatagaaggttgttgtgtagactttttattatctattctacaatcatgtaatgaaaggataaaaaactaaaacgtccaagaaattgcactattaaaatacaagatagaggaaaataaaaaattcattataacaattagaattgctttcttaaaattgttaatcaaagcacaaccaaaattgcttttgatatctttacttaatttgtttccaaaagtgtttccatcatttaatccatcttgtaatccatcttaatttgaatgccatagaatcacatcacaaggataatctttaataatcctagattaaatagtggaatgcatccattaataaaaacagcaacaaaatcttctttgttgtgtaattcttttgaagaatgatcattaaaagaccaaataggatggctagggggcaagtaagaaatatgaaaagtaaaagtattttcatgtaataaaatagatttgattaaatctaagaaagtgggttgtttcactgttgtcaaagcaaagcaaagaattgttggtgtgcctctctgctagatagccctaatcctaattcttcttcttcttcttgttttaggaccctaattgatacataacatgaatcacaaagaaaagaaaataaaagaaaattttcattttgattcttgtagatcacatgatcaagcacggtacataatgaaagttaaggtagtaggaaggaggttgaatgagctagagtgtcggtcattggagttttagctgattgagactcactgaactcaagtagtcatctttttttttttttttcatattcgtattttggaaatctgatagcattgtactttgtgtaaattggtgacaattttgataggaaagtatgtgcttttgtgctttcagatggttttggggctaaaatcatgggaattatggttagagatgttcaaagtatttgatgggttgatttgggtttagttttggatccaaatttggatggaatttgtaaggggcatttggagaatttttaggtattttaaaaatattttattggagtgttgaaggatgaaagagaagactagtagggtgacattgacgaaaggatttgggaaattttaagatttagaaggggttttgggagagagaacctaaggatgggaatatcttacttatattagacctagtgcctaggtggtttgtccaataatgggtgggatggggattgcaattctttctaatttttgaggtattatgtatatcagaggctcaactagaaagcataagaataggaataggaattttgtgttatatagggcaatccttgataccttctgattttcaaattgaaatcaatccttggtaaaaagaattgaaccttttatttgctttcaatagaaattaaaagaattgtatgaaatgttttgcattggtgttctagccaagcatgagtagaaaaatgatgtggttttggcttctattttatattacatagtggatgcctctcagtattttttttttttttataggaaacgacaaagagatatattgatagaaaaaagaagtacaagagaaggataagaaatcctcccaccaaagaaaactaaactacaagaatacaaaaacaagaaagtacacagtaaaacaagctaacactctaaattagaccaatccttaggaattacacaccgctaaccaatcaagttgtaacacattaaggggagtccccttaaaaaccttggaacagaaagcccaaagagaagcaaggaaaaaaatagaatcccaaagatactttgaattccttgctttatcctaaaaaatcatcgcgtttctttcccgccacacaacccaaattaaagcgatgctcgcagcttgccacaaaactatccccctcttagatgaaccaaaaccattaaatttgatggacatcatgtcaaaaatgctcctcggggggacccaatccatcttggctaactgaaataatctgtgccacaaccccatcgtcaaagagcaatgtaggaaaagatgatctgttgattcctcatgcttcatgcacaaaatacaaatattaggactaagagctttgtagggtcttctcaattgtagcatgtcattagtatttaccttcttgtgtgccactaaccagacaaaagacttcactttgaaagggacttgagaatttcaaacgaacttagaaggaaaaaccggaggagaaccagaaaattgggataaggctagaaaaaaagatttgactgaaaaaagccctgaagaagataaaggtcaggatctggcatctgaaattgaaggtgatagatgcaaaccatcaagtgtccgcatgaggccttctaaatcttctatctgagaatctgaaaagttacgacgaaaattaaagttccaagagaaaggacgagtagaaccgagaattgaagaaatagaaatatttttatccaagactactctaaatagtcttggatattgggatcccaaagattggtccccccaccacaaatcttcccagaatcgaattctttcctcatttcctaccacaaactgagtaaacatggaaaactcctgaaagacttgtgcaatagccttccaaggacaacgatgtgaccatttgactaaagtgttagcatcccaaccattagagtgtgatccataaatgcttaagatgacttgatgccatagagctgaaccctctctagggtacttccacaaccatttccctaagagagtgagattccttagagaaatcttcccaaatcccaatcctccttttgccttcggattacacattacatcccaactaactaaatgatctcttttaccttccccaatctctaaccataaaaaatccctttgcaacctctcaatttttgcagccactgaagcgggtatcttaaaaaaggagaggaagtaatagggcatgtgggtgaggcaagattggataagagttatccttcctccaaaagataaataagccttttgccacccatcttatcttcttgagattctctcaatcactggattccaaaagccacaagccttgggattccctcccaaaggaagacctagatagagtataggtcaactaaaagccttgcaatcaagcaactcagccaaacaagaaagatgattttgatcaagattgatgccataaatattactcttgtcaaggttaacattgagcccagaaatatgcctaaacactagcaaaagactcttgagagtctgcagttcttcctccctagtgttagaaaagaaaatggtatcatttgcgaattgcaaatgggacaccctaattctgtttctacccaccctgaaacccttcaacaaatttctttcctctgctctcaataacatcctgctctgtacatctgcgactaaattaaacaaaaaagaggataaagggtcgccttgtcttaagcctctagatgccttaaccaccctttagcgtttccatttaccaagactgcataagataccgaggacaaacaaccactcatccatttcctccaactaggactgagggttcttctccaacatgtgatccaaaaaatcccaactcacaagatcgtaagccttttcaaagtcaattttgaagacgattccttcctgccctgatcgtcttttctcatccactatctcattggctatgagaatcgcatccaatatttgtcttccttgaacaaaagcgccttgagtagaatggatggtttcatgtagtacccctcttagacgccctaaaagcactttggctattatcttgtagaggctagtgatcaaactaatgggtctaaagtttgagattttctttgttaaactttttttgggtaacaaaactatgaaggaggcattagtgctttgattgataatcccgcttctgtgaaaacactctcactaaatcctccttgatcacatcccaaaaatcttaaaatgctgcaatggtaaagccatcaggccccggtgccttatccctatccaactgaaaaatggccttagaaatctcttcttcagtgaaaagggagtcctacctagacgcactttctttcgatatagggaaccaatctaaaccttcaacactccaggactctccagtaggactcgcgtagagcttttcaaagtaaagtaaaatctcctctgtgatactcttagcattattcaacactaagccactttcattctccaacaccttgataaatttcctatttcgtctgccattagccactttatgaaaaattttttgagttacaatcctcttccttaacccatttcaccttggctttttgtctccaatgaatttctttcctcaaaattaattcttctagctcccattttcttaaggctctttgaactaaaagatcagaagtgagaccccctacttgctcaatggcatcaaagttggctaaatcgttgaggatgctttttttcctttcatttagctctccaaaagaaaccttttccactctttcaaattggctttaacaaattgtagtctcctcatgaacttgtgaccttcccacccatttccttgaaaacctctccaccaatttctaaagttctccttgaaactaggatgttgcaaccacatattctcaaacctaaaaggtgttgggccccacttgaacgggttggtatccaaaacaatcggccaatgatccgatgtccttctaggaagagcttcttgaaggccttggggaaagagatgcccccgctcatttgagtaaagaaaatgatccaaaaatgtccaaaagctccacccaaaaatccttcctaaatgatgggttgtttgggccataaactgcagatatccaaagaggtccgcatccgtccaaagcaaacttgactgagaccgagaaggatcctattacttcctcactacgcggttttttagagtcccaaataatcaaaatcccacctgaagccccgctcgccagaaaagcagctcattccttatttctgactgtccagacactacccacaaaccttctgtcatacttcaccttttttgtttcctgaatcatcacaacatccggattctttgacctcataaaatctttaaccacccttctcttattccttgatcccaagcccctgacattccaattgataattttcatggagaaactcacagaccctaaaccaccaaactagttccaacaggtctcaaatacctgtggaccatctgttcttcctcctagaataaaccttaatatctagagaacttaaaacctcacactttagccattttcctgggggacatgccatctatttgaaactcacccgatggagagaccacaatatcaccctggctatctgtaaccaggttggaaacctccttgggcaagctgggtttagacttactagggttaaacctcttggacatctagtttgataaagcaaactgggtctcttcctcatcacggacaggaatgccaacatatttttgataaaaagtgccaacaacgtcttttttagaaaaaatttcagaaattactcgattttccatgggagactgagaaagagagactaaactaggaagatttggaccagagggacttaacaaaggaagtgcaaaccacaagaagggaaagaagaagactcgggtggttgagaaggtgaatacatgcatacctccaagttttccactcccggcatttcacaaatcccctcaaagctgagccttttacctctgatttctggactagaaggtgaatccgtgactgatgaaccacgaagatcggacctcactcggcccaaaaaaccttctttgtcttcttcgaaatggggattgcgcaaagccgcttcgcctcttgacgacgaggccccttcccccgaacaccgcttttgattccttgatgattgacagtgaaagagaggactagctttgaatcctcattccaactgagatcctgtcccgaaattctcttccaatagacaaacttcgctaactgatgatgtcttcccgaggaaaaaaggctcgctgcaactccgaagtccttgtcggtgatcgaaacttggaggaaaaagggtagtccatagcttctttgaaacgaccttctcttccttctgcttagagcctctcatctgaacctcagaagctttctcctttctcactgcagcatcttcttcccttcgaaacaaacccgtcttaacagaggtcttcgtttctcctattctttggcccaaccacgacggccttttaaattacagcccacgattgcggctgaaggtgggctagggttgggaagagattgggcctttctctcgaaggcccgaccatcctcttcagagaaagcctcgtccctgccggccctaacttcgattagaccttgagagtgtgcaaacagcgggaccacctttgctgaagatcttgcgcgctggaacgttgaagacgacagtgctacagtctcgtgggcttgaataacaactagaccagcaggaagcccacaatttttcgtcccaatttgggccctaacaggttgggctttaaacaaggtcttaggcatagtgggcccactaatgtttccttccgctgggcccagaagactcccttcccagccattctcccttttggacgccaagtttgaacttgaaaaacgataacgtgaccggggaagaagcctcctattctttgaccattgagagacgcaacctcccactttcaacaactcgtccctgctacaggttgactcagacctgaaaatgtcgtcttcttcatcttctccggtgattgtaactgtgattgtgaatgtccaggccccatcttccacctctagcaacgctggtagcacgacatttggaagcatctccacccatagcttcacctttgacaagtctacaagctttaaagattcctatgccaccttcgttaccctcccccacttcttcataatgaatttcaactgatcttcatcccacaagtgaaaaggaagaccttttagttctaaccagccctttttgaattttccaacaacaaccatattttctcttggcgaccatctcctcaggagaatagaccttcctctcactaataatcttccttgctcttggaaccattcagcactccttacagaatccacaaagaaacaccccttgaaagcggaaataggggttacagacaccattcctttcgtacccatcatcctcgcaatagcttttcctacgtgagcccatcaatataaatatgacaaactatattcagctcagcattattgtttgtcttttattttctgaaccaactttcttttgaggaatctgtattttagttgtgctttaattattagtcacttctttgatttctttctttggttgtaaaatttgtattttgatggttgtggttttctctattgcatatgacaaacatctagttgtaaatgatccttcacagtctctagttcattgggctgggggttattcttgttagtcctattagttataagttatggaagattttacttctatgaatttctgtactgactgtttttattttgatattttaatggcaatggtgcatgttcacgcatcagttaacttcatcttttttatcataattttacatatccaacatctcaattataagacatcttttataattttgcagacattacttttggtgtgaaa

SEQ ID NO: 12740 - DNA, 16326 bp, Vitis vinifera
  Intron number 7 from transcript GSVIVT01027213001 (locus G SVIVG01027213001) derived from phytozome v7.0 (chr-ID chr1 3; pos 18136421 to 18152746 reverse strand)
ttccctttcaggataaattggataattctggtattattaatattcaccctcttttttttcttttctctcctgataagtaattttttcttactgttacatggaagtaaaccgggaacagtcccattccctaactctttgccacttcagcaaggcctcaattgcaatattcatcctcctgttttatttgttaagaaaatatagttggaagttcaggattaattttttgaactgaaagtgatggtggaaattggaattgcttcttgatgttttggtttttctccaattttcgggtcttccaatgtcatttatggttcatttcttggtgagacattttgattcaaaagcagatctgtgataccaaaatatggtcttttcattgttagatgtatgttgattcagaagcaagatctttggtatcaaagttcacatgtccattaagcaatattacattgtttcatggccctgatgttaagtgttaatactggaattcaaattctgcaatttagaggcataaagtgagaaggggttgaagtgggtgcatgagtggggaagctcttgtccttagtccataggacttaggaggtctaaagttttagattgaagcccctggaatatctccaaaccatgtcctggttttaggttgtgttatggactatagtttaatgggttgtcactaaagagtggggtgggcacgggccccttgacttgccttgaccggttgttcttgcttgagcttggttgggccaggaaatggcaatgatcctcctagcccaatgtaacatgagtatcttattcttgagtaatttaaatataatcttatattatcattaagtaaatgagcatatatgcattttgtcattttttttgtcaagaaaattttgtcaaactgttagtggtttctttaaaaaagcttaaacatgtttaatgcaaagacattaagttgtttgactcttactttctaggcttgtggtctttatggtaattatgctcttatacaactttgacttgtttgatttgatggttgagggtggaggagtgagattttcttagaagttgagtattaataatagggagatttgcttaggtgttggctaataggctaaagagggtggttgtaaaggtggtttttgagtttcagattacgtttgttgagggaaggtagattcttgatgcaatgattaaaactaatgaggcaattgattctattaggaagagtggctccagtgtttaaatttgtaagcttgaaattgaaaaggtgtatgatcatgttagttgggatttcctgttatctgttattggaaagatggggttgggtaaaaaatggattgaacagattggatggtgcatcttaatagtaaagtttacggtgcttgtcaactgttccctttcaaacttttttcaaagctttagagacctaagactaaggattgcaacaaggcaggttcgggatgggtcatcctatccaaacttgacttcgtttattcaaaataattctcatccccatcccattaaaaaaattaagaaggatagggcgagcatacttgccccattttgactttatttgaaaattttaatttttttttaaaaattatttttaaatgtttttaattacattaaaataaatgtattttataaataattaaaatattataattttttatgacttattttattgaaaagtattttaaattttattattattataatatattaaaaataagaaaataaaattaaataaaattaattttatatagaacaggggcgggacaaggcaatctacgaacccgtcccaggttttaaaaaaaatcccaaactcgcctttaacccgtttatttaaatttcaaacccgtcctattagtggtgggtacctaaaaaaacccgccccattgtcatctctacatgagacttgagataagggaatcccttctctccctagtccctatctctctgtattactgatggaggtgctcaattttttcttggaaaaggctcagagggtggttttttattggttttagggcaggggctgggggtggaggtgtctcatttattgtttactgatgacaccctagtcttttgcgaagcctctcaaagtcaaatgttacatttaagatggttgtatgtggtttgaagttattttaggtttgacaattaacctggaaaaaagtgaattaatctcaatagcattagctaatatagaagaattggctcttgaattgggatgcaaggttgggaagcttccaaccacttatctggggcttcccttagggctccattcaaagccgagttagtttggaatggtgtggaagaaagatttcatagaagacgtttgttgtggaaaagacaaagcatttcaaaagggaggaggttgaccttaatttgtagtatgttatccagtttgcctatttattagatattcttgtttagcatgcctagaaaggttagattaacactaagaaaatttagagggactttctttggggtgaagaggccttggagaaaatatacgtttggtgaaatggccaattgtttgcagggagaaaagaaagaggggcttaggaatcagaagcctttcaatgcttaatagggctctattagggaaatggtgttggacatatgcttaagaagaagaagccttttggaaaaaggtcattaagggtaagtatggggaggaaaagaggggatggtgttcatgcaaagtgagggaaaggcataggtggtgtggtttctgaaattctggtgaatgttttatgttcaaaaatttcatcaacaatcaatttcgctcattctgccagaagtatatcattgatactgtcaaatctgaaaccaaaacaatctctttttagaaattaaaaaggatttttcagctagcacagtggctaggtcatctccacagggatttactaaatgaagtcaggtttcttgcattagtcaattgaatttcagatggggaatactcagtcaaagaatgtaaaattataaaatctgcatagattaatatatgaatgcaaagttttagtttaaaaattgggcaggaaatgaagtttttgtaaaattatatagattgatatttggaaaggtcaattcacatgcagatccagtgagataaggataggatttcctgtttatgctgaaaatctcttcctaaaactcagattatcactaagtcatgctcagattcattcctatgtcattcctagaactagacatatgcgttcttcagaaaaacaatgaatcaatgtaccatagagagtttgatgcattcacaagcatcgcataggtgagttctacaatgaaaaataagaagaatactaactcaaaatactgaaatctcagatctagaagagtaagatgaagaactttacagagaaatgcatccgctttctttcctttgctgcatgtgattgattgtccaaatatcaacaaaaaactacctctccataacactatcttcaacagtgaggatcttgtttggcagctgagaaaatatcatagaaaattctctaataagacagaatacaaaactaagaatctaagactaaattatctttctaaatttttaatctattctcttttttcttggttaaaccaacaagctatttataggcaaagacaccttgcttatgcccattgataacttgtcacgtagtctcaacagatcctaagaaaatctaagcaatgaaacataaattttgacaacattattacaattcatgtacaatttcaatcagggttcaaaatctcggttgctactagtacgacttggctgagtcgtatccgcctcaagcatggctgctattaaattgatacccaagtttggtatttggttgctttgtgagtaaattcgattgagttgaagatatatgagcagtcttggagcggattgcataacaacttagacaactccaagattatgtcgagactaagtattagagggatgggtgatggaaaaaatggtaatattggaggggaaatggtggagaagagaagatcgaaacccatgaaaatgaagaagtatggagagtttagactctctgcatcttcattcttttgcatcttcatacaattattctgtctccagtttactgcctttaaaaaatgggtattgtgcatagaaatagggagtcaacgatttgtaggtgaaataggtattgtgcaaagaagggaaataggtgattgaagggatgaatggtttatgggtattcgataggattaggaattttggtttctgaatcatgggtgttgaaagagagaaagagagaaaaccttaattctcattcatatatttaacttcttacactaaagaaatatacatacaaggccaggttgaactaactaccatatatgtgacttatattaagaaaggaaaggaagattgtacactataaatacattatattcaacaatgggtattttttatttttttttaactggatactgaatatgtagtagatatttgtatgtaaatggatagtggaagtttgatggaaattaggattgtagcaaataaataatgaatattacattaaataaataggaaacaaatatcaacataaaaattaaaattgatgaatagatatataagaaaaacatatttattttcaaatatgctcattcaaataaaaaatttctatttctataattgttttatttagaatatatttgataagaaaaatgatgtttattttttttaaagatgattcatggttgtatttttttaatagttgagaatattttttaaagattcaaaatatttaattcattttttttaataaaaaataaattcacttttattattttccatcttcaataagaaacatttattattaagtgattaaattattttttttttaaagatttttaatattattttaaatcattcctatggtatgcttttatcacaagttgaataattttgtatataatagaagtttattttattaaatttttactctatctatttgtatttatttttgcaataatttttgcaatctttttaatttttttgagcttttaaactagaattttttgtgtatcacccaattccgatctaagatgttgagatcgttgtgctttgggacttgccgagtcaatgtccgataccacgactttgaaccatgactttgataccaaacataaaaatttgataaacaatttgataaaccttctcgttttgcttcagctcccaatattgaattaaccaagtcgatatagctcgatgcacttagatacaagatttgtgatgtcaaaggttattgaaatgatttcactcattgattatgaacacaagatcttctagaacgttcagggttctatcaaaatatagttagatactagttgatacaacttgatactccatttcctgtgttgaatggccaattcgcatatcgaaattatttgcaacactttctagtaagttaagctcttgttgaaataatattcaataattggtttttgatcgacatagagccaatgaattcaatcaaactaataccagttgattccaacatcttcaaatcatcttgtatcgaaatttgattttgatacatctaccgttgttgcctaaattatcaaaagtactgatttagtgtcgaattgtcaaattaataccactagtgtatcgaaatatcatcatccttcagtatgtcgatactagttgctttagttgaaaatcatttcgacatgccattccctctatcaccaagtatcaaatgagcactatagtgtcgattgtgatattgaaatgtcttattcctttgtcaacaacttacaattctccctttaatcttggttgtgttctttggattaatgttagagtcgtaaaagatctcatttttggacaagaactcattacattcctctagtgatctccaagcattctatttttttagtttttatgaaaaacaaccatcaaaattgagttccaagcgacttgaaataggtctttccactcaattttaatcttggacatcctcatgtaataacaacaaacctctccctaatcccacacaattaaactaatgggaatgctagggaactcttcggatatgactatgtaaaatggagtgaggtagcaaacatcataccataagtaacatataaacttcatgtcctctaaatcttgacattccgtgaaatccaaattgcacatcagagaatgtagatgttataagaattgagtttatagcctcaaaaactgcatctgtcttcactcaccttagtgcacttgtctccttctatcctagatacaagggcttggtcacttttctcttcaggcttattcttaataaaatctttctttttggccttgtccaagttatcaagtttaggtcctttcttttcagccaattttgtatggatattagaagtcccatctaaggtcaactctttctcatggctagtggtgtacaagaaggtgaacgccaatgacatgctacaattgagaagaccttacaaatcccttaacctagattggtgcatcttatgtatggggtgtggagagtcgattaatcatctttttctacattgtctgataactttgggtttatgacacaagtatagctaggatgaattgtttcgcccatgggcatttgcgatatattgcccatctcttttagaggattagggagttctgctagagataagaccctttggcaaatcgtttgcctcactttgcgttgaatcttgtggtgagagacacatactaggatttttgaggaaaagtggaggacagtagatactttgtgggatctaatttacttctattccaccatataagcttcttgtactactacatttaaaggaattcctttcaatgctattcaacttaattggtgcttgatttgtatttcaaatggggtggacaacaatgagaggagctttgtttggtcttgatttatagccataattggactattttttgtataggtttccatatatagtgggggagtttgagtgatattctgatcagatcttgtattttgtggggatgatctctcatccttctcttgatctatttatcactatacaatctatctttgtttctgatcaagaaacaaaaagctcacaaaatgcaaattgaacattctgtgcactttgatggaaggctgggaaagaagtgaaaaaagtccagaaaataatttctagaaatggattaaataattgaaaaaaatatacttatttcctgaactttcaacagtaaatattctatactagttgcctggttagtgaaaaccattattgatgaactgtgagcatgcagctatggatgattgaatcactcaaagagattccatgaccaatgtttgtgcaaccagttgtaagtccttgcagattctgtacatttgttagattgattgggaagtttttttgagtgtgagcacttctttctcgtttcacagcaaaatacccttttgcagtctttgcaggcaaaagcctattcaatgctatttagtgcatctaattccttaatcatactcttcttatatccattttctggtggattttctaatgactgtgatggatgttcatttgacaggatcatcagatttcaataaccatttctaataccttaactaagagtttggcctctgggttgggctaagttgtatatggaggagaagccgcattccctgttagatttcctggagtggatagcttccagttgaggggtggtttgttttttggtttttgcttgtttttggcctttgctgcctggtatacgtcctgtatacgttgaggtttttgcctctttaatgaattgtgtttacgtatcaaaaactaagagtttggcctctatttctgcgcttatgataaatttagataagaatactctatcgagtatcactgttagttaaactgaagtcctggtttggctacttaattctcttatattctctatatttgttaaaaactctggttgaagtagcttttggaattgagagattagaaagctgttttatttgatttggtattgggaaaattaagagaggtcaccattgaaactaggtgcgtaagccaagagggaaaggggattaggtgttgggagaataactttaaggagtagagcccttttaaggaagttgttacggaggttccttaggggagcaattcttaataacgcaaggtcatgttgggtatctaggggtcacactttaatggataagatgccaacattgctgtcaaatggtcacttagatgtccttggagtgctactgagtggacttccttgtatttctatgggtaatggtataaaaatttgtgttttgaaaaatctttggtggggtaataaacctcttagtgaacaattctgaaacccctatggggtggtgatgctgaggactttcttactcttcaatgctagttttgtcctctccatttccatcctggaatttcaattcctgttgtagaagaagaagatttggaaggtaaatagaataatagaataaatttcttccttgatttcaatctgcacatctccacatatttatacaaatattcctagaacaaaaaaatgaaaactttcctaacccaattctatcaaattcccttgattacaagattgccctgattttctccttgattacaaaaattacaagaactaggtcttcatatttctgcttaaatctatgtgtatttgtggcccaatttttctcggtgaaggtttgttccttgaaatattcagtgtaattctcaattagttccttctttacaattttctctattttttccaacttggttccttaaaactatttctgcaaactcatttggaaatccaaaggcccatcaaaagcaaatgcccttgcatggcttgtgtggaataaggtcaataccacttatttgctccaagcaaggaggttttaccagacttagtttggagtggtgtgtcatgtacaaagggggtagggaatccgttgatcatgattttttatatttcctgcagccttagcattgttgtgcaggctgcttggacttgctaggattgatcgagttccacctaaacaggtggaagagatgttgatcttatcttgtaagtgttttgtgggactttattgacgtagaattttttggtgtattgctagcctcattttgatttggagtatttggtggaaaaggaatgcaaggatttttgagaatagatggactttggaagcaatttggtacttttttttttttgataaataagtaagcaatagattaaaaggcaaaaagccacaaggcatacagggagtatacacagcagcctaacccaaaagacacaaaaaacaaacaccctcaccaaaaaacaatttggtacttgttttccttctattctttcctttaggcttttgctagtgaagcctttgtaggtacccgtcgaacctcattttgctagattggggcctagtgagcatgaatatatatatatataattattttttatcagaaataaacattctattattaaccaccttcaatgagttttatcaagcaaaattttgatgggtgtcttttgagtaacctaggataactagggattagagggttgctcagggactactttgctttggtgaaaagagtattctctaaacctataggatagggtccagccattatggctaaaattgacccttttggagggtttattgcaagcagaagctttagaattttgatttattattatgtgaagaatttctgaactcctttattgataatgaatcggtacacaccatacacatatatatacacaaatgactgaataagaaacaatcaatctagcttaattctctcctaaaattaggaaactaaatcataaggaaatatcctaaatgatctctccttttttattcctaaattaaagtcctaactttggcattatttcaacactccccctcaagctggagaatatatatcatataatcccagcttgcaagttaagtcttcgaagttaggcctaggtaaagctttggtgaggatgtctgcggtttggtgcttggtaggaacatagtttaatttgaccgtctcactagtcaccttctctgtgataaagtgtctgtcaatctcaacatgcttggtcctgtcatgatgcacggggttctttgctatgcttatagctgcctgattatcacacatcatcagaattggagatgaactcgtttgtcccagttcactaagaaccctttttatccaaatcccttcacagattccctgtgcaagagctctgtactcagcttctgcactacttctggctacaactgattgcttcttactcctccaggtaacaagatttccccagacaaaagaacaatatccggaagtggaccgcctgtcaatgatgtttcctgcccaatccgcatctgagtatacttcagtgtcacggttctctgtctttctgaagaataggcctttccctggtgtcatttttaaatatctaagaatcctgtagactgcttccatgtgttcctcagtggggctgtgcatgaattgacttacagcactcactgcaaagccaatatctggccgagtgtgtgagagataaatcaagcgcccgacaagccgctgatatctccccctgtctaccggtgtactttctttctcgataccaagtttcttctgactctccataggagtatcaattggtttgcatccaagcataccggtctccttaagaagatcgagtatgtattttctttgagagactacgattcctttccttgatctagccacttccataccaaggaaatatttcaaatttccaaggtctttaacttcaaactcttctgacaaatacttcttcaaattctgtaactcctccatatcatttccagatagaataatatcatcgacatagactatcaatatggccaatttcccggcatgagatttcttgacaaatagagtatgatcagcctgaccttgtttgtagcccagcttcaggactgcttttgtgaatctatcaaaccaggctcgaggagattgtttaaggccgtacaatgatttttggagtttgcaaacctgattctttgccatactttcttcgaaaccaggtggtatttccatgtagacttcctcttctaggtccccatttagaaacgcatttttaatgtccagttgttgcaagcaccaatcttgattgacagccaatgagagaaggatcctgatagtgttcagttttgcaacaggagcaaaagtctcctgatagtctatcccataggattgtgtaaaccctctagctaccaaacgagccttgaatctttcgactgatccatctgctttgtattttatggtgaaaatccacttgcaccccacaggcctcttcccaaccggcaaatctgtgatagtccacgtcccattcttctcaagtgcatcaatctcatcttgtactgccttcttccattctgaaatttttaatgcctcttgtattgtgttgggaacctgagtatcatcaagagaagtagcaaatgctctgtaagatggtgataacccttcatacgtaacataattcccaattggatgatctgtacatctcctaacacccttcctcaatgcaattggcaaagtagaatcatcaatgctgggaattaacacctctccagccctatcctcacctatgttctcttcaagaagacttgaattggagtcaatatattggccacatgttgactgtgatccgtgctctaattcctgtcttttcctcctcctgatgtaaacttgtaagttctcattagcaagttgtggggctataggttgaataggcatgggagactggatggtcacgggagaaggaacatttgtgtgctgggctggctgaactgatggcggcatgggtgtggacaactcagtgggcgcgaattgggaaggatttggtgactctgagtgaaaagaaggtacaccatcaagaaaagactcccaaacttgatgttcattcatgctctccccctgaacatgagatttgggatagaagaagacatgttcaaagaaagagacgtccatggtggtgtaaaatcttttgttggttggagaatagcatttgtaccctttttgggttggagaataccctagaaaaatgcacttatttgctcgaggagcaaatttgctacgattttgaggatacacatgaacgaatgccgtacaaccaaatactttgagtggtaaatcagaagaggcggcatgggtgtgaggaaactgttttaagaaaagttgacgtggggattgaaaggtaagcactctggatggcatacggttaatcaaataggtagctgtgagaatagcttccccccagaaatagtttggaacattagaggaaaacataaggcactgggcaacctccaagagatgtctattcttgcgttcggccaccccattttgttgtggggtgtcaacgcaagaacttatgtggataatgccatgattttgaagataagtactgagactactagtaaagtattcctttgcattatctgacttgaggacttgtattttggaattgaattgattttgaaccatacgattgaaggtttgaaaaatgtgcccgacctctgacttttctttcataaggaaaacccatgttacccgagtatgatcatcaacgaatgtcacaaaccatcgagtgccagaaatattttttatccgggagggaccccacacatcactatgtactagagagaaaacagtcgaaggtttgtatgggatttgaggatatactgttcgagtatgctttgcaaactgacaaatttcacagtgataagatgctggatttttattgataaataatctgggaaacaattttgcaaggtaaacaaagctaggatgaccaaggcgatagtgtaacattataatctcactatctttattgaccttagaatttgacacagaattgaaagactctgacatactctgagactgtacgcaacttgcttgagagacttggttggagaattggccacatgaaaggaggtagagcccggaacacagttcagcactgccaatcatcttccccgatttcaagtcctgaaaaacacacaagtttggatagaatttagtaacacattggagatcatgagccaatttgctaatggacaaaagattgcaatccaagtttggaacatggaggacagagtcaagatataagtctttagtaagttttatagaacctgtcccggcaatttttgactttgaaccatcagcaatatggacggatgaatgaccattacttggcttgtaattttgaagaatggcagcatctcctgtcatgtgatcagaagcacctgtgtctactatccacggcctcattcctcctcgattagcagtgaaggctacaccggtagtactgccactgccaacttggcttaataatttctgtagcatctccatctgctctttgttgaatggactcagctcgggaacagaggtgctctcagagttggcagccacgtgtgctctgccatctctgtcaaaccgtggctttggtttccaatcagcaggtttgccatgaagcttccagcaagtctccttataatggcctggtttcttacaataatcacaccaaggcctatcccgtttctgacgatctccaccactactattaaatgaccgagccgcaagggcagaggcatccaatgttggggcaggttgctcttttgatcccatcatcactttctttctactttcttcacgtctaacctctgaaaaagcctccctgagacttggcaggggtttaatgcccatgattcggcctctaacatcatccaattccttgtttagtcctaggaagaacttgaacagtctcttttgttccacaatttgcctgtatgttgctgcatcatccgaacatttccatgagtgagtctcaaataagtcaagttgctgccaataccttgtgagtgtgttgtaatactgagtaactgactgctctccttggcggaagtcatgtagagctgattcaacctgaaacagttctgaagtattttcagaacttgagtaagtttctttggctgcatcccatatgtcctttgcagtcccaaacagcaagaaattttcgcctatgtcattgttcatggaattgataagccatgacatgatcatgctgttttcaatcttccacttcctgaaacccggttctgtagtttctggcatgactgcttctccagtgaggtactcatcctttcctttaccgcaaatgaacagcaacacagattgtgaccactgtaaatagttatggccatttaatttgtgtcctgtgatgagaataggagaggaatcattgccaccaaggtttggaatttcagatctgccccctgattctggtgacgtgacgctggatacttgtgatgatgccattccgtattttgtcatggaccggaaaggtagaagaacacttttcaaggcacgtgcagggactggagttgagaaaaaatagccgaaggacgccggaaaatctgatcagagggcccgcggaagcaaaagaaccccaaaagaggcacgtgcagggctcggattgcacaaacaggtaggaagggtggctggtcggcgtcaggcgagcctggaggaggaagcgcgtcgccggaaagtggctcacgcgccctcacgcgccggtcggaaaaacgcgcgtgggcggcgcgtggatgggtttctggttccggtgctttgggacaaattggagatctcctccaggcgctccttgcggtgtagaaaaaaaaccgtcgccggaaagttcgccggaaaagttcgtcggaaaagttgccggcggtgagtgttttctgacgactattcgactgactggaaagtgttttctcccttggctctgagaacagggactgatggccggaatgagagagagagagagagagagagatgatcggattgagatatggccagaaagatttggccggaatgagtgatggcctgaataagaggtggccagaagggattagggtttcagaaaactggctctgataccatgaagaatttctgaactcctttattgataatgaatcggtacacaccatacacatatatatacacaaatgactgaataagaaacaatcaatctagcttaattctctcctaaaattaggaaactaaatcataaggaaatatcctaaatgatctctccttttttattcctaaattaaagtcctaactttggcattatttcaacattatgtgtttaaagtttgtatttaccatccattgggtttgtcacttaggcaatcatgcattagatgcattagtaaagtgtatggcaagacattaggcttctgttgaaggagttttttcccctttgtcatttgtaatgaatgtcgtccaaatttgttttgacttgggctgacagatttgcccttttagactagtatatatctattttcctttttttgatctgactttgtttagaggattgtatacttgttagaaggatttctccttctttgtactaaccatttcaatttgatgaaatggctgtttctggtcagatgcaacaaaaaaaagaaaaaaaaaaaaaaaaaagaaaggggaatgaatcgtgccgtgaatagactactataagatggtcaatgatgagatatgtgtagttttccaaaattaagtaacagaagttctacatatgctttattctgcttaataagtttatgtgcaagctttttcatattcttacagatactttgacatttctgatcttttgattttctaacatgcaaaaagtttgtggtgagatatgactatgagttgtatctaaaaattcagcgtaggaactctttggtcctgcataaaataaacagatgggttatgtctataatatgtaggacatcgagctctgaattactggtgcatgttacactcgttaatacaagaccatgtctacccatatttggcgctcatgtggacacttatcaatgtgtccacctttatttactttgtgaatgtacagatgaagcgaatgtatcctttcaatatggaaggaattatacggttattaattgcatcattatatgcattctaagaaacaggctaaaacacacacaagcgcacagtgaatttgaagttcaaaacacacacatggatatatagatatgtatgtttgtgggcataatgttggtagtatgcacacatgtaaattgtacgtctattgagatttttaacaatgtccaacatgctgtgccattttggaaaaatgtatcgtgtctgcatctttagtttctgttaaaatctcattgaaccttttccttttctttccagtgacatggtttttcttatgtattacctttataacccaaaattgaggcagaccaatatgatttcttaattgtggctgcaggatcccaggtgcacagtttgtctgcttgtcccaat

SEQ ID NO: 12741 - DNA, 10290 bp, Vitis vinifera
  Intron number 19 from transcript GSVIVT01027551001 (locus GSVIVG01027551001) derived from phytozome v7.0 (chr-ID chr 15; pos 15704113 to 15714402 reverse strand)
taattcatttggttttggtgggtgttagaaatatttatttattatgttagaactattatctttctttttaaaagtaagggtaaattgatttgtttttttgtttttttttaattttttaattgtaattaaacttatttaaactttatttgtgttctatgtattttttaagtggtcataataagatgtcttaatttttttttctctgattgttttaaatcttattcgtatatatgtattagagcaagtgtaacatccctagtttttaatattaatacttctaaagttccttttagccaccttcttactaagcaagtaagagaatcaccctcttatctatcctttactaagcttaaggtatcacattaatgcatgcaaccaaggatgaggtctccaaggcatgcaaccaagcattaagcgtcaataagcatgcaatcaagtatgaggtgtcaaagaggatgcaatcaagcaggaggtgtccaaggcatgcaatcaaatatgaggtgtcaaagagcatgcaatcaagcaagaggtatccaaggcatccaaccaagcacaaggtgtctaggcatgcaaccaagtacaaggtgttcaagcatgcaaccaagcatgaggtgtctagacatacaaccaagcacgaggtatccaaacatgtaaccaagcatgaggtgtctaagcatgtaaccaagcatgaggtgtccaaggcatgcaaccaaacatgaggtgtccaaggcatgcaaccaaacatgaggtgtccaaggcatgcaaccaaacatgaggtgtccaacatatgcaaccaagtacgaggtgtggaaatgcatgcaacctagaggacactaagccaccttcatcgcttgatactagtatgacatggtgactcaacaagttgttgttcttgccaagcagttgcaaggattaaacatgtgccacgtgttatctctagcaagctgctacacctaccaagtagctgcaaggattaagcatgtgccacatgtcatttccaaaaagttgttgcacttactaagcaattgcatggattaagcacacgtcacatgttgtttccaacaagttgctgcacctaccaagcagctacaaggattaaacacatgccacatgtcatctccagcaagttgttgtacctatcaagtacctgcaaggattaagcatgtgccatgtgtcgtctccatgtaataagtgaaacactaatcactaccctttgatcgacatctagcgacgagtctcctatgtgtttcacctactttgggttcctataaatagggcattcacctactaagaaaggaaaggaaagaagtatgaaaaaactcctatagtggtgttattctaaaagttggatctttaagtcatcgtaatggatgtagtgcaataattccaatctaaaagatgagtgatcttataatacatgattttatatggttttaaaattatatatcttatgtttcaagtgtgatatatgtattcattatttttgaaatatcatgagatatgctttgaaaatatgttggtcaaatgttgtgtttatattaaatgtgttccctgtatcattgatatatatatatatatatatatatatatatatatatatttaagatggttctatgattatgaatggatggatatggtttagggaagctctatctaaagaggctgagttttaagccctttcaatctttcttgagagattacctagtacgtactattcactaaaaatcactggcactatcgttattgtactttatattattactatgcatgtggttgtaatatgccttggacttatattgtattgtagagatggagggacacacagtagccgattaacctagtaatcttttgtgctaagagactaaggggcactggaacagtttgtatggaaagtgtgccaagagatgtaggggcattgtgtctatatgacaccgtgttatatgagatatatgacgtttgtagacacatatgtgatatacgccggtaaagaaagagacaatggtggcaattatatttcatgatatttggatgtgccaagagttggaatggtaccgtaatcgtggattatgcatatgtttgattgattatacatcggggtgttcgatgttgtatgcctacttgattgttatactatatattatttacattgagtgttacatgcatgatgaaatacttttttctatcttagattgaccatcctaaaacctgcattatatgatcattcactcagttatactcattttatagttccccaaaattttcagatgaggacctagtagaaccaaatactgagcaagtttcagaaaatagataataaggcatatatccattgttgtctttttctttttgctttttttttttttggatatactactaagatgtagccatttccttaggtatgtacaagttttcggctccttaaagccagtttttatttactcaaaactttgtatcttggaaaagtaatgattacatagtcccttcaatatgcttctttatgctgctctgacataatttatttgattacaagttaatttccctttgtaggatggtgtctccatctcaatctttaaactagagaggagaatctgtcttacgaggatgacgcttgcaaggaggggtgggccgtcataacaaggtagattttaatggaacttttaatttatgatatctcatgggtttgagaccgtgtgtccccttggatggtcctaatcacatatgattggaaatctatggttataataattgttttactggaatttgacatatactcttagaaagctagactatgtcgattaattacataatataaggatatgagactcaaggattgtagaggtaatcttgagacgttaataaaatctacttcattagattgtagacactaattcatggggagtctgtatacggtggatatataataggtcataaactcaaatttatatcgtagacactaattcgtaagatattatagtgcagtttacctactatagtgagatatcaagtcaacttgagaattagattagccaatatttttttatgggtcatagtaattcttgatcaagctcatattccttagtgacatttttattaagggggtatttgggttctttattcatatgtatgcataagggcattttagtaaaaatataaggttgcacacaaactaattatgaatggtctttttgaattggactaattaatttattagagcccaatagagctaattaattaattaggagttaagtaggctaaattaagtgaccaaagcctaaaatgggcttaagtcacttaagcttatagagaaaattatataaacccccttataggttagggttttaggagatcttcaatctttcagactctaaagaggaaccctaggctccaccatttttagaaaggattcaatgtcttctcatgccaagatccaagaaagagagctattgggtggaagactgtttggttttcaagatctacgatgcatttttttcaattggagtttatttgtgaacattcagatcaccaatatgaccttcttatctatatgtctaagtttttaaatactattgctttcattgtatatagatctagaggaccttacgttagttatacatgtaccatggaagtctagggatggaaataaagatatttaggtattcctaattagcttttcattttgaaatgaaagttttgaggtctccatgacactttttaggtattaaggtagcttgttctccgaaaagttttattctttggtagtctaagtacatagttgacattcttgatcatgttcgccttactgatactaagattgttgataacctttttaaggttaatgttcggtatatttttttttttttggtggtaccctctaactagaccctactttacattgtgccattgttggtagcttggtctatctcacaatcacacatttgaacattacttatgttgttcacattattagtcaatttgttgcttatcttgttataattcattaagctacgtgtattctacgacatctccaaggcattttatttcaatgtcttttacttctgtccacttcctcttttggagctacgtgcatattatgatgttgattcttttatttcttttaagagcaagtaatagtctatcatttcttaatattccataaaagttggaacatcgttctatgacatctaccactaattagatatagtttggttgtgttagttatttgttgatatatatgggtgtttcattttcttgtctcactcctgtttattgtgacaacaagagtattgttcaaattgcatacaagtctgtctttcatgaaaggaggaaacatgttaagattgattgttattttactcgccatcaccttcaacacgatattcttaccttgccttctgttccttcttctttacagattgcagacttgtttaccacccgcttttgtgctttcaattttcggtggtgaactcttaatgcttcttccaggtacattgtgagtttgtggggggatgtttagtgttatttatttgttagagttatttattactatattagaattattatctttctttattttctttaattgtaaacctatttaaactctatttatgttgtaactattttctaagtagggtcataataaaaaaaaccctagattttcctttctttttctctctatgattcgtttgaatctcacaatgggtacgtatctcaatctctcttgacagttactaatcactgatttccaatttaggggccatgggaagtctatttcattccatgtaactttgcatttcaaaccgtccaacttcataaagttaggaccgacttttggagttcaaaagatgacttcttgcaattttttttgtatcgatgataacaattaattgtaagtttaatgactgaattcaaggcaattgagatggcatgtgtcaagtagtttggaaaataatatggaatgatctaattttgttacctgtttatatgtccctagaatatgaatctcaatgcacagtgtgatccatgggacattgaatttcctaatcatttagttgaactagtgtgcttctaattagctttaaggaaaagatgacttctaataatcagagagtgatttcatcttctcttaatttctctctttcttcctccgtctattcctcaatccctagtaacttccccaccagctatgtattatttcctgcttttttgcttaaacaattactccaataatgaaattggttgaagttattggactaaaattgacttagaacttaagttaacaattcatttgatgttggcttctcttctttgttccttttgttaggagcttggagatgcgatgatacctaaagatatagacatgagtgagaagtttgggtttacattgcagaaagcatagcatattgggatgaggggttttttcgagtactcgtcctgccctatccataatggaatgagtttgatattttttttaaaacccgagatgggtttaaaacaggtttggatattgtcttatccctctctacctcgttccaattatatataaaattaaattaatttaatttttattttcatatttttaatatataataataataataataataatgaaatacttttcaataagataagttataaaaattataatattttaattatttataaaatatatttattttaatgtaattaaaaaaaattaaaatattatgacaaaaagttaaataagacaagatgagacgagtatggaaattcatatacccatgtcgttttgacttaacccatttaatttttttaatagaatggggataataattattttaaataaacgatgtgaggttgagatggagcaacttatcctaaacttgccctgttgtcattcctacaagaacatactattccaatcaaaatttagtcatatttatgttatatcacatttatatatgggttttgcaagctttcattattattgttgttgttgcaaaacttaagctttgactccatatattaatgtgcctcaatgataaagataaatgtcattttccaacttaattgtaagtttatttatttatcttttacaactgtttataaagatatttatagtcttatacctttcattattttataatgagattgaactattctaacaatgaaacatcaaaggattgattagaggtataagaagagacactttatcattatgataaaatttatatttgtcaactgtcaaagtataatatatctaatgctttgtgcgtataacattttactttaatgaatcatgccacatttttcatgaaattctatattgtaaaattgtttttatatgatacgtgaccgtgtaaagatatttcaagattttttaatgatttaacaaaaaaattgcaaacacttttttattctttaaaataaagaaattattttataatttagaaaacatgtttaccattgatagaaaactttttttttttttaagaatttgttatgaaaaggttaatttttagaacgagttatttttttgtaaaatattttgaataataattgaaaataaagaatattttgaaaactttttattgcataagtatatagtactactttatagagaattaatgagctcaaaaaattattttttatgtttgagttcctaaaaacaaattaaacgagaattattatatcttcgaaatattagcatttatcggccttttcgccgatcaactcattctaaatttttacgctacaaatccacttttattaataaatgttcataaacataaatatgtttaaaaaaacattattaaaaaaaattaattaattctaattattttatttaattgattaataaaagtataaaagcccttcttataattttcttaacaagtctttttttatatcatttatatgataattaaatataaaaattaaaaaaataatatatacatcgtcatttattttacattgttgaatgcatttgaactaaataaattatagttttaatattaaatatatcatcatttatctcgttaatcatattttaaactatcacttcattttttaatttctttatatttatcattttaattttgaatgtttttattttaaaatattaaaaatacaaatttattcaaaaaaattactaatatatatatatatatatatatatatatatattaaaaataataatgaaggtataatattttataaattaaaattaatttgataagataaattattaatataattttttaattttaattatttaaataaattattcttcaaaaagttgttaccacaagtaataaaattttagaaattaaatttcaaataaaatattttatataaatcttaaaaagactttaattttttatttaaaatataataaaacatatttaataaaaataaattttaatttttaaaataaataaatataaatatattaaaagaatttgagatattttttttcaaaaaaattgataaatattatccttaattatatatacatcaattatacttaaaaataattttaactttaatatttgtttttttttttttatcatttaaaactttttcaaatattttaataaattttaaataaattttcatctcatcaatattttttttaaaataaacaataatatttttagtaaaatctaattaccgatatatatatatatatatatatatatatggtgtgtatcgatattttcatgcttcttttttattatttctagatatgatatttgtattaattgctaaaccctattgccttttcttcaaccctaaaagcatgcatgatctctcaatccgtctacatcacacttcttttcttcacttaactccaagatgtgagaggtgtgaggaaaaggaaagaagggccctttcgtatagccctaggccaattatccaatggcaataatcgtgattgaatgcgcagtggctgaattgtaaaccattttgataaggtgatgattgtgaaagccaagacttttgtgattgggcaaaagaccttacacaattattttccatccaccattccaaaggactcaaatatttcctacttccgagggcagtggactcaaagaactaggtcgtctttgttttttgggtcaatggaaaaaatttaaatctttaatttttttattcaagtaaaagtaatccatttatataaactaaatattaataacaaatttattttaattatattaattgatattaatatactacttttaattgaataaaaaaaattcaatattttgattttttttgttcaatataaaaacaaacaccaccttaatataatcttaaatcacttaagatcataattatccgtgattatccctttgacaatattttttagaatagttttttaaagaatgtttatttaaaataatttttaaaactaatttttaagaataaaattatactaaaatagttacattaatatataataaaaaaagttctcaaagcattttccttattaaaccttattttcaaaacaaatttttaaaataccattttcaataaaaaaatttattataagtattttttaagtttgaaaattgttgttttaagaatagtttccaaacatctcctaaattactttcaaaaagaccacttttatttaaataaaaacctaaaattaaaggaaatagtgataactaatcttctactaaaaaggtaagatcacatagaaaagaaataaaatataatgattttttattttattttattttaccaatatatccttaaactgttcttttgaggattagtaaagaaccattaaggcaagcatacattattttatatttttcttttagggtatatttgtataggtaaaaaagttgaatgttacccggtaaatcaatttaataacttaatttaatctaataacttaatattacagtttaaaatcaaaatcaattttaagtattaagtcaaaataactaatttgttttttttatcttaaatttcttttaacttatttatccgtgtttacttggaacatattttagaactataactttatattcacaactcatcttttataataaacatttttggagttaacttatatatctataatactttaaatatgaatatttaacaaataaatttattaattaatataagtgaaaatataaatattagttaaaattgatgaggctaaatatgtaaatttgataatttagaattaattttaaactaattttatcaaataacattgatacttataataaaaataaagtaataagcttcaaatcaataaacaacctaaaaataatttaattaaaattaactcaagttataaaattgtaaatattaaattttatcaaacaccctttgcctctttgaatgataatatattgttttttggatagtgtatttttcctcaatatttatggtttttcatgataggtttattaagaattttgtcctttcttttggttgtggcccataatctttcaaaacaaatttttgggattcgtagttaatttcacgaataaaatgcttttatgggtgaagctcgtcagcatggtgattattatttttgttgtgtgccttccctatcaaggtaagtttcatctctatgtttttattcttttatatacgacacttagagttacttcaaaaatattttcttgtcttggtagaaaaataatatatttaataaaatttataaaatatttgaaaaaatatatatttaaaattacttataattttcttttttgagaaatcattaattcatgattctctcgtaaaaaaagttttagaaaattaattcaattaaaaacaaaaataaaaataaaaatgctcttaaacacactcttaatcaatcaaattcaataaaacatttgaaaatcaaattccttcgttgaacttatgttttcccatggtttcttctctctatcttttaccctattaatctttatttaaatgtccaaaaattcattaattccttcagaactcctcaaacccaattatggaaaccggatattgtggaggaaaatgaattcatttggctaaaaagtcttcatctttatacacatatgtcacattcaatttgatgcatttatgaaatttgttatagttattaaactgaattgacctagaaaatttaagtaaacaatcaattagaagtcagtcttccttggagtttcttcttgcacacatttttcttgagctttcatgtagaaaacattggtaagtgcaaattgcaaattatgatcaatgaaaccttaattctaacattgctttgtatgatcaggatctctttgttgcgggaactgacacgatttcaag

SEQ ID NO: 12742 - DNA, 7735 bp, Vitis vinifera
  Intron number 1 from transcript GSVIVT01027555001 (locus G SVIVG01027555001) derived from phytozome v7.0 (chr-ID chr1 5; pos 15680484 to 15688218 reverse strand)
tttggttgctaaaaaatataaagacggaaaaaaaagttaaacaaaataattttcttatacttgattatttcaagaaatatataaaagaaaatcaagttttaaaaaaaaagttaaaaacttatacattttcaaatcattttatttttatatttaaaaaataaaattaaataaataaatttgaagtaatctattgatcgtctaaatctttttttttttttttcactttctcttttattttattttccttttatattttattttccttaaattatatagaaatcaaacatactctgacaagtttattccaacttgaatgtggttaaagtatatcttttaactaaatagaaaataacaattttttcttcaatatttttcgaaaaccaagtatataagttgtaacattaattttctatattccatgaacaattttctcaaactttttctagaaattagaatcaggaagtagaattttaaatagctaatttcaaaaaagtgatttcacccgtgaattggatagtccacttgatgttggcttctcttcttcactcctctgattggaagcttgaagatggtctgaaaccagaagatatggacatgactgagaagtttggatttacattggggaaagcccaacctctccaggctgttcccatcaagccatagtatttgtctttatccaaggaccaacttggataagtatatatttttaaaaatatcatattgattattagattatgaaaaaagtatatgtatttaagttcctgaaataatgcagttattaataaagaaaaataatatttgcttcactgtcaatgtatcatgttggtataacttttgagtactattttgtattgtttcacttgaggtaggatggaggaaagaaataataaataaaaatttagggacaaattgtaatgcagcaaaatacgagaaatgatttcattgttaaccaaatcatgtacatatacaaataaaaaataaagaaaaatacgaaattttctcttaaagaaaaactcaagctcactttgatgaagacttggatgcctaaagattcattaagtctaatgtaaatttgtaagataaatcatttgagtgcacttaggataaaattaattttcatgcattcatttatatttaactttttcataaaagtgagctttaagtatttaaaatagaatctatactctttctacataaaaattaataaataaataaataaataaataatataaaaaaaaaactttaggcaaaattctttcaaattgacatataaaggtttgtaaatgagttggcgaagtatggggaaactttggactgaaaaggggaagtttttggattcgtcagttaagggtttccttgaaccagttcaaccaattaggtgttttcaattgaggatcgattaaggctcctaaaaatatactctcttttagaaccttagtgttgttggcataggtttagcctttcttggtcaagcattggtcaaggtctggtcgagagttggtcaaagcttaaaaatgactaacaatcacctacaatgtattaaatgtctaacgactactcaaccagtcaaattgaagtctgattggttgaagtttggttttctataaattaagagcttctatctatttattgacaagagaatactgtattaacttacttacctactcttttctattattcaaagttctcaaactcaagtgtatttattttttttacttaaaaatcatttagtgtactcatttattcttatcacagttttcaattgtattgagccattattaattcaagctgagatttgttaaacattcctcggccaatcgttatttcctatgtctatttcatgaggagtctattgaccacatccttttacattgtgacaaggtaagggtgttgtgggagttattattctctatatttagagttttttgggtgatgcaatccacggttagagagactctactaggctggcatggttcctttattggaagaaagcagaaaaaagtttggagggtagctcatttatgtctattctggactatttggaaaaagagaaatagaagatttttttataatgtggaactctcatttgtgtaacttgttaacttggaccaaactgtttataggtgaaagattaatattcatagtaaattttattaattgattggggttggtttgagagagagaatttttttttttttttttttttttttgctctttttggttgttgttgtatacaatgtgtgtactttgatttgccctttttggcttttttaatataaatctcatttattgatcaacaaaaaagttgttaaacattccttattggtgaaaagttaagtgtttagagctttaagttggcattgaacttaaaggggtttgtaaagcacaatagagtcattgaatccaattgtacaagtttgaaagttaggtttaaaactttgattagtagaacactcaattggaaatgagattgagaagagtgaatgtaagcatatttattgaacaactataaaatgagtttacatttttttttccttttttatttattaaattactttaattgctacttaaaattttaatcactcaattcaccttccttgttttcctaaattacatcaacttactttaccatatagaggatggacaatagaaaacgaagatgatcagatttctcacaatttggtgatggttgaaatcacttttttatgtggatcttttacaaatataataaaggataaagagagaggcaagggaaaaaaaaaaagataaaaaaaaaggtagcggatcatgccttcatacgtgtctcaactccttccaaaacaaataccttatacttttctagatgatacaacaaaagaattgtagtgaagaatggaataagcatgatgtcaactccgcttgtttggctttgtggagcctagttttgtttgatccggtttgacgacccaatccgaataatattgcatggctttttaatgggagatttactgaggcctattgggcccgtttagcccattgtggaaccacattttgtaattagggttttttagtgtggtgtggttgtcgtgttatatatagagagaaaatattgtaaccactgtggttgtactctatattcttccttgataatagtgatatccctgcaactccatggatgtaggcaaaattttcgaaccacgtaaatactgtcttgtgcgtgtgattgttttttttctttggcgtatgttttctctcatttttgtttctcacaggttgggaattcagtttaattccctacacctggtatcagagcctagggttaggtttgagtgggagcaatggcagaggaagcaggaaaggcctctggaatagaaaagtttgatggcacagactttgcgtattggaggatgcagattgaagattatttctatgggaggaaattgcatctgcctcttttagggacaaaatatgagagtatgaaggctgaggcgcttcttgacagacaggttctaggagttattaggttaactctgtctaggtttgttgcacacaatgttgtaaaggagaagaccacaacagatctgatgaaggctttgtctggtatgtatgaaaagtcgtccgcaaacaataaggtgcatctgatgaagaaattgttcaatttgaagatggtagagaatgcatcagtagcacaacatctcaatgaatttaatacaatcacaaatcaattgtcgtatgtagaaattgattttgatgatgagattcgtgctttgatcgtcttggcttctttgccaagcagttgtgaggcaatgaggatggcagtaagcaattctacaagaaaggaaaagctcaagtacaatgatatacgagatttaattatggctgaggagattcgccgaagagatgcaggcgaaacctcaggatctggttttgccctaaaccttgagacaaaaggcagaggtaatgacagaaattcaaaccagtgtagatcaaaatccagaaattctaataggaacagaagtaaatctagatcaagccaacaagtacaatgctggaactgtgggaaaacatgtcactttaaaaggcaatgcaaaagtcctaagaaaaagaatgaagatgattctgctaatgttgtaacagaagaagtacatgatgcattacttcttgcagtagacagtccacttgatgattggtttttggattcaggagcttcgtttcataccactccacaccgagaaatcatacagaattatgttgcaggtgattttggtaaggtgcatttggctgatggttcaaccttggatgttgtgggtctgggagacgtccagatatcattggccaatgggtctgtttggttactggagaaggttcgacatattcctgacctgaggaggaatctgatttctgttggacaacttgataatgaaggacatgcaatattatttgttggtggtacttggaaggttacaaatagagctaggatattggcttgtggaaagaagactgatactctatatatgacctcaagtccaagagacacaattgcagttgctaatgcaagtactgatacaagcctatgacaccgcagacttggtcacatgagtgagaaagggatgaagatgctgttgtcaaaaggaaaactaccagaattgaaatccattgattttgacatgtgtgaaagttgcatcttaggaaagcaaaaaaaagtgagcttcttgaaaactgacaagacaccgaagttggaactagtacacactgatttgtgggggccttctccgattgcatcccttggtggttcaaggtactacatcacttttattgatgacttaagcagaaaggtatgggtttattttttaaaaaataaatctgatgtatttgaaacttttaagaagtggaaggtcatggttgagacagaaacaagtttgaaagtaaaatgtttgaggtcagataatggaggagagtacatagatggagggttcagtgagtattgtgctgcatagggaattaggatggagaagaccattcctaggacaccacagcagaatggtgtggttgagcgcatgaacataactctcaatgagcgtgctagaagtatgaggttgcatgcgagactaccaaaaactttttgggttgatgctgttagcactgcagcttacttgataaaccgaggaccatcagttcccatggattttagacttcctgaggaggtttggagcggtaaagaggtgaagttttcacatttaaaagtatttttttgtgtttcttatgttcatattgattctgatgctcatagtaaacttaatgcaaagtcaaaaatatgttttttcattggctatggtgatgagaaatttggctacaggttttgggataaacaaaacaggaaaatcatcagaagtagaaatgtgatatttaatgaacatgttatgtataaggacaggtcaactgtagtgtcagatgttatagagatagattaaaagaaatctgagtttgtcaacttagatgaattgactgaaagtactgtccaaaaagggggtgaagaagataaggagaatgtaaattcacaagtagatctgagtacacctgtagttgaagttcgcagatcttctaggaacattagacctccgcaacgttattcacctgttttaaattatctcctattgactgatggtggcaagatgagaattcaagcaagtgggagttagccatgaaggatgagatgaattccttgttggggaatcaaacatgggaactgactgaattgccagtaggaaagaaggctttgcacaacaagtgggtatacagaataaagaatgagcatgatggtagcaaacgttataaggccagattagttgttaaagggttccagcagaaggatggcattgactacacagagatattttctccagttatgaaaatgtcaacaatcagacttgtactaggaatggtggctgcaaaaaacttacattttgagcagttagatgtgaagacagcattccttcatggtgacttggaagaagacctttacatgattcaatcagaaaggttcattgttcaaggacaagagaatctagtctacaaactgagaaaaagcttgtatagccttaaacaagctcctagacaattttatgcataacaagcttgtataagaagtttgacaattttatgcatagaattgggttcaagagatgtgaagctgatcactgttgctatgttaagtcttttaacaattcttacatcatattactgttgtatgtggatgatatgcttattacagggtcagacattgaagagattaataatatgaagaaacaattgtccaaacaatttgcagtgaaggatttgggagctgcaaagcaaatccttagtatgagaatcattagagacaaagctaatgatacattgaagctttcacagttagagtatgtgaagaaagttctcagcaggttcaacatgaatgaagctaaaccagtgagcacacccttgaggagtcatttcaaactaagcaaagaacagtcaccgaagacagaagaagaaagggaccatatgagcaaggtgccctatgcctcagctattggcagcttgatgtatgctatggtgtgtacaagggcagacattgcacatgcagtgggagttgtgagtagattcatgagtaggcttggaaagcgatattgggaggcagtcaagtagattctaagatatttgaagggttcattagatacatgtctttgcttcacaggtgcaagtttgaaactgcagggttatgtagatgttgattttgctggtgatattgatagtagaaagagtactactgggtttgtttttactctaggtggtacaactatatcatgggcttcaaatttacagaagattgttacttgtctactacagaagctaagtatgttgcagcaattgaagctggaaaagagatgatttggctacatggtttcttagatgaattgggtaagaagcaggagataggcattctacacagtgacagtcaaagtgcaatttttcttgccaaaaattcggtttttcattcaaagtcgaagcatatacaaacaaaataccactttatccgttatcttgttgaagataaactggtaatacttgagaagatttgtggatctaagaaccccgcaaacatgttgactaagggtgttactattgagaagttgaagctgtgtgcagcttcaattagtcttctagcttaaggacaggaggatgagttgtagggatgagggattgtttcttgaaggatagcggtttgatgttggtgattgaactagtctccaagtgggaaatttgttgggctttgtggagcctaattttgtttgatccggtttgacaactcaacctgaataatattgtatggctttttaatgggagatttactcaggcatgttaggcccgtttagcccattgtggaaccaccttttgtaattagggttttttagtgtggtgtggttgtcgtgttatatatagaaagaaaatattgtaaccactgtggttgtactctgtattcttccctaataatagtgatatccctgcaactccatggatatagacaaaattgtcgaaccacgtaaatactgtcttgtgcgtgtgattgttttttttctttggcgtgtgttttctctcatttttgtttctcacaagttgggaattcagtttaattccctacaccgctcccctccaaggtaacggtctcgcctttggatctttcgtacacatgcaaggacgttgtctttcactacatttc

SEQ ID NO: 12743 - DNA, 4601 bp, Vitis vinifera
  Intron number 1 from transcript GSVIVT01008905001 (locus G SVIVG01008905001) derived from phytozome v7.0 (chr-ID chr1 8; pos 3299437 to 3304037)
cggctctcgggggcggcagcaccattactcaacaggtaattgtttttttcgagttcctgacgcatgccacgtgtttgatgtttttatccagtgaagttggttttgttgttatctcgtataagaatattgggtgttgtttatttggggaagggtgtaaataggaggatacgggtaatgattgcttgaataaaatgtaaggaaaaaaaagaaagatagaaaagaaaaatgtattagtgtggtgcgtgattcatgaatctcctaataaataagcctttcttgaggtttgacgggctctccattctttagatattactctctggctgatgtgagcaccaaataaacgatggctcccgtatgggccaccaatcaaagtcaatttggtgttgtgagagagagtgttttagcagtcaacgagaacccagagggagaagtggccaaaagaaatggagaaaaccagaacaaaccaattccaaaccttccagtaccccactaatcaaacccatttgttggttctcccagttcttttctccatccatgctctacatgggattcttagttttcttatccactattttgttatccttttcccttgtctgtggcctttcttcctcagagctcatatacccaaacttcactgcttcgaactttaattttgttgaatataatggcgcttttttattctctcgtaatgaaacattcaaggtggctatgttcaaccccggtgctcaacagaagaacttctatttgtgtatcattcatgtagcgtctggtgccatcatctggtctgctaatcgtgatgctcctgtctcaaattatggtaagatgaatctaacaatcaatgggattactgtcactgatcaaggtggcagtgtcaaatgggggacacctcctttaaaatcatcagtttcagcattgttgctagctgaaactggtaatcttatattgctcgatcagttcaatggttctctttggcagagttttgattatccgactgacacaattgtgatcgggcaacgtttacctgttggaacttcattatccggtgctctatcagataatgacttgtcaaccagtgattacaggtttgtagttagtacttctaatgcgataatgcaatggcatggattgacatattggaaactgtcaatggacaccagtgcttacaagaactcgaattatctagtggagtacatggcaatgaaccaaaccggtctttttctgtttggtcgaaatggatcagttgttgtaattcagatggatttgtctccatctgattttcgaattgccaagttggatgcatctggccaattcatcattagtaccctttctggtactgtgttgaagcaagaatatgttggaccaaaagatgcttgtcgaattccattcatctgtggcagacttggtctgtgtactgacgacactgcatcaaattcccctgtctgttcttgtccatctggcttccgcgctgatccaaaaagtgtgactaattgtgtgccaagcgatagttcgtattctttgccatctccttgtaatttaaccaatagtgtcagtcaatcaaatttgtcggttgtttcatatctgatgcttgcctatggtgtggagtactttgccaataatttttgggagccagttcaatatggtgtgaatttgtcggtctgtgaaaatctctgttcaggggactgttcttgcttgggaatattccatgaaaattcttctggttcttgttatttggttgaaaatgtgttgggatcccttatttcaagctccacaaatgaaaatgttcagttgggctgcatcaaagttctggttgggtcttcaccaaatatggatggtaacaacagttctagtaatcaaagtcaggaatttccaatagctgctcttgtactcttaccttcaactgggttcttcctgtttgttgcactaggatttctctggtggagaaggtggggattctccaagaacagggacctaaaattaggccactcaagctcgccttcttctgaagacctggatgccttctccattccaggcttacctataaggtttgaatatgaagagattgaggcagcaactgataatttcaagacccaaattgggtcaggtgggtttggtgccgtttacaagggtataatgcctgataaaacccttgtggcagtaaagaagataaccaatttgggtgtccaagggaaaaaggagttctgcactgagattgcagttattggaaatatccaccatgtcaatttggtcaaattgaaagggttttgtgccaaggggaggcagcggctattggtttatgagtatatgaatcgtagctcattagaccggactctcttctctaatggacctgttttagaatggcaagagagggttgatatagctcttggaacagcacgtgggcttgcatacctgcacagtgggtgtgaacataagatcatccattgtgatgttaagcctgagaacattctcttgcatgataatttccaggcaaagatatctgattttgggctctcgaagttgttaagtcctgaagagtccactctattcacaacaatgagaggcactcgtggctatcttgcaccagagtggcttactagctctgcaatctcagacaaaacagatgtttatagttttggaatggttctgcttgaacttgtgagtggaaggaagaactgctcattaagaacacaaagccatagcattgatgatggaagtagtggtggtggccactcttcattgttgtctgggtcagaacctgtgtacttcccactatttgcattggagatgcatgagcaagggaggtatttggagcttgctgatcccaggctagaggggcgggtgacaagcgaagaggtggagaagttagttcttgtggctttgtgttgtgttcatgaggagccaacactgaggccatgtatggttagtgttgttggcatgttagaaggtgggataactttaagtcagccaagaacagaatctttaaatttcctgcgcttttatggacggcgattcactgaggcttccatggtagaagagactgatgggcaacagactgttgtgttgtatccacaagcaaatgcttctcttacaagcattagcggttcacacacttccttctcttacatctcatcacagcagatctcaggcccaagatagtgttgaatatccgaggttttcatggctagtgtatagtttgttgtctatgagtggagagcctcaaaacatatgcaactcaaaatcccactgcacacttcattctcttagtaggaactctactaaatgaatgcttcttatgtcacgttacaaaatccaaggttgaattgttgtgggttgtgtggcttgtgcaacgtgtttatttggaatcactatttagattttattgtaacaatttagatgtccatccatactttgtaattttttttatcataatttgattttgtgattctcatatcttcctacaatatatgagattgtgctaaaacattgatgtctatgtgatttattaagtgtttattgtgagtggctggccatatagtgtatatgtttttggcactccattgaataacatgttctttgctatttttaactcctttactttcccacatagttttctttttgttttttagttacctccttttgggcatttgtcagaaatcccaaaaaattggaatcaagactaggtaaaactggagtcaatgtggacccagaaaattcgggtccactttattcttattaaaattcattactgcaaaattcactttaaagccttgaaatctttcttctcaaaaaatgaatgttcctgctttgatacaaaccatcactgataaatatgcattcatgggtattttggatgatagataaggtaatctatattcttgacagatgtatatcagtttgttgccttagtgctaatatttgaatatactggttttgtgatctttctgatttggtcctattaaaaaaatttcatagcaaagaattttggtagttcttaggaatactattagggcaatattgtattcaattttcacttagcgttgatggagattaataactgtaacttcaataagaatgcttagaaaggtggattaagttgctggaatggatgccaaaagatctggccttgtgagcataatgtcagaaaattgtctctaaactcacttttctggatgtattcctaggatctctagatcaatttgtgcaaaatgttcgaacttgcttctacatgaataggtcatataatagaagggtagacgcccctattttctcgttagacggatgactctcccatttctgataaagacgggataggatccactttggcagctatttttcctaccagtgtgtgtgtgtattttcttaatatattttgtacttgttgccataagctaagagtcatcacactcgttccaaggcttgaaccatcacacaccttttagacattggttttctatttttattttatttttagctggttctatttatctgcttgctgattttaaatataacacttgctttgaagttcctttttcctttcattttatttcaactccatttctttccctccttgatgttgatttttcctggcagcttgtcaagaacac

SEQ ID NO: 12744 - DNA, 7807 bp, Vitis vinifera
  Intron number 12 from transcript GSVIVT01000074001 (locus GSVIVG01000074001) derived from phytozome v7.0 (chr-ID chr 14; pos 3255045 to 3262851)
gtggtgctgttggcttctaccaaggggtatcttttatatatatatatatatatatatatatatatatatatatatatatatatatatatatatatatatatatttattttctgcacaggaagcaagaatgttgtataaaggggaaaagatgtgttggaattgtcttgaagttctaatttgattcaatttctaatttaatgaaaattctttttcatagagaatagtttatgaatatgtcatttatgatatttccttatgaaaatagatgtctttattaaataaagaaagatgagaggaatatatttataaatattctaggtcataaaggaatcggggatgaagcgtggtctgtgaagccgaccaagcggggaggtcaggggtgatgcggatgcacgcaccagggcggaagtggaagagatggtgtgtgcgggggtcgaggagcagtgtcggtcagtggatgggactggacggcaggcgtagggagtgggcttcgacgtgacgggcccctaagctcaagtgggtctgctaacccggcctttctcggatgttgggctgtcgtcgtcaggcctggtttcaaaatgggctactgggttgtcattcccctcagtgggtaaagccttaaagggggctgagtttgggcagtcgcgtcccatgggcacggggtgggccgcaacttctgggccggccgtttcttatagggaaaggcttggcccatctcaggcccagccttttgaaagtgggcttcttttaaaagcctgtcccctaaatatctctggctatagcaagggatgcaatttggagttggagttcgccagattccgtgagaaataagttgggaggaggcagcagccggacttacaccgcacaatggcaaatagtgtgctagaggaagaagctgcaaggtatgggttagttataaattcaaagggtataagggcactagggtcttcctcttctaatttcttttattttggttggactccgaagagggagtattacgactattcaggggcgctaagggagggcatttaggaaggaagtgggttacgaaaaccaattgcagatgagcacgctgagaaaggggatggctgttgggacttggtagaggtcaacaacgccgaccctttggaaaggaattcggggtggactataggccagactgaatcccaagaaggaaggaaggaaaaacagcttaattaggaggaaaatagtctggttaagttcagtcattttttaggcttatcaactgaagggttggagaaggaaattttgaacttcttgggcaaaatcaggaaaatgagggagaagatacacagtaaaggtctgctggagaattcaagatttgaaagggagcttaagaggctggagtgttcaattaattatgagggggatgttaagaaaaaaggtcctattcagggcagagggaaccagatcgcagttgcccaatgaacctaaaaatattgagttggaatgtgaggggagtgaatgatagttccaaaatgaaattaattaagtccgttgtaagaaaacaaaaggtggatttgttttgtattcaagagacaaagatgcaagtaatgtctaaaagggtggtgagaagcttaggcccggggagatttctagactggagggccttgaatgctatgggatcggcagggggtgtcttgatatgctgggataaaagatcgctagagattttggattgggaagagggccaattctccatctcctgcagattcaagaatatgggagatggtgtggtctgggtgtttacgggggtctatggccctttctccagagaagaaagggagtgtctgtgggaggagaatggagcaatcagagaattgtgggaggaacgttggtgcttaggggacaattttaatacgatcctttaccaatctaaaaggagtagaaatgggagaatcacctcagttatgaggagatttgcccaaatcataaatgatttagggctagttgatatcccattacaaggaggatcttttacctggagtggggggctcaataatcagtcatgggctaggttggatagatcccttgtgacccccagttggtttaactagtacagtagggtctctcaaagaagactacctcaccctacctcagatcactttcttgttcttcttgaggggggtgggctaagaaaatgtccttccccattcagatttgaaaatatgtggctcaaagttgagaggttcaaagacctaattgggggttggtggcaagggattgtggttagaggcagtcctagctacagattggctgttaagttgaaggagttgaaacaaaatctaaaaatttggaacagagaggtgctcagaagtttggagagaaataaagttgaagctctccaacaagtggagctttgggatttagtggaaggggagagaagcttaacagaggaggaattaagccgcaaaaagaaagcaaaggagggttatgctaagtgggtgtcgctagaagaaacccattggaggtagttatcaagggaattatggctaagggaaggggatagaaacacggggtattttcaccgtatggctaatgaccatagaagagttaatttcctgaataaaataaagataaatggggtgaggctttcaaaggaacaagaagtgagggaagggattgcaaacgcctatcagcagttgctctctgatagttttggttggaaggcagatatagggggtctgctgctaaagcagatcagttagtcagaagcagaagtcctggagctcccgttttctgagcttgagattcatgcagccttaatgaggatgaatggggacaaagccctaggtctggacaggttcacggtggttttttggcaaaactgccgggagactgttaagaaggaagttttggatatgttcaaggagttccatgagcagaactccttcattaagagcctaaataatacgtttctggtttttttaccgaagaaaggaggggcggaggacccaggcgactataggcccatcagcttgttagggggattgtacaaattgttggctaaggtgctggccaacaggcttaaaaaagtgataggaaaggtggtgtcacccaatcaaaatgcatttattaaggggagacagattcttgacgcctccttaatcgcaaatgaggtaatagattcatggcaaaaaatgggagagaaagacctaatttgtaaattggacatagagaaggcgtacaacagcatcaattggcaattttttgttgaaggttatgcaaaaaatgggatttgggccaaagtggttgggatggatgtggagttgcatatctattgccaaattctcagtgttggtgaacggtgtgccaattggatttttctcaagttcgaaagggttgcatcaaggggaccctctatccccctacttgttcgtcatgggaatggaagtgctaagtgtgcttatcacgagagctgttgaagggggttttatctctgcgtgtagcatttggcgaggtagagggtaggctgtcaatatatctcatttactttttgtggatgatatagtagttttttgtgaggcaaggaaagagtatttaacgcatttgagttggatacttttttgctttgaagcggcttcagggttaaagattaatttggacaaaagtgaggttattccagtaggggaggtggaagaggtgaacaagatggctgttgaaatagggtgtagggtgggacagctgtctgtcgtctacttggggctaactttagggacgcctaataaagccacttccgtgtgggatgaggtgaaggagaaggtgagaagaagacttgccctttagaaacgccaatatatttccaaaagtgggagaatcactcttataaagagcacgttggccagcatacccttgtatcaaatgtctttgttctgtatgccaaaatcagtggcaaggaggcttgaaaagttacaaagagactttttgtggggaggggccaatggggaaaaaaaagcacacttagtcaagtgggaggtggtgtgtgcggataaagaaaagggagggctgggattaaggaagcttgcttgtttgaacaaagccttgctaggcaaatggatttggaggtttgctcgtgttaaggaggatctttggaagaaggtgcttgaggcaaagtatgggcaagaggaatttggatggaggacaaggaaggcaaatggggtgtttggagtaggggtttggaaggagattttgaagaaatctgattggtgttgggaaaatatggtgttcaaggtgggaaaaggcaataaaatcatattttggacagatccttggtgtgggaataatgtgttatcccaaagtttcccaaatctctttgccatggctgcccaaaggaatgccacggtggaggaaatgtgggatcagaattttggccaaggcgggtggaatttaaggtttttaagggccttaatgactgggagttggatacggtgggcaacttgctggttgtgttgagggagcatagagttacgttggaggaagattcggtgatttggaaggaaggaagagacgggctgtttagagtcaagagagggtacagttggcaagccatattgtcgccgagttcccgaatagcaatatatgggtggatagagttccaaccaaaattgcattttttgcatgagaagccgcttggaggaaggttctcactcttgataggcttcaaagaagagggtggcagttccctaactactgttttttgtgtggttgtgaagaggaaacgataaatcatattttaattcattgtacagttgtcagagttttgtgggatatcattcttgggttgtttggtgttcagtgagcctttccagaatctgtaaaggaggttttatttagctggaagggctcttttgtgggaaaaaagaggaaaaaactgtggaagtccatcctgctgtacattttttggacaatttggaaggaaaggaatagattagctttttaggggagggtgttagcagttcagaagttaaaaacttcgtttgtgtgtaatgtttggggttgggctaaattgtacattggtgtggagtcgatctcccttataggcttcttggagtggttaacctccacttaggggttggggtgttttgttcttttttggttgggaggccttagtcgcctcatatactccctgtatgttttgcggctattttgcctcttgataatatattctgtgcttacttataaaaaaaaaataaaggaaaaagttataagatgaaaatgtgcatgtaaagaccataggaatgtgaagaatagataggagacaccttgtaaagcaagaagacaaatgatgttttgggactcaagttcaaggtgtagatagtaggaataagaaaatatgtgtgtgttttgaaattgagttttgtattttttttttctttcctatttaacattctctatagtagagtggattttatctctcatctattgatgtaatcatagttagccaaaccacattaaagccatgtgtttgtaatgtgtgtggattattttatctttatgttgttgcactaatatgaggcattaaagcttccactaacacaattagagctatggtgaagatttctagaatagctaaggggaagatctaagacttgggatttagctttgctaatttgaacataaagatggtacaataatatccaaaattcacaatagaatgaaaaataaagtcggaatttgttgttttcttattggcacgtgataaatggagcatatactcattgaatttagagtaagtgtagccttttatattcttatttgattatacaaggtggaaacaatgaatgtctgaagtgtttggatccatggatatctagtaaaaggcaaacaaggagtgtttatggcacataagggatttgtgacatggactaagaattcagaagattaagttccatggacctacaactggagatgaagtaatcttgtttgttatttcttttctcaaaagttaagtttgtaattcatgtggttcaaacaagtttctaaatggagtgcattgattaattactcaatgacaacatattgaatgagtcaaagtatgctgctcactttacattgagcattttgcatatcaatgtaattaaggctttgggctttcgaaataggatcaaagaagtgcttcaaatcattgtgaagaatttctgaattcctttattgattttttaggtacacaccatacacatatatatacacaaatgactgaataagaaaatatcaatctagcttgattctcttctaaaattaggaaactgaatcatcctaaatgatctctccttttttattcctaaaatactttcctaaattaaaaccctaactttgaatgccaaatttcaacacattgctatttgacctagacctgttctaaaaaggtaaaggcatttcaaatttttattgacatggaacgagtcaagggaaaagacatgtatagaagagacaaatgtagccatgtattatgaaaagatggaaattttctcaaattcctattctgttgagaattccttttagtggaggatattgtatagaatatttcttattttgatatttccttatggaaataagtgtgtttattggataaagaaaacaaatatctttataaacattttaaatcattgagggaaaaagttatgagatggaaacttgtatataaagattctatactagtaggtaaatatgtaaagaagtgataaaagatacccaatggagtgggaaaacatgagatgttttggggcttaaatttagagtatagatgctaggagtagaaaacattaaattgttttgtgactaagggtttgtatctatcctccctttcctctataaagttctttatgacaaagtggatttattatctttcatctatagatataggaatggttagccaaaccattctaagaccttgtgcctctatttgtggatagttttgtttttatgtcattgcatcaatttgttaaagcttttgttgacacaaggaataaaaaaagagaagggacaattattacaaagaaggataagctgttttttcaagccagacaaggaaaaggacaaaaaataaaacaacttcctaagtgaaaataagacgccctaaaacctacagaatcaccaatagatgatgatatactttagggggaggagtcccctgcaagttcctttgaggtggctcttttcttagcctagcaatccactgcatttttatacctaggctatgaatcaaagaagcaccctggacctcttgaaggtttgtaatcttgcaaatccaagaatcaaaattctaaggtcctttcctatcctaagacacccaagatagaatgatagatgaatcccactctacctgaaggtatctaacacccaagaaggacactttgattaaaatttaaacctaccagtgaagcaaggatatccatatcaatgaccaaaccaaaactagctggattggagaaagctttgacatactgtcccaatgatctctaaatgagatacaaatcctcatctgccttaggttacctagagagcagccttcaaacttgagggggtgtccatatggttgtgaactggacattgcttgtgatctgacataatcatagaacaccaaggaattctttagtaattcacacccaaagagttgtgaggtggcagactgtaaatctaaaaattgatcctaagtaaacacaactggtaatcacatagttaaatacatatttaattgcttcactagagtttaaaatgttttggtttagtctttgtgcaaactttatgtatgatcagttgcttttgtgtgcaggacaatttaaaatta

SEQ ID NO: 12745 - DNA, 7336 bp, Vitis vinifera
  Intron number 11 from transcript GSVIVT01029958001 (locus GSVIVG01029958001) derived from phytozome v7.0 (chr-ID chr 8; pos 2232326 to 2239661 reverse strand)
ttacatccaaatttctacggagacgtattgttgaggtatgaatgtttgtcctgcaaagtaatcaaaagaagatgaaaactttcctttcactctaccccatttgtgtgtgcacactgcacacccgcacatgcataaaacaaaaggcagcataagcaaaaatgcaaagcagtgaattagtgaaaggcttgaaatcatcaagggtgcttggtgttgttggttattatgtcaagatctgggacaagttagccatagattagctgagtctccaactaggaacagaaacaatatcttcaagaagagcataattctgtttttctaataggcaaactgtcaaggatgttggtctcccaaggaggctcatgatataataatattataatggagaatcctgttccacaggaaaggcccttgcatcaaggtgagtaaccacatttaaaacttcctagtgaccaaaaagtgcaatgttgtgacagaccatgacaaacgacaataattagggagaagaaattaagaatataagaacattaataatatacattatataatgagttacctggttcacccaatagcttacatccatgtgaaaatgacaaagaatttccacttgtgtaataagattacaatttcgaattctcaaattccgaggccaattacattgaaggactctttttgtcaaatctttctctatattttttcacttagggatatacattatagggaactaaatccttaattacgaactaccataaagaaatctcacaataggagacctttataataatagtaaggcgcatttgccaaaatatcttctaataggaaacttttaaagaattagaaagtgaagtcatagaggaatttgagacacttttcaataatcttccactttgatgcaaactttcttgatccttacaacataaaagatttccatgccatttccctcacgttcctaaatgaacctcataaactcaatcacaaattaagtttggaaatggggatgcttgaaatttttttatgagcttttgtttttttgtttgctattgaaattttagtttggccataaatataaatgaaagttgtgtgcgtgtgtttttttattttttatctgttgtgagtgggtgggagttaggggtcaataagccatttgtttgtttcatgaagctaagaataacaaccaaatcgtcctggaaaaaagaaaaagaaaagaaagttcgaagagaacaaagctcgcctttttgacactattggaaattgttaattttccttcaatcattaagtttggagagaataaagccatttgtttgtttcatgaagttaaaaatgcatttttgaatggagatatggaagaagagatttatatggaagtccctcttgaatttggaagtgacgtaaccaacaaaaaggtgtgtaaattgaagaaaactttatatgagctgaaacaatctctaagagtgtggtttggaatgtttgctaaagtgacgaaaaatatgggatatggacaaaattagggagatcatacatcgttcatcaagtatttagattcataagaagttacaacgcttctagtacatgtagataacatcattgtgacggaaaatgatgaaaagagagatagactttgagtcaatgcttgactaagaaatttgagattaaagagttaggaaggttgatgtactttctaggaattgaagttgcacattctaagtagagaatttttatttcttagtggaaatatgtaatagaccttttcaaggaaacatggaagttggtgtgaaaaccaacaaacacaccaatagatcctaatcataagcttggagaggctgaggaagatgctattgtagatagagagatgcatcaacatttggtaggaagactcatttatctctctcacacaagaccaaatataacatatgctatgagtatgattagccagttcatgcacaactcaaaagaggctcatttggaagttggtaactgagtactgcaataccttaaggggtctcaaggaaagagcatcctatttaaacgaaacttgggactactacttaaagcatgcatagatgtagattatgttggatctgtggttgacaaaagaacaaccattgggtattgcacttttcttggtgataatctggtaacatggagaagtaaaaaacaaagtttggtggcgaggtctagtgcaaaagtagaatctcatgcaatggtccaaggagtttgtgaactattatggttgtaggttattttgaaagatttgaagattaaatgggatgacccaatgagactttactatgacaacaaagctacaatcaatattgcacatgatctggttcaaatcaaacaaaacacatggatatagataaacaatttattaaggagaaactagatagttgattgatctgtactccttatgtatctattgatcgccaacttgcagatatacgcatcaaaagtttaagcagtacaatatttcaagaaagtgtatcgaagcttggaatggagaacatctattcactatcttaagggggagtgtggaagaatgtaattaggaaagcttatagttgtatatttttgtaattgagaagagaattagaacaattctgtaatcaaggggatttgatagaattaggttaggaaagtttctatttttttgtgttaggaatacttatataaatatgtggatcaatacaaattaaaatgaaggaggaaatttattttcttacctttcaattcttctttagattctataaagggtattggaatgaaataaggaataaaaaatcgaattggtgtcatattgcaaagtttttgagaaaaaatcgtgaaaatcggaaaaaaattaacaattaataagtaaatcggtggtaagagaagattagattgtctagggcaattttgattgaaaaattgccaatatatcatcaattttttggccctttttttattgaaaatattgccttaacatttgagatttttttggaaacatcacttctaagggaaaaatctgaattgttcatcacgactcttatttttttggtactatttgtcacctaatcttgtagtgtatttgagaaatatacctattaattaggatttagcacaaaaaattgaaaaaatgaaaatctaaaaatatgtatattaaattttaaatatttataaattttaaaatagttttttttttttaaatcatttatgaaggattgtaagtttgaatatggagaataaaatttttttaaggaaatattttatgaattttaggtttcaaaattaacacttgtcttaatttgaattttacatttcaaaattaatgcatgtcttaatttgaattttacataccaagaataatctaaaaattgactttttgaaagaagattttaatttaaaataaagaatgatttcaagtatgagcaaaatgatttaaaaaaaaaaaaaaatcctattagtcttgaaattctaaaattaagttttttttggaagaacaatgatgtatggaattgagttttgggtttcaatatttatcttaattaaagtttgatttttaaagaaatgttttcttatttaaaatatattgtgggttccatttcatatttttctttaaatttaaatgatatttttattcttttgaagaaatgttgagaaattgatatatgaaaatttgaaggtaaaaattcgtggctagaatgttattttataattttggtgttaaattatgattaaaaaaactaaaagatttgattatatgaaaaataagaattcacttcaataaaacacattagaagacaagatcataaaaatgattatcttatgaaggcactttcgattttttttaataaatgaattttttttagttttatatataatttaatttaatttacttgtgcatactttttttttactagtaagcaaaaggaaaaatatattaatgaaaaggcttgtacactatggtacaaaagttatatataggggaaatcaaaagtcctagccaaaatgagggataatacaaaaaattgctccctctctcaattagatcctatccaatctacaaacttaaataaaaacaaagttctttggaatgtacatcctaacctaggacgatagatcaatcataaatgaactattcaaagaatgaaccgattgttttacattttcaaatgttattttgtttctctctttccacaaagtccaggaaagatacattgaggcaactctctacaccttctttcactttcttttgacaaagaagccatgccaacttaacagggcttccttaatcgacaaaggaagaatccatacgactccaaataaagcaaaaaagcaagcaccatagctccttagctttagggtagtgaagaaggacataatcaatagactccactttgcttttataatggtaacatttgtttgctaagggccaacctctcctcttaagttcctctaagtcaaaaccttcccttagcaagctatttaagcaaaaaaactcattttagttgggactatgaattccaagtaatgtctacgagcaaaatacttgagcaccttagttccaacatagaatacaaagtttattaagcaccatccttaggcccacccacaccaaactttcttctatcctttctttacaaacttcccatgcaatcttgagaaaaacgactacatgatgtctagatgcctagcaaaataagggttctagtgccccttctacccttgctccttgtaaacatttgttacccaagcttctttattcaacgctaaggcgtacaaggtgggaaaaacacatgtaagggttcctctcgccaccatctatccacccaaaccttcaccctcctctcatcccccacctcaaaagaagctgtagagttgataaggttccaccctttgtaatagctttccaaggcctgactctatactaacctctcacaatgtaagatctgtagcctcttacctcctcttaatatttttcttaaataacttgcttttgaaaggcatctctttgagaggtaaatgtttgactccactttcccaatagggcctattaagcaaagaaaggcttttgatatgtgtctctcttttttcattatatgattgaccaattcactaagtgcaactttttctccaatttcctccctccccttaggaaatctctttgaattttctaaagtcttgatatgatcttactaggatgtgaataaagacgtgaagtaaatcgacaaactagataaattgctacggatcagagtaagtatcccttattttgaaagatgctacctttttcacattgagagcttacatttaagccttccttcacagggaacagtagcaaatctgggagaaagggggcggcggcactgtagaaaatttcacctcgccggagctttgaccaaccgtttgggtggtcaaacgacctccgttttaactcagatttggagagggtgttctactcgacgaggggaacaatcctacgatggccaatcgtatttttagtggctgaattcttagatatgtggtatagctttctaaatgaaatttcttggaaaaaatgggatggggtcataggattacataaagcaaagaagaaagactttactctaagcaagcctacggacattagtaactaaactttcacatttggaaaagacaatgataagtacatatgaatgagagttgacatgagagtttcaagatccttaatttccaagttaataaggttgcaaaagatacagtgctgagacagaggagaaattgagaatcaatgaaataataaaatttttaattgtcactactttgaaaaggtttgggaattgagagcaaagttgttgatctacctaatggccatcacaagtcttctgacaaacaaatcttagcggtatcaacacatcaccttccaaaaatcgagcacggtgagagaaatatgagaaaatttgtgcaatgaccttccaaggacaacaatgtgatcacctaactaaaatatttttataggcaaatgatatgggaatagatattaaaagtaccaaaaagaatagcgcgtcgaagtacacaagatatgcacaacagacgttgaaaggctaagccaaaaaggagtgtgactagtagatatgccatagtgcagtgctttccctaagaaaccttcatagccacttccctaagagagttctactccttaaggaaatcttgcctaaacctagtgccccatcctcttttctccttaggcttgcacacttggtcccaacatataaggtggtctcgcttatccccctctcatcatcaccaaagaaagtccctttatgatttctcaatcttaaatgctgtagtgaaaggaatcttgaacatcaaaatgaagtaattagagatgggaaacaaacaagattgtataaaagttattctaccccttacgggcaagaaagctttttttcaactatataatctctgagaaatccaatcaatcacttggtcccaaaaaataatagccttagggttcccctcctacgggagtcccaaataggtcaaaggcctcagacacttaatgttcttgtaaggaaaccaaccttatgatctgattttgactagtattgattcttgatgaatgctcttatgtaaatttatcttgaggcctaaaatatgcccaaagaccagcaagatttgcttaaaattttgcagatctttcgtgcaagctcttgaaaagtgtgacaccttagctttctttcttcactgtaagaagccttcattgaagaaggagaaggagttgctaaaaggtggtatatttatttatttatgaagctttctttcttccctgtaagaacgcttcattgaagaaggagaaggagttgctaaaaggtggtatatttatttatttatgagagcagtgcactccaattatatttttgtgttgctcatttctgaatggtaaattggttgagctgtgtttcataaaagtgaaactttatacaataaattttaagaggcgaaccttaaaactgctgaaaggacaaactctttattaggataataatttagaatcacaaatacagtgtgcatgtggtgttgcataatgtattggtgaacttagctgaaattttggaaattggaagtccagtgattactagaactttttatctgaaattttattgattactagaaccttatatcaaaagcacctaacacaagaattttgtgttcagcattaaatcatgtgaggatacacactaccagaatgggatggaccttttccttgactgtgaaatcaaattcttgttagccaaacagaaccttaattaaatgaagctaagaatgtcaatttcttatactcagtgtttattgtgactcccacagggtggcaaaagaagtg

SEQ ID NO: 12746 - DNA, 14969 bp, Vitis vinifera
  Intron number 12 from transcript GSVIVT01028990001 (locus GSVIVG01028990001) derived from phytozome v7.0 (chr-ID chr 5; pos 10220559 to 10235527)
ttgataatcaagatattcttgatctcattgagaaggtttgaatttctcctactgctgcacattttgggttagacatgttgcatcagttgtgactttatattgctagtcaatttcaagattggttatgattaaaagcggactttttctatcctacttaaaagggaactctttctaattttttgtccttaagttcattgtagctggtattttttaatacttacaattgggaaaacctctaatcaagaagcaatcatgcaatattgcttaatgatgcctactaaaaggaactggacttgttttccatccttttctgctttttcttctttcttctttctttcgtttttctttttggtttttgttttggaacttcttagcttttacttttcgtttttcttttaatttttttatttgctattatcttatattgagtgcctgcttttgggggggggggggcattttgtttgttgaatctagaaggctaataaagttggcactgcaagatctttgacttatgattaccatctttttggtggtcttatggaggtgcttattcaattgtaaccctataggcatccaaagacaaattgcaaatcaattatgtcctcaaatcaacttagaaaatctgtttagacaagggtggttggcataagaaaacatggtactcacattttcttgaggagtaaataatgtctaaatgttgtcttttatttgcttctacttgttgcttttgtttgtgttttttttttgttgtttgttccttcattaaaaacaaacaattcattgaaattgaatcataaatacaaggaacaatgagctacctttcaactacgagtgcaactcgggcgggttgggtcggtttgacggtcaacctaagcttaacccctatatgaaacttatttgcccaagcctagcctagtctaaggttcaacataagttgttcaactcaagcccaacctaagtttgtttctctaaacttggtttaaaattaggttagtcagtaaatatatgttcaagttggttggattaataaatattatattaacttaagatccatttcactaaacattttattaatcaacctacatgtaatagatgaaaaattattaataacatttatttaattaggaatcttgattgtggataaatttaaaaggagagaatggattttggtgaatggacattttatgcataaaggcaaggaagaatctgttgagcacatcccccttcaaagttccaaggcaagaattctatggtagttggtcttctacttatttgaaaatgttgagtgttaaatttatcagttaaaacaaacttcaaagttgggatggtctttttgttggaatcaatgtttttagaatcggactggtcattgaactggaaaagttaccggttcatggttcactggtcggaccgattgtcgaaccggtgacgtcataaatatatattttattattttgggtgtcgcgggctgtggcgtgtcggtggcgggcggagcggcaggccgacagctgatgcgcggggaggagggagggtttggagttgcagacttgtagttatatacactccaaaacggcgtcgttttgatgttgtttaaaaaaaaaaaaaattcaattgaatcggccagtttgtccggttcaccggttggaccaccggttcaagcggtccgaccttggttcaatccaaatccggtccaattgaccggaccagactggaaccgtgaccggccagtctagtccggtttttaaaacattggttggaatgaagcaaaagaaagcgtgtaagactgatcgtttgcatttgttttggactatttggtaagagagaaataggagagcttttgacaatgtagagctatcaaatcaagagttcaaatcctttttaataagttatgttttcgaatgggtcaaagagggttaaggatgtgcccatctctatagtagattttgtcaattgggtaggctacaagtaaggggtagtagtgttttttgttttctctctttgagttctttgccttgtggcatctttgcatgcgtcttgtgtactttgtatgcccttttttttggcttttatttatatactctgcctttcttgcttatcaaaaagttaaaaaaaaaaattctctattctagcattctaaaaatgacctcagtgaaattctcattagtcttgaagggttataagctttatttttaaaagcttgcttgcaaatttgcatgctgattataacaaggggtggttttcttggagtttattgacttttctattggctgcaatgaagctgtaagtatatagatgattttctgagtggttagatttcttgggcccctcccagtaatgcagtagataggacagtaatagagttcaagggaagatgattcgaaatcagtcggttgtagtggagagaaagattttccaggtgaagtctgaagattacaatggaggaaaatggctttcaataacagagagaagccgaggttttgtggtttctttagattttggagaggaggagatgggttggctagtggagcagttagagaaagctgtggagttggaggagtcgaggggttacattcaaaaaatgaggggcaagaccaggactcatatgatggagatatgttttaatagcagagggtgttatatgaaaattacagaatacagtgcaaagagaaaacctttggtcttagttattccaagaggtgttaatggctgtgggtgggaaaacctcaggaaggtgattgcttcagtccaagagatctctgttcaagttgggagagaatcgcaggagacgcaaaacaagcttcaagagagcaaaggaatgtacagaggtgagaggacctacgctgaggtggttgcagagaaaggaacaaggaatggtgcagggatgccagttggaaaatgggcaagagcggtggtttgtgaaggcaaaggagaaatacgagattggtgtgaggttggaaaagctatagcgagaagggtggggatgaaaggaatggtatttgtaacacccatttctgcttacaaagggtgtttttttgtggaaaatgcaaggaaagctcagtggtttcaagaaagaggtagtttcacagtgagaggagaggtttttgctctgaggagatggtcgccagaagagaactcagtggttaggggaaaatttagacgggggtggctggaactaagaggtctccctttccacctgtgggatgaggtgcagttgagtcacgttttgcagcagtgggggagggtaacgaaggtggcaagaaactccttgaagttcgttgatttgtcgaaagtaacattgcgggtggaaatgcttccaaaggtcgtgcttccagcgctattagaggtagaagatggagatcggacatacacggttgcagttacagtcaccggagaagatgacggagaagacgacggaggagactctataaagcctgagtcgagtcgcagcaaggacgagctgaggtcagccgggggttgcgtcttgcagaagccacagatggttgaggggctacgagctattgacaggaccagtgactgccaaagatggatgccccgtcatcgtctccattttagctcttcagattcaaaatcggctaagggggagaaaggaaagggaagatgggtgttgggcccaatggcgggaagcaatttcgggccaacaccagacgtccttgaagcccgttctagttgggcccaagttggggcgaaggattttgggccaatagcgggtccagcccataaaggatcttcaaatggtggcccagctgtttcttcgtcttcaaagctccaaagaccagggctctctgcaaagaataaagcgtcggaaggtctttctcaagtgtcgtcaaagacgaagggatctccagtctccgtgaggcgcagagcaagaagtgggccgtcgagatttgacgaggcgtcttcttccccgaagcgtagctttgaaggaggtggctcactggagacaaatcgagacatttctcggggcaaatctcactccagaaagagcgatttctccactggtttggaaacatccaaagtttccaccggcgagacagagggagaagaggggattttgcaatgcaaattgatcaatgaggtgcgtaatcctatctcagctgtttctgagcgagatcttcctctgtctggggcttttgagccaaatcttattcccgaaacctcggtttctttggttcatcctttttgtgttcactcttcttcttcgtatccgttggagtcaagccacgcttttcagcgtgggtatgtttctatctctcctgtggtgtatgataaccatcgtggtggtgcgtcctgttcgaacggtgtggtggtacccctagaaacctctaaccaaaaatctaaagaccgacctttccttagggaaactcttagcaaccttgaggtgcgtggtgtcttaggtgaggcttcgttcccagtgcaagaaccttccactctcccactggaaggttttcaggttgaggggcttacgcctcggaagatggtcaaggttcagtcggttctggagagtttgagggttagaattgtcagggataatgggaaaggtgtggaaggagagaacaggaatcctctctctgcggacaaggtttattccagaagaaagaagaaaaaggattctggaactcgaggagaggattagtcctgggtgcgggttgtgttgggttgtgattgttctcatgaagattttaagctggaatacaagaggtttaggttctaggaagaaaaggaggactgtgagaaggtttttaagtactcaaaacccagatgtggtgatgcttcaggaaacaaagcgtgaaatttgggataggaggttagtgagtagtatttggaaaggtaaaagtctggattgggttgctcttcctgcttgtggggcatcgggggggattgtgatcttgtgggattcagttaagttcaattgttcagagaaggtgttaggatccttctctgttactgtaaaattgaactctgatgaggaagagtctttttggttaacctcagtgtatggcccgaataaggcagtgtggagggaggacttttggttggagcttcaagatctacatggtctgactttcccaaggtggtgtgtaggaggggattttaatgtgatcaggaggatatctgagaagatgggtgattctaggctaacagtcaacatgaggcgctttgacgagtttataagggaaagtggtttgttggacccccctcttaggaatgcggcttttacatggtcaaacatgcaagtcgatcctatttgcaagaggttagataggtttttgttctcttctgagtgggattcttttttctctcaaaatattcaagaggcccttcctagatgtacctctgaccatagcccaattttcttggaaactaatccttttatgtgggggccgactccttttaggtttgagaatatgtggttgctccatcctgagtttaaagagaagttttgagattggtggcaagagtgtacggttgaaggttgggaaggtcacaaatttatgaggaaactaaagtttattaaatcaaagttgaaagagtggaatacaagggtctttggagatttaagagagaggaaaaagcatattcttacggacttaggcagaattgatagaattgaacaagaagggaatttaaatcttgagctggtttcggaaaggatcttaagaaggaaggagttagaggatttgttattgaaggaaaaggtacaatggagacaaaaatctagggttaagtggattaaagaaggggattgcaactctaagttttttcacagagtggccactggaagaagaagcaggaagtttataaagtctctgatttttgagaggggggagactttaaacaacattgaggttatttctgaggagattgtaaatttctttgggaatctttattccaaaccctaaggtgattcttggaagattgaagggattgattgggcccctatttctgaagagagtgcaatttggttggataggccgttttcggaagaggaggttcgaatggcagttttccaattgaataaggaaaaggcccctggccctgatggctttaccttagcaatttatcaagagtgttgggatgtgataaaagaggatctcatgagggtgttttttgagttccacactaaaggggtaataaatcaaagcacaaatgcgactttcattgctatggtgcctaagaaaagccaaactttcaaaatttcagattatagacctattagtttggttacaagtttatataagataattgctaaggtcttatcagggcgtttatgcaaagttcttcatgaaacaatctttggctcgcaaggagcctttgtggaagggagacaaatattggatgctgtattgatagccaatgaagtggtggatgagaaaagaaggtcaggagaggaaggggtagttttcaaaattgattttgagaaggcctatgatcatgtggagtggggctttttagatcatgtgcttcaaaggaaggggttcagccagaaatggagatcttggatgaggggttgtttatcttcttctagttttgctatcctagttaatgggaatgcaaagggttgggttaaggcctctagaggattgagacagggagatcctctttctcctttcctttttactctagtagcagatgttctaagtaggttgatgattagagctgaggaaactgggataactgagggtttccttgtggggagggataggactagagtgtccttgttacagtttgctgatgataccatatttttctctaaagcctctttggatcttcttcaaaaccttaagatcatccttttggtttttgggcaagtatctggtttaaaaatcaacttagaaaaaagcaccatttcaggtattaacactaggcagaaaatgttgtctagtttggctttggttttggagtgcagagtgtcagagtggcctttgtcttatttaggccttcctttaggagggaacccaaagacaataggattttgggatccagtggttgagagaatttcgaggaggttggatgggtggaaaaaggcctatttgtctttgggagggaggattactctaattcagtcttgtctgtctcacatccctaggtacttcctttccctcttcaaaatccctgtatctatagcttcaaagattgagaagatgcaaagggattttctttggtctggggccggggaagggaagagagatcacctaatcagatgggaggttgtcagtagaccaagggagatgggaggtttgggctttgggaagacttctatgagaaatagtgccctcttagggaaatggctttggaggtttcctagagaaaggagcggtctttggcataaggttattgcgagtatatatgggacacatcctaatggatgggacgccaacatggtggttagatggtctcacagatgtccttggaaggctattgctcaagttttccaagagttctccccttttgttcgcctagtggtgggcaatggggagagaatttggttttgggaagatctttggtggggaaaccaaactttgtgtgctcaatttgctgaactctacagagttatttctgtgagaaaccttactgtctcaaacgtccttggcaattcctttccattgtcttggaattttaaatttcgccgcaatctaacggattcagaaattgatctccttcagagattaatgtcctctcttcattctgtgcttctttccccttcctcatcagactcaagagcgtggtctttgtcttcgtcaggctcgttttcagtgaaatcttttttctatgccttgtcaaaagattcaaatcctttaatgttccttccgaccaagtttttatggagctcaaaagtcccttcaaaggttaaggccctcgcttggttagtagcacatgggaaggtaaacactaatgacaagttgcaattgagaagaccctacaaagccctctgtcctcaatggtgcattctttgcaaaggaaatggtgagtcgattgaccacctttttcttcattgtcccgtcaccattggactttggcacaggttgttcaatttagtaggtgtgatttgggttcctccaaggagcattgaggatatgttggttatttcctttaaaggtttggggaactcagtaagaggcaagattctttggcaaattgcttgccttactttgatttggatggtgtggcaagaaaggaataatagaatctttgaggataaagggagaacggaagaggtggtttgggatttgattcggttttactcttctctgtgggcttcttgtactgaagcttttagaggagttcctctaagcattctacaaatcaattggattggggtttgcgtttcaagagtttgaagtttgttgggttttattttgtttttagttttctattgttgggtgttttccttggttcttgtgtaggaaggacctctcatccttcccttggtttttttctctttcttttgtctcttttttctcttctgtatttgttcttttattaatataatctttttcgtttctgatcaaaaaaaaaaaaaaaagttaaaaaaaaaaaaccatcatttaatcagaaattgaaagccattacatattaacatgccaataggtaaatttataatatatctattgcttaggcaatgaaataactgcaaccctatggtagaatcagtaaaatgaatcaaaagctctaaaaaaaccatcatttaatcagaaatcaggaaccattacatataaacatgccaatatgtaaatttataatatatctattgcttaggcaatgcaataactgcaaacctatggtaaaatcagtaaaatgaatcaaaagctctaaaaataaagataaaataaaacaaaagatgatcacatatgattataaaacatttttcaagcaatttccaagtaaacaatcaaattaaaagttggagttatagttcttacatatttcaagaagaaatttcagatcgtaattatttattcaagcacaacccatcacaatttaaaaaagggtgatttctctaatatgtcctagaagtaacttagaagttcagaaccattttttttttttttttacataataacaaaaatacatcagaaaaataaaattaagaaagacaaattaattgttcatgatattgctttcgattgtgtggcaagagagaaatgcttggatatttgaggaaaagcagaggttggtagagatgttgtgggatctacttcacttctattccaccttttaggcctcttgtaccaatgcatttaaaggcactccacatactattattcaacttaattgactttctgtttgtaattcaaaagggtatagtgagaggagctttattcgggattgatgtatatccttaagtggactaaactttttatataggtttccttgtatagtgggggagtttagtcattctttgatcaacttcttatattttgtggggaagaccccttatccttctcattttctttttatctataattaatacattttgtctcacccatatgccatgttactttctctccttgtttaagattcccgcctcagtggtagcaaaaattgagagattgattttttatggtcaggagtaggggaaggcaaaagagatcatctggttagttgggacgtagtatgtaagccgaagacgaaagggggattgggatttggaaagatttctgtaaggaatgttgctctcttagggaagtggttgtggagatatcctagggagggttcagctctgtggcatcaggttattttaagcatttatggatcacactccaatggttgggatgccaacaatgtagtcagatggtcacatcgttgtccttggaaggccattgcacaagtctcccaagagttttccaagtttacttggtttatggtaggagacagggatagaattcggttctgggaagacttgtggtggggggaccaacctttgggggtccaatatccaagactacttagtgtagtcacggataaaaatactcatatttcttcaattcttggatctactcacccattctcttggaactttaactttcgtcgaaatcttttcgattatgagatagaagatttagaaggcctcatgcggtctcttgatcgtctacatatatcacctgcggttccagatatgagatcctggtctttatctccttttggacttttcacagtcaaatctttctttcttgccttatctcaattttctgattcgcctccagttttccctactaagttcgtctggaattctcaagtccccttcaaagtcaagtcctttgtctggttggtggctcacaagaaggttaatactaatgacttactacagttgagaagaccctacaaagcacttagtcatgacatttgtaagttgtgcatgaagtatggagaaacagtagatcacctttttctccattgctctttgatgatggggttgtagtacaaattatttcaattagcaaagacggattgggtccccccaaggagcatctctaacatgttatctactaattttaatggttttggatcttctaagagagggattgttttatggtaagacgcgtacatcgctttaatgtgggtggtgtggcgggaaagaaatgcaaggatttttgaggataaagcaaggaattcagagaatctttgggattctattcgtttcctaacttctctttgggctttttgttctaaggtttttaaggggataccttgtaacgtgttacaacttgattggttagcggtgtgtaatcccaatgggttggtctaactagagtgtttgcttgttttttctttgtattttcttatatttgattacatgtagtcttgtttttctttggtgggaggatttctcatccttctcttgtacttcctttttatcaatatattcctttgtcgtttcctttcaaaaaaaaaaaagaagaaagtaattgttcatgacattcaaataactaactcttcaaaggtgcgttaatcctcaactctatataatgtctttgtacacaaaatgaaatggatattaatacgacactattaaataatatgtgtttatatatatgtatatataaaatttaaattttatacaaatatataatcaggtttgagttagacttgggttgcttgagccactcaacccaaattgacaattttttgtccaagaaccaaaattacaaattaagttgcttagactcgtaaaaagtcagataaagttgagttaaacttaaccaagttgtagccccactttcaaccgaaaatctatgaggatggttatagccttaaaaaatgaattgagcatagaaaatcatgtagtcttaataaaggatcataataatggtataacttaggggtgtttaaaatttgttataaatgccactagcatgaagcttctcacttagcaattggtttgcttgtgggttgggtgatttaagaatttaagtgaaatgacaaccaactaaaggagttacaacccattgaaatgtcaatattttttcttccaactattcatctagtttttgaggccttctcttcctctaaactacagaagaaagaactgaaagtgcacttgctagcacctcaaatcttgaagttcctacttcatttattgtttatttttatcttataatttataatttaggtatggtaggggtggtgcctgtaaataagttgaactttttttcctgtccatttgtttttattttgtttcctttttgatagacaaagacaagtttattcaaaggacctatcaagaagaaatatgcaacccaagaacattggatgtacataaaatgtgtcaaaagtggctaaggcaaaggaaaaatagaaatctatacaatggtcataacccttcctacacaattgaatatatttagaaaggaagtgaccttacaatctaaagaagcctttgattaagagtacatagtattggtaaagacatttttcaccaacatatataaactctctacaccctcaaaacaatataattattttaatgggctaccataaataaatgctcattcactggtagggatgaatgcacaaatctaaaatgtaaaaaagaaaaatttcctgtggaaaaccttgaaggaggggttaaactatgtgatgaactatttaaagcaatatcctaatagagttaaacaagtaaaagaattggtaaactattgatttttcttgtttatttatttttttaccttgtaggagacagattgaagattttatttttggaaggatttttggtagggctagcaaccacttagtgttcattttccaaatatctttagggttgcaagaacacctttcttttttctctcattagtggaattttaatttttgtcataatctttccatctaggaatttgaggagctagtatctctcttgtcctcactattccacatatgttttttgcttacctttccaaatgtgagaatttggtctttgaacactttagttttttacttagttaatctctttttcaaagctttgtctatgtttgtcaatttgattaccttttttattggtcaatttcatttgaactcaaaagcccctcttaaagttaagcttttgcatggattgtgacaacaaagaaagttaataccaatgacatgctccaaaagagaaggccttttaatgatttttggcctgattgttatgttatgtgcttggctagcagtggaacctttttgaccatctttttttacactacctactagctttgagacggtgaaataagctattcccacttagtaggcttgtttgggcatatcccctaaaagtgtgacatagatgatagttgtgtccttcataggcttttaaggtctttggagaggtcagtttttgtgattgtgatttggactatttattaagaatggaaatttttgaggatggatggagatctatggaggctctttaggactcgagttctatacttctttgtggacttccaccacaaatgcatttgctactatctcgttgaggttgttaacgctagattggaatcatatttgtagattaaagaagtgggatacttgatctatcttgtaatggatggttttttgttgtggtcgtttcatgggtggcaaataaggaaagaggttcttagaggcttgacgggtggctatgccaaatgttttatactgttatagagttgggatgctctacttgctaggttccttgtgtagaagagagattgaagaataaaaggtagaaaattccttgattcttcttctttttaatctatacagagacccgtacatatatacattcctagcaccaaaattagtaaccttcataacctaattacaaccaatcccttcgattacacctaattcacttcctaattacaatattatacaattacaactttctaatttcattattccacactccccctcaagctggtgaataaatgtttttcattcctaacttggatatacttacttgaaactttgtactgcttaaaatttggtgagtatatctgcaagttagcggtcaatagacacataaggagtacaaatcaatccactatctagcttttccttaataaaaggtttgtctatccctatgtgctttgttcgatcgtgttgcattggattgtgtgcaatactgattgcagatttgttgtcgtagtaaagtctcattgggccatcccattgaatattcaaatctttcaaaatgatcttcaaccaaagtagttcacatgctccctaagccattgcgctaaattttgcctctttgtagaaactgagaatgatttttaaaattcattcaaaactatattttttacattcaaaactgagaatgctccctgagccaagcatgagtcacaccaacccttgctatttctaattcaagcatctttttacattaaatattgaaaaatctggaaatagtgcatcgggatgatgtttcacaccaatgattaagtcaaaatctcctcctcaccccaccaactgaaaatttgatgaatcagagaacatatgacacaccctcctgatgactgagtttgatagagatttttctgtcttttaaatatagtcattcatgtctctttactttgtaatcaatgtgccattacctagtcatcaatgtcctaagagactttgataactttcacctctaagggagtgaatttttccctttcttgcacctacatttgttttggactatttggcaagcatggatccataagacctttgaggggatgaagtgattagttatatatatatatatttagaaggggggtggttggttttgttatttgcactatttcattgattatatggggttgcattaatttttttggttctttatagccttttggcgccctttgtatacccttggtatactagagatgtgccccctttgttgttgcttgtcaaaatactccctttttgtctattaaaaaaaaaggaaaaaagagaaagaaaaaaattatttttggtgctaatatatgaggttattttccaaaattgtatattgcaattgcagtttgctgtggtttctattggtgattcgtttagggtatataggattatccaatatgtattatctaaggttctatttgactataaaatgttggtgcaatttggaaggaacaacacattttgtaggtgaccagctgatttttcctcttttattcttattgacagtgtaatggtgtcaagttctttctagttttttattttgcacttttttaggttttgtttcttgatgtctgtgaagagattttttatttttttattattatttttatttccatactactttgccataatactttggcttttttcctagttctgacacaaaaaagggatgtggaattggagtctttctggtcttcttaaagaaagattgaaaagagaatttatgacattctaacagatttgtctttcttagttttatatttgagtttttcctttctcatatttttatttttaacttcagaaacctggtggcatcattgctcttctgg

SEQ ID NO: 12747 - DNA, 5881 bp, Vitis vinifera
  Intron number 1 from transcript GSVIVT01029169001 (locus G SVIVG01029169001) derived from phytozome v7.0 (chr-ID chr1 1; pos 18962111 to 18967991)
atataagggatttataagaaagaacgccaacccaggttggagcaatattaattatatttcattcagcaagagagaaaagaccaaggcagatcatgactacaaacaaatagaatcttaacgtggaaacttgtgatcagtttcggttttggaaaacttaattaacagtggagaagaattgtaacgccaaaattcagaacatgactgatgatgaagtagagaaagacaagtgggtggggctggaggcacctcttcttatatgaccacatacttccactgtacctggtaatcaggaattggaaacagaaatgctttcatagaagctattcctagctagcgtttctcttgccttctactcattcttttcaagaccccaatggatactaagctccaaattagcttcatggggtcacatggatatatatatatatttttatatataggaacaagtccttctaagtaatctttgtccctattattttttgtaactccaaggcgtttcattacaaactctccttaaagttgatgttgatattagacatattcttaccggcaaatgtcatcaacgtataacaataaataagcaagagtcatcaaatagttccttgtgatagatataatttttatattcacttttataatattcatctactaatcgtaaaagtatcaaatcttttataatatcatctaggagattacttcaaaccataatgagatttattcactaaacaaatatggtcctcctttcctaaaataatgaatccctcaaattaatgtatataaatttgttctttcaattcaccatgtaaaaaagcagtattgacatgatcaagttgctctaattttaaatcaattaaagtgatcatggtaagtaatattacactaattgagctatgcttcataaccgaagaaaacacttcattgaagtgtttacaccctctttttgtgtgtgatcccttgccacctgaagtttaaacctaacatcctttacacttagaattccttcctttcttctaaagatgcatttgcaaccaacaatcttttgattcttaggcttctcaactagttgttaagtatgggtcttttgaagagattcattcttttcttttgtagtaacaatcaatggtgtaaactctctactagtgaagacttccttataagtataaggttccttatgttcactactttctaccacactaagtgcataagcaaccatatccgtataagtatacctttaaagtggtttaatttgcataagcttgaaataaaagttaagacaaaatatgaagtctgtgtacaagctaaatgttgaaaaaaaattattacatctaattcatagtaatatatgtgatttgaacaatattattacccatggaggtaatattgttatatttaattatctgattgactcaaaactcaaaatatatagaactttgatagaaaatcaatcagaaaataaaattagaattttaaggtcatatagaaggggtgaattttccttattaactctaagaatgaattacacgacaaattcaaaatataaaaaaaattgatagaaaatcaattagaaagtaaaattaaaattttaatatcatatagaggagtgaatatatatcaaaagagatgaataatttttgtgatcaacatgggataattcattaaataactacaccctattcctcacaatctaatggatttgtaaagaggaaaaatagaatcttgttagatatggtaaatgttatgttgactattttaggattatcaaataattcataggatgaagtcttttattttgtttgtcacattcttaatagagttctttataaaagtttagaaaaaacaatatatgaaatttgaaaaaatcatatgcccaaatctaaaatatttaaaagtgtggggtgtctaggtaaagtaaacatattcaaataaataaaaagagaaaattaggttcaaaaactatagactccatatttattggatattttttaaatagcatgacttatggatttttggtgataaattcttaaaatcccaattaattctatatattttagattcacatgatgctacattttttaacatatcttccctatgaaaaataaattatccaaattaggagaagactcaaactctaactctcttgtagaaattatttcaaatttaaacttaaaaataaagaaaattattatctaagaagtaaaagaggaagaattgaaaagaattttggtgctaactttttcacatacttagttgaagatgatctaagacatataatgaaacaatgaatttatcggatgttttattttggaaaaaagcaataaatagtgaaatgaattctattactaacaatactatgattttttttttaactcatcttttagaaaaaaagttaagaacaaatgtaattatagaaacatttaatgctagacttattactaaggggtttaaacaaaaggaaggagtagatttctttgacatttgttttacatgtaactagagttacaactattagagtgttaattgcaataactttaatttataaattagaagtacatcagatgtaaaaacaatatttttgaaaggtgaattaaatggtaattgtgcttattcttgtgataatattttaggaaaagcatagctctgaataaatccaagtcaagacttttgcaagatcttgattgcaaatcatccttgaagaactcacctctgtgggtatagtagtgtgatagctaccatgggaagttatgctaatccctaaaaacatttatgaaataaggcacgtgcatgataaaaaaaaagtgcaaaaccggattgaatcaagtcaatgactcttactctgcatgtaataaaaggaaatatgaattgaagaacccaattcaaaatttaagtcattgtgttgttttagataaaaagttagtgtaagttcaaatctgaaagacaccaacacctattataaaataattttgctcaatttcagtatattaaatttaatttatgtggggattttttatatttatattaaaatttataattattatatttatgttaattttaattttatatatttttatcacaattttattattattcttttttaaaaattgttgtggacactgagtgagtgattttttttttttttaaggagaatatggagttggagttagcataaccaccttctcttttcttttcttttactaattttaatatattaaataaattgagcaattatatattggaaatagaactttgagttaaacgtgaagtaggagttccattataataatacttttttttttacttttttttttattattaagcaagagtgaatacttgattcgtgaaattaaattttctttaataatttgattttagaatatcgttgtatttggggaaaagaacgtacatccacatgcccgcttagacttttgtaatttctcttaaggtaggtatcaaaatattaaaaaccctcaaacatagaaattttttaatttgaatattttgtggaacctttcttcaatcaactcatttaagtattgagtagataaatacatcccaaaacacaatttttcattgggggcaacatatagttgatctagaatataaattttcactctcatactattcatatttcaaaacctagaactccattcaaaataattgtgtttttgaaaacaaaaatactcatacctttgatacatgagtttggattttcattgagcaaagtcaaagacaatggaagtttaaagtgaaggaaaatttttaccaagattgaattgggaatcattgcttggtataatataataatctttagatctaatgaagatttttgcaacactaccacccctagtttttccccaaattatttgaaggaatttatatgtgtatcctttataataagttattttcttaattttgattattgtttagattggacttggattaattaattaaatttgaattaattctaggaatcatggacctattcagccccttctcacctaatgataaaaatatcggttagtatttcaattttatgaatatattataaatatatcaactgatattttagaaaaaaatatcgatagacctaaaattaatcaaaattcatggatatatatatatatatatatatatatatatataaaatctcatagaaatgtaattagaaatataataaatattttaaagttattttgttgaattatttgatatatatatatatatgatataatttatcatatttgataacaatatcctatatgttaataacaaaatatgaattttatatgtgtacatttatttttaaattacatcaaatattattttataataatattatgatatttgattataatatgtttaattttaaaatatatttaatactaaaattatgatccatttaattcaattatattaaataatataaaataaattatgatatatatatatatatatatatatatatatatatatatttaatacttaattaatctatttatgatattaaaaacactatgaagaaattatcataagaattgtatattttttgcaatcaattaaataagatttttttatttaattataaaataattataataaattttttctttaaaatattcttttaaaattttgtttatataatgacttttattttggtgcgttatatttaacaaggggcaaacttgccccagtggttgtccacctactgggtgagcgcgttgatcaatatttctccacataatattgtttccataagttccaatacgcaatatatcttctatatatcacgatattttcatccatgctcccacctctatcccaattaatagtatcaattagaattttgcataatgaatatatagcttaaaaatactattccataaaaaaacaaaataaaacaaaacagaacaaaaaaaaaaaaatgaaaagaaaaaaataaataagtaaaggggtttgtataaatgaaattttaaaaagataaatatctataaatagatttttttttttctcttgctgttggtacatgatatgtttattagaatggatgacatgttaacccaatcttatgattaaattggaatttttattatttacatactccatagagtaaaataggtattttaaataaatcttacataaaaatggattttgtaatatgcttattcagatttgtgaaagagtaaaatatcaatgtactattccctataaaaaaaaaatacaaagaatatccgaatggatttgtgaaaaactaaatgtttttccagagcaattcaccttaaaaaaaaaaggaaaaaaaattaatttggtaattagccaaatattttagaaaagtgacaaataagttataaaagttggtccttaatagttaatacaattgtactttgatatatttaattcatcaaaatttaatattttaattggcaaaattaatatgtttgtcaatacatatatctaattaattgaagggaaattaatggttaagatgaggtcttttgtagtatatatttgcaaaaatgatagccattccttttcttttttaatattcttttcctctaatttttgagtttttaattatcattaatgaaccaatttgttttcaacaataaattccaaaaatttcttctaacaataattaaaattagagccttaatattgtactcatacaaatggctgaaattaaaattattttaaaatttttaacaattttggaaatcaatggtcgtttaatttgtttattttcctcccttcattattattatggtatcttcttggcttcacccaaaataaatatggaaaaaaattacttttctttccatccaaaattgattttcataatccaatatttagagtattcttttcctctatatctttatttcttttagtg

SEQ ID NO: 12748 - DNA, 6145 bp, Vitis vinifera
  Intron number 5 from transcript GSVIVT01015388001 (locus G SVIVG01015388001) derived from phytozome v7.0 (chr-ID chr1 1; pos 3206521 to 3212665 reverse strand)
tttgaaagtagtgagggtgggggtggtgttgacaaactatatttccaaactgatgtaaaatgatcagaatcatatgtgaattcccatcaatacggccctgtatgattagttgtccattgattgtgatagctaataaaactcaatgtagtaagctttcatgacttgaataccatataaacataatttgaaagagctgaatacatagtagatgggacaaatgaacattagtacatcaaagggacaagatactaagtccccatctcctacaatttctacacatcaatatccgtaagagcattcaactgatatatattgagctagcagggaccaacccatcaagtatcccttttcccccaaaaaaacaaaaagagaaagtgcataattaaaagaaaagggaaaaaagaaaaaactttaagggccatggaaggtcccatggagatagaagtggccctatggttctttcataaatcttgtgaagattaccttttcaatatattacagctgatatgaattcaatagttcgttatcctcattgccttgtcctttccatcctcatcagcaacccggaccaccattattctttggaactccacccattctagtccacaatttgatccctgtcaacattcaaggatggggtctgcaatatttaagatgatatttatagcatgtaaattatggtcatattcagtaaccattaaattttcttggggctgatacgtacatgatgtatgaaattcaattcaatggctggagcgatggatgattgaaaaggaagtctggttcaagtctcccagtctttgatcaagctgagagtagaaaattctcgacttgaactgattcatagatgcgatttttaatagctgggaccagctaattgccctaattaatcttattaagtagttcaaatgcaaattagtctaatgaagtgcttaaagtttaggataagaactcaacagggaatattgtggagaattctggaaggaaggacgacatggtgtcgtgcagaaatttcaaaaagaaaagcagctttcctaacgagagacatgtactctgaaatgatatgaaaaatgacaataatttgaaaatggggggttttagttaggatttaatgatttggttgtggtggggtttattccgaccgaatggagtttgacaaactcgcacaattcgaatctttggcttcagaataaagacgctgcctgaaaaactccccgagagaaaaagcgagaaagatatcaacatcaaggccggggtgggttactacttctgaaatctcatttaggaccagtaagaggtcctacaaataattgcctggcccatgagatcatattttgccattcctacacatcccttcaccctcattctactgccgactcttttcttttcttgtcttctttcccttatcgccacttcaaaaacaagagtatacagatatttgaaccaaaatttcctccatgcttttcgttggacctagtaaatttctctcctcacagtacatcacaacatttagaatatacaaaagcaaagaataatttgatggagacaagctaacaagatttccatataatatcctactatttctcttcttaaagagtgtattaaagaaaaagttgaaattttattgggatgaaatacgcttgcatgttacatacattttgttcttttctcatgtcatttttgtctgcctagcccgaaattttccttccaccttacgagaaacctaacctagccttggctcttaatggcaaaacattcacaagtaaattctagcaagttgggctgccatttgtggctaggagaagtttgatcctaccaacttggaagcagattttcattcactgatctgtatctgttaatacccattcaataaaggaaattggtaacagtacttattctaggctttgtgtaccattctccgggtcggtcgactctcttcagtactgctgcatgatagcaccatacacaaccaccatgagatgccctacaaacaagtatatggtccagggggcacgtgataattacaattggaacattacatgttacaaccccttgcacatttttctgtaatgtaggtacacatggtgcacatggtcacccctttggtccatgcaatatatattgatagattttactgctttaattgagcgtggtcctataatttataactttgatttctgtattttctgcaggaccattctccattagtttaagatgaaatgcagaactaccgaaggcggtgttggatagggttggatcgttaattttctatgtgcattaaatgattagcttgctagaccaaagagtgtttgttatctcctgagaatactacatttccttgatatcgtgtagcttgtgattaatggcatgagaattacaaaagatgctccaattggcttcaagatcatgatgcaaaaaaaaaacaaaatggatgaatctttcctagtcatggctgaaatggatgttgcaaccaaccaactcattaagaattttcctttattatcattctctcttttcaacaaccaaaatgagatgttttgtttcacaaaacttgttcattttcagatttcgatagttttcaggttatatttagtccttgattaatgtttttgatttctctcattttgccattaagtacgcacagtcgagcaattttgatatcattaagttcccactgaattacattatggctgcttattggtaagaacatagaatttcagaatatttttattgacaaaattaatttccatgaaatttaatgacatagtatcataagatcaaacttaaccagctagatccgtatttgactttaatttttggatgtggaaagatatgatgaggacccagtacctactttgaaataactattcagtccccaagtagccgaaacttgaaaatggctttcagaaataaccaatcttatttccatttagtcattttcaaaccatctacatctcattgattacaacgttatcattttcaaattttattgccaagagttgcttgtagaactttcaacagaaacactttcccactattctgtattggaaaaatcactttattgagtttatcacgatagtatgatgttgaaaactcgagcctgactcacatataccaatttgtttacttagcttgttgaattgtgaagcatgaatcattcctgttgcactacaaaggggatgtcaggggtgcttgtgaattttgttttttatatttgttgaacgatgaatttgtccttattatgtttttaactcttttattatttaaggctttgttttagagagtacacttgtgaattagagtttatcatcagaatcctttacaaaaaagtaagcggtgcaactagctaagtccttacgtttatttaaataaagattccaattggacaagtcaaattaatcgggttagagaaagaagacaggataagaaccctaacccttgtgtcatagggctgcaaaggcactatcaaggagaggcttttgagagagatactggtgaagtggagcctttaatgcaatatgctaggtagcataaagagtctattacaatgcaatcgcaattcagaggagagggagacactttatcattgtaatctttctctttcattttattagtagattcttgagtattggtgcgttctatgaatgtatagatcatattatatattcttcgtttatactcatgtcaggtttggttaatagaccaaagatacaaacacaacttgttgaactatatgtaaaaagaaccaaaccatagcagccaatggaaccatcaagaagtacatagctagtgattcattgcttttgtgtcgtgtctgtttgatgtatgttacctttattacgtagatgaaaagggcaagtcatgcaggcgcaagagtgagggagaagtgagaaatagtcagaagcattggagaaggcgagaaggcgagtctacaaggaattttggatagacagtgcacacttttggtctctgtgagacatgggaccgccactcacaagtcacaacttgtaacccccacctttcttcaatcattccactatccactcccccatcatatgggttcctccacatgccatgggatcctaaagtgagaaattgcagtcagaatgcaattctactttgatgaaaaactatacaaaccaaaccaaccttctctcgattggatcgctctagctagtacataagtctgattttgggaaagaaatccattgaaataaaagcacaaaaattcgctacattgataggatttctttttctaaatgttttctttgactaaaatatgcattcatggggtacaaatttagtttccaaactctagtttttccaactatataataaagaaggcggtcaatgatagacctggatgattaatgtactcaattttacagtatatattccgatggtctgctagttagttaattttcttgagggattgctaatttagatgtttgagcatggcatggaatcttgcacgtctccatgctaagtaaaccatgtcgatcaagttcaagttttagattcattacttgctttctctatatggaacttggtgaatgaagtggcatggaagataattaaccaatcatgtaaccattagacttgggtattatcatatatatgatcagaaactcaaagttctgcaatcattcatttggctgctggaggagatttgttttgctttcatctactcattgaccggtcatgaaattggtctcttaaatgagtcacatcatatataatgagggcggtgcgtattctactcatatatttatttttaaatcttatttatttgtattttgatctcatttgctggcaccctcgttcaacgggctagatgtcatcttacgtattcattggtccacgatacggtggcatattccttgatagaacccttgtgatgaaattgaaagaagcagcccggatcctagctagcattttctctctccacctagctgtggctacttctagtcttctaggcttctagctatcctcttttgatcacaatagaacatgtgtggaacatactctggttgcctaaaggagagactagaacccactaggacactttggtagtggcatgctggcatccgtcttcatcttcctgctggaatctcaatggacaccgttggaatcttatgtcggtcttcaaatactccaaataacgaccagataaaagacttttgtgtcctctccaagttgggagcagtttgggggctggaatgggaaatgggatccatggtccaccacgttcagtcttatcaaccacctcaacactagtagtgtttcacttcaacttcttctcttctagtcttctctttcactccaaacccatccatcaaaagggtgactattgaatttttacatattgtggattgagaaagggagctcagtggtgttgtggtggcaagggtttctatgggcttcctctatagtggatttttttaatgaatgtgagaccgttaagaaaaggtggtttgcaaaatatcggaatcaagaaattattttataaaattttgaaaaattgtattccttttaaaatatttcaatttaaaagattgcaaaatctacaaatgcttttgcaacacttctaagttctacccaatcttccccactttcctctctttgttcccatctaaaaaaagctaattatcaaaagaaactttttccacttaaatataaaaaatataccttcttccatttatttgtaaataaaaatattattaaaaaattatttaattaaaaaagtgaaataatcccgtatttataaatttaaccctccatatcttttcaacctaaaaaatacttattttttataaaaatgttcttacttccttcttataatttattttttaaatttacacttaaataattaaaatattaaaggatatttatatcaaaaattgattattttttaaatttaaatataaaaaaattaggtttataaattgatgttagatttataaatttagaatcatttaatccagtcatcgttgaaaagttttaaaaatgaaatatttattaggaacccgaggctaaggacttggttcatgttttttaaaattgttttctgatcttgaaaataaaaaacacaaaagatttgtttggggaagggggtgttttttttttttttttttttttttttttg

SEQ ID NO: 12749 - DNA, 9304 bp, Vitis vinifera
  Intron number 9 from transcript GSVIVT01016447001 (locus G SVIVG01016447001) derived from phytozome v7.0 (chr-ID chr1 3; pos 3809002 to 3818305 reverse strand)
agaagccccattgttgcttttgctcctgcatttaagtaaaatttcctgtcctcattgattattattatttttatctctgctaataaataggggcttgtatcctagaattgtaatgagatacaatcgtagaggacatattatcctatattcgcatctactaggcttcaaggactcagaggaatatgtttacggccagcaaaagagataaataaaagaatataaaataaggggtatttgataaaataactaactttgaaaaatgagagaaagagaaagagaaacttgggggtttttatatcacttaacactaaagcctatctataaatccctcaattttatctaataaaaaagtttatctaacacttgagacaaaacatcgtcagatttttgtaaaataaagatttttattactaaatcatccttatcctaaaatttctcttttaaatcaaagttttattattaattcctttgaaaataaatcaaatatgttgttgtaaaataataaagtaatgtcgtaaaatgataaagtgatagaaaaagaaaacgagaaaaagaaaatagaatgtaggaagaaagttgaatgaacttttatatataatataaccatcccattttataagaagtcataaagagatatatatcataatatataaccatccacaagttcccacaatatatataatagaacaaaaaaatatcagaaagataatttaaagttacatatttcttgaatatttcacatatttgatttcgtaagtgtggagtaatttatgcatgaaataactaagtatttcaataatctaactaattgtaataatagatcaataatttttattcacatattattatgatctaaatcaatgtataaaaattaattcatatatcaaaattttaagagaacacatcatgatttaaagcatcttgcaattttttcatgtctcaaaactttaattgaaccaccataaatatatctaaatatatatacaaagatataataaaatatattgaaagcaagagttgaatctattgtaatttcaaaattattgttggatgataaaattattgcattaataaaaatattatatgtggaaacatgcctgcaataatatatattattttatataactaaaatttttgcaatcctaaaaaaataaataaataaaacatggcttaaagaaaattgacatataaaatcatattattaattatatgaccaagtcatatatttcacatgtattcaaaacaaattatgtactcaaaattttcaacgcataatttcagtattaaattatcaataagtaaatccaaactttttttttttttttttttacatgagaagaatttttatacatactttttaaagcattaaaaatttaaatcatatacaaccaaataaaaagatgttatccagaatttttggaacataagcacatatgctatctaaaaatcttaactttctatatgaataacaaatatattttacattagatattggaaaataaagattaagattaatctcaactattatatcatataaaaaattattgtgtattaaacaactagaataaaaatatgtaaaaatatcacctttgacacaaaaatattaagtataaatatcataaattcatgtaacacaaaattccacatttatatgtaaatatttctattaatgacgatgtaacttctaataataggagttcataaaaaattatcaagaacttacctatttgtatagcttaatatacaaaatattgatcttttgataatatgtaaatattatctacatgcttgttatcatagttttaggctataatattttttattataacttttggttacgtgaatttcataaaattgtacaaaattgttagttaacaattttgttctctatagcttctaggcataagaaaatacatattagcaactttggcgtaatatttgattacaaagaatattaattttctcattttcttaacttcaagttatgaataataatatttatataacttctgtctatataatataagtttataataaaatattttttatataacttttggttattcgagttttaacaattattaatttactaaccttttttttcccatagttttaggctatgaataattaaaatttgagtaatattataataacattaaacaattgataattatgttatgatataactttgggttatataacaaaattaaaaattgtctttgtattttctagttatatagttgttaattgataattttgttttatataatttatggttatacaaaaaaattagaaattgtgtgtatagcttctagctatgaaataattgtaataaagaatgtttcaataatttctagttatggaaaatgcgcgaatatgaaatagaaattaaaaatgaatatttttcatagcttcgaactatgattattttatcagaacaaaaaaaagtgcaaatttgttatataactttaggttatgaattatttgttgtacgtgtaaatttgaaaataactttagattatgaactattcattatgcaaatttgcatataactttaagttatgaactattcattatataacttctgactatataatattgttttgtataacttacagttatatagtataattaaaaaataattaggaatcatatgcataatttaccctataacttctggttatgaggattgtacttattttttcataacttttaataatgaaaattttttctatataacttctaattattaaataattaaaatatctatagttacaaatttttgatttgattatatgaaatatgatttacataacttcttgttatgagataaagtaaataaaaattataacaattaaatataatgcacgcatactacttttcatattttgtttaaagaaaataaagttacatacctataataaattttatagatgaatttatttttttattttttatttcaagcattcttttggtatcagagctttatattcttgagggatcgtgagtgaaaaaaattgtgagttttcaagagatttgagggccaccaaaacaccacgtattccaccaaaatttcaagcatggaaagagactcaagtttctcagcaatggcacctccagtcttcaatggtgataattacaccatatgagttgtgcggatggaagcctacctagacgctgtagatctatgggaggctgttgaagatgactatgacattcctctgatattagacaacccaacgatggctcaagtcaagaatcacaaggaaaggaaaaccaggaagtctaaggcaaaagcttgcctatttgcagcaatttcagctacaatcttcacccgaattatgtctttgaaatcagctaaagtcatatggagttatctcaaatttgaatatgaaggagatgatcgaattaaaggcatgaaagtgctgaatctaattagagatttcgagttgtagaagatgaaagagtcataaaccatcaaggagtactctgaaaggcttttaagcatagccaacaaagtaagattgcttggttcggagtttaaagactctcgtattgttgaaaaaattctgattactattcctaaaagatttgaagctaccataaccactttggaaaataccaaagatttgtccaaaatcacgttggcagagttgttgaactctttgcaggcacaagaacaatggatggttatgagacaagaagcaactgtagacgaagccttgcccgccaaacatgaagatggttggagaaacaaaaagaagaaaaatagaaagcaccaacaagcaaatggagaagctgcggtgcataggagcaacaaaaacaaagctggaagttccaaaggaaagtacccaccttgtaagcattgtgacagaactagccactcaccattcaagtgctggaaaaggccagatgctaagtgtaacaagtgcaatcaacttggacatgaagctatcatttgcaagaaccaaaatcagcagcaagacacagatgcccaaatcgctaatgaagatgaaaatgatcatctctttgttgtaacttgttttttaggtagcatttcaagcgatagctggttgattgatagtggatgcaccaatcacatgactcatgacaaggaacttttcaaagaattgaagcctacaagaattgcaagagtctggataagtcacggtggtcatattcctacgaaaggaattggaactgttgctattgcaacccatttaggtactaaagtcattgatgatgtgctttacgtacctgaaatagttgtttaaggtcaaaatgagaggaaaaagcttctcattagatccacttaaggaagaacaaatagcttttccagcaaaagaaaatattgctgagttacggcataagcgactggggcactatcattatcaagggcttctcaaaatgcaaaaatcagaaatgttggaaggcttacttgagtttgaagtgacttccacttatatattttctctattttctattgtgtcttatttccttagcttgtcttaaaacaccaacaattggtctaagatgtagggagaaaattaaatgaattttcattagaggtctcatcttttataaggactcacaaagaaatatacatcataacgaatgatcatccacaagttctcatagttcgataaatatttctcatattttattacaaaaatatatttttatttacatatattaaattgaatttcttttttaaaaaattattctttgttcttgaataataaaattaaatttctaaataaacctcattttatttatttataaaaggtaattcttcactaaagggttatagaaaaaaaattgaaaaataacattgtatttctttaaatgggtttgataaaaataaaagtaaaaatgatggtgaaagaaattaggaaatacattacttttatgtattaagaaaaattcatgttatataagttttttttctttttcattggaatattttattctaaatttttcttattcggactatattatttaacacttattgggcaaatcatgtaaccatataacgacgggtaaaaatggcatttttgagaacttaaacttttgagttttggaataagtagagggtgggaaaaataatccctcaacatgcactctaatagtaataataccacacacttccaatactatcctctattgttgggttcttgatgattgctactgtaaggacctccccttggcaaccacgtggcaggttgccttggtccttagaggcacccttctattggacacatggcgtccctctgtctttgcccggacaaacgcaatcaatcaggaacccccaatccggccccaagagtcaatggtcggctactttgtgctcttctaagaatgcatgacgccgagcaggatcccttttgtgctcttctaagaatacatgacgccgagcaggatccctggtcagtttccacaagcaatcattccccctcccatcaaaagtacgcttgatgggacgcctccttgtcctctcaaaggacctactacactctatgccacgtcgtctgtagagtgaggtgactagcgagccaccagatcgccccaccaacgatccttgtcggccacccaaagagtcatgattgctctgctactatttgtgcaaccatcatgactgtgaaagtcaaaagagcatcttagcataaatgtgacggggcccagacactataaaaaccctcccatatataactcaaaggaaaggggagagaaaaaaaggagggaggtattataatccattctttcctaagcttctataaaaatgacgcattctctctaactgatcatctgacttgagcttcggagagtgtgtccggaccacctgtccgaacatcttttgcaggaacaaggaagaaacgtttctttcggttgatctagcatcaacagctactcttgatcgatagccttcctttcttcctgcaaaagaaagctcacccaaatatgtttctgggcaatccccttcgatgcctaagttaattaattgttggcaaataattcttagatgaaaaactccccagccaagacctacctattttgcagtttgaatgcctttttatttacctttctggcaactatctcagcagaattgttagggagattgtatcatgtcaggaattgctcctattgcttcccacgttctattgtaactaattagagcagtgcccacgtcgactctatccacttaccactcactccactcctgtggtagttcctatttatgtgttaatctacccgagaattatatccggatgtttatcacattttctacactgtcttttctaaccgggaagcgagtacaaacatctatgtttaaagtcgtctatcacctatagcaaccaacctcgaatccacacatcaaaaaaatctaccttagcaactaccatataacccactatatccacacacttccaagactatcatctatgtttaaagttgtctatcattcatagcaaccaacctcgaatccacacatcaaaaaagtctaccttagcaactatcatataacccactatatccacacacttccaagactatcatctatgtttaaagttgtctatcattcatagcaaccaaccttgaatatgcatacacataaaaaaaagccttgctcaacaactatcatcaatgttttcataatcggaccagtgattgaaccgaaaaagttatcggttcacaattcgctggtcagattggtggataaatcgcgatcaaactagtgacgtcataaataataatttatatattatataaaattttaaataattataaaaaattaaaattatatataattaaaaattttaataatatttcattttttatatttgatatgtcaaattaaattatgaagaaaaatataaatatgttaatgttttaaattttattaaatagaacatatataatatttaaatataaagatatatttaaaatgtaaaaattataatatttaattttatttgcatgtcttttgtattttattattttgaaattattatattaatgaatttatattatttgtataattacattatataattattataaaaataaatgtgaaagggttttatacaataaaatttttttaaaaaaatattaattttattatatattttgatttgcaaatataatgtaatgaagaagtttcatagcttaatgattaaacttcaatttttacacctaaaggtcccaggctcaagctctccagcttgcaaattttcttctttcttctcactaactaatctcacattggaaatgaatcaaaaatatgtagggattgtggggtataaaaggcatgcaagaatcattaacttgcaagactaaatgcttattgggcttgatgacaaatgggttgaatgggctcctcatggagtgattcggttctcttaaggcatcaaaaccattttttttttgtctaaaaaaaaaattaaaaaaattgttcgattcatcggttcaaccgtcagttcgtccgattcattgacggtctaatgcccaaacgtttttttgggtggaccgaatcggtttggttgccggttgacggtccgaccaatcagtccgattcggtttttaaatcattgactgtcatctaactgactaccacctcaaggatccacatgtacattccatgggatcaagcttaagaaaataataagaaagaaaatccaaaatcaaacccaaagaaaacccatgtttgttttacttccttcaccactatgagagctttagtatacccatcttcaacgctagcaaccgcatcaccccaaaacaaagcccactatacaaaccctccatcactattaaggtagagaaaaccctaacccttctatttaccctgacgacatggccaacctagcaatctttgcctaactctttggattaaaagaaagaaatgctttccaaaattcaaggaagacttcatagggagagggagagttgtcgggtcatcttatttgtagtttttttaaaaaggtaaatttctcttttcataatacgttttcaatgtggaagtcatgtgatttattaagatagagccctaaaagtattacatgatgtaacacatttaagtgtcattaataaatttatttatttatgatcttgataccctttaatatatatcttattagcgttaattagttatgtgagcattcatttccctatcacttgcattgtatatgacttggatacattcaaattgtacaaaatatctaaatcacgggtttcttacaaaatgataagtagttcaggataagttattggaattgttttttcatagtaagtgcactaatatgtattgttacacagtaaattacacctataatgaatcatgacattaggtatcaggtagtcgtgattcactaaccaactatactatataagttgtcaaccttaagaggatattaagtgtatgttgaagtcaaaaggagactttgacttatgggtaagaccttaaaggtggtcatatattccctacgaattgagttattatgacttagagcccttattattctatttctttactatttgatttacttgtgttgctaacgcaatggtttcaatgtttagttgtcctgtagcacataaccatgttcctttgcctttcttcttgtagaatgagagaatatcccttattcacattataaagagggtccatgagcaaaattgtccatgtatagtagaatatgattcattcaaaaccatcaagatcaaattgaatgagatggtgttgttgataatctactaaggctttttttgcttgacatatacatgtggaaaaaaattgcaaatttgtaagttcatcccataaagcttttaatagggtataataggtaataacaaaaagtggttcttatcttagagagataatatctctttcaatttgaaagaggtgagagacattgagttgagaataacactccttgagatcaaacttaatttcagctcttgtatctacataaataacaccgttggctaaatcttgagttaaaaaatcagggatccaagattttatcatgttgttgcaatgatttcacaaaccataggttgaatccgttgaagagggttttttttattgatctaccaatgaaatccacttcgttctttccactcaagtccataagcataaccctaattcaggttgagtggttttcactattcaaaggttaggacacaagcatggatcctgaattgtcagaatgatggagatgaaatggattattctcatctacagttttatttattttctggttaccaatagagcctcttgtcatggaaaaatgaaaacaaagaagaagag

SEQ ID NO: 12750 - DNA, 2648 bp, Vitis vinifera
  Intron number 3 from transcript GSVIVT01017390001 (locus G SVIVG01017390001) derived from phytozome v7.0 (chr-ID chr9 ; pos 7788141 to 7790788)
gctccctatcaatccaaggtaaattctaatcagaattatcattatatttagggcatataataaattaattaaattattttatctattatcattacttggttatttggattttcttgatattgtttagcattttacatagaaaaatgaaatggaaaaaatcaactcatggttagtgtttaagcattgggctagaagtatatttgtcttcccaatttaatcaaagagaaaagttataaataacataatttaacttataccttatattgattgaagaggttagactacttttggatttaatggtcaatattttttgaagatagggtttcctaaatttgatcaaaagaacttcaatttaaattaccataactacataaagttgtgactagcataattaaactcttttattaatagatgttcatagactagtattataatcccacacacacagataatcaaattttgaaattagacttcaaataactatgcaatatacgaaactacaaaatgaatggtaggtcataattaattaaattcgtactatattcaatgttggtcaacacgtgtcaagtaaaagttttagcctaagtgtaagggctcacttgctcctatatagatgttattcactttgggtcaaggcctactttaaaatatctctatacatttatgagaagtctactttaaaataacctattctccggaaatctttcttcccctctgttacctaatctcacatccttggagtacatcgatctcagttacaatcattttgagggttcattctctttcggctcttttgctaatcactccaactttcaagtggtcaaacttggaaggaataacaacaaatttgaggtagaaactgaatatccagttggttgggttcccctatttcagttgaaagctcttatgctatccaactgtaagctcatcggtgaccttcctggttttcttcgacaccaattaagattaaccgtggttgatctctcccataataacttgattggaagtttccccatttggctacttgaaaacaatacaagactaggatctctagttctgaggaataactctttaatgggtcaactacttcccctgagacctaatagtcgtatcactttattggatatctcagacaaccgacttgatggggaacttcaacaaaatgtggccaatatgattccaaatattgagtttctaaatttatccagcaatcctccccttcatttcatccatatttggatctacctttaaatctctattgcatacaacccatatatgattccctctaaatttagccttcatttcttgttaagaggttttaaaagccagcaatttaatttactttcatcctctagatagatgagaactcttatatttatccaatgataggtaacatttttgcaaattcttttatttgatttttttaattggtcttaaaaataagtgttaataaagatccacaatataaaataataaattatatctcaattgacctcaagatactatttacttctactaactcattttacatctcaattgttcttaaaaagtctataatggtaattaactatagaattcaagttttaattatgcaaaaaatatataaaggtttttaaaattaatagaaaaagagattctgataaataataagtagatcgaaacatttacttctagaagtagagaaagatggaggatcataaaagttgaaaaaagaataatttggaagtcataaaattttggaaaaagaataatacatagagacctcattaacaacaagtaacaactaattgtaagtaaccatgaaaaaagtaaggagaaaaataaaggaaaatcaaggaaagtggcaaattttttcatccccataaaaaatgctaaggaagaaaaaggtgaagaaagtttaaagaaagtatatttttcaaaaattgaattttctttcccttaaagttggtatggacaaccaaacaagaaaatgatttttaaattcttttttgacctttttctatcattttttttttccttactctatttcctttccctcaaactttctaggtagtaaacattacctaagataaataaggaagaaaatattttatcatttatttatttagtatttttcttacctttttttgtattttatccaaatataagaaaactatttttctttattttttttattttccttgttgcttttcaagaatcaagcatactttaaactctaattaagagttttatctctagactataatactaaatcacttaaaaaaaactcctaacatcgtttatgttcatctttctttttaaggatttgaaaaacccaataatttggagaaaactgattctaggaagaataatttttagaataaaagattattatttaagaagatcataaatattatagtcattgttgaatatgataaatgattaaaaaaaaaaggtagttggaaatttagatacttttataagacaaatgcatttttctagtatggtatgaaaaaaggtaaaatgataggctttgatcattttttaaggtagtttgtttaaatcattttaatttattttgatttaagaacaataacttttattacactggttattttgattttcttttgatagattttgcaagcttaagcaatttggaggtattggat

SEQ ID NO: 12751 - DNA, 10788 bp, Vitis vinifera
  Intron number 1 from transcript GSVIVT01028283001 (locus G SVIVG01028283001) derived from phytozome v7.0 (chr-ID chr7 ; pos 5552160 to 5562947)
gtctcactagaattaattagaagtatattttggtggacaaattaatatgtttaatggaaaagaaccaatatctcggttatttatagggttattcgattaaaagggtttttgataaaaatactcttattattttcttgtaaaaataactttcttttaaaacaggttactttaaatacttgaaatggtagaaggcatttatgtaaaaataataataataataataagttactttaaaaaaaaaaaaaacatgggaatggttaaattcacaatttaaaaattaattcaatgcttaattgaacaagtggctctaaacgcctaagtgaaaaaatggctctaaatggctaagtgagaaagtggctctgaacgcataactgagaatgtgcctctaaacacctaattgaaaaagtggctttgaacacctaattaagaaagttactctaaatgcctaactaagaaagtggctatgaacgcctcagtgagaaagtgaccctaaatgcctaattgagaaagtcgctttgaacgcctaagtgagaaagtggctctgaaggccaaagtgagacggtcgctttgaacacctaactcaacaagtagatctgaacacctaagcgagaaagcgactacgaacgcctaactaagaatgaatgcctaactgagaatatgcctctaaactcctaactgagaatatgcctctaaactcctaactgagaaagttgcactaaacgcctaatagagaaagtgggtaagaacgataaagtgagaatgttgttctaaacttctaattgagaaagtggctcaaaacacttaactaagaaagtcactctgaacgcctaagtgagaaagtggttgtgaatgccaaagtgagaaaatggctttgaacacctaactgagcaagtgactcttaactcctaagtgagaaagtgactttgaatgcctagttgagaaagtcactctaaacatctaactaagaaagtcgctataaaggcctaagtgagaaaatggctctcaacgcctaattgagaaagtggctctcaacgcttaagtgagaaagtgtctttgatcactaaggtgaaaaagtggttctaaacgcctaattgagcaagtggctctgaacgcctaagtgagaaagtggcgtcgaacgcctaagttagaaggtgactctaaatgcctaattgagaaagtggcttagaatgcctaagtgtgcaagtggccctaaacacctaactaagacaatggctctgaacgcctaactaagaaagtggtgatgaatgcctaaatgagaaagtggttcttaaggccaaaataagtcactggctttgaacgcctaattgagcaagtggttgtgaacgactaaatgagatagtggttgtgagcgcctaagtgagaaaactaagaaagtggctctaaatgcctatgtaagaaagtggttgtgaaagccaaagtgggaaaatggctttgaacgcctaactagactagtggctttgaatgcctaattgagctagtggctctaaacatctaagtgagaaaatgggtataaatgcttaagtgagaaagtgcctgtgaacacctaaccaagaatgtgcatttaaatgcctaattgagaaagtcgctctaaatgcctaattgagaaagtggctttaaacacctaattgagaaagtggttctgactgcctaactgagaaagtcgctttggatgcctaactaagaaaggggttgtgaagcaaaagtgagaaagtggctttgaaggcctaactatgcaagtggctttgaacgcctaagtgagaaagtggctctaaacacctaattgagaatgtgcctctaaacgtcttactaagaatgtgcctctgaacgcctaactgagaatgtgtctccaaatgcctaaatgagcaagtggctctgaacgcctaagtgagaaagtggctctaaatgcctaaatgagaaagtggctcaagatgcctaattgagaatgtgcttctaaacgcttaattgagaaagtcgctctgaacttctaagtaagaagtggctatgaagccaaagtgagaatatggctctgaatgcctcattgagaaaggggctcagaacacctaatagcgtttttttttataaattaatgccaaagtgagaagggtttctttgactgttgacgacgtactaataacattttgctttgggagattgaatatatatatatatgtgtgtgtgtgtgtgtgtgtgtgagaaagagagagagagagagagagaaaaggaaaatgatgttgatgttagttgaagagttgtcttggttgtccttaatcgtcatttccttgaggagggttcaccattcagcaagctggctaaacctattaggagtcactcattggttggcatgtttaattttctccctattgaattaggtgcgcatactagttggtacaagtcatttaataaaaaaattaagaaatatttacaaaccatgttagcgttaaataagagtacactatctgatctaagcattttgaagattctttcttataacttgaacttccttaagggggcattagttttgaaaaatcaatgaagttatggatgaagtgttaaacacaagctcaaggctatatttggttttcaaaaattttgaaggaaaatatgatgggaagaaaatagaaatgatagaaataaaatgaataaataaatgaagaaaaataaaaaataaatttaaaatttataaattattattatacatgcattatttaaaatttattttacttattttaatattaaataattttaaaatatataaatttctaaccaattttaattacatttggttctctttcatatttttcatatgaaaaaaccaaacataataaaattattttcctaatcattttctttctttccttgatacttagacaattttgaatttctcaaaattctaagattttttttgaaagatattagactcctaaattcttttaaaataatatattctttaaagaattaaccatctaagtctatctatcctttggaccataatatcctagtacaaaaatttcaaacaaattgattgaaaatagagagtagcttaggtatttttgaaccacctgtgtttcttaaagttttttttatgtcttggctagatcttgaccccttgttaattttacatgttagtacactgaaaatagaaccaaagagtaaaattccacttgattttgaatctgtttgcattaggaaagaatttggtgataacactcaccatactgcaacaacctcaagtcacaacaacttacctgcaatagaaaaaatggctacactagaagaatcttcaagactattgtaaaatcacataactgatattccattcaagaatctattacaataggtgtataaatactatacaagaaaaaaacacaataatccaagagaataagaaattcctttatttggaaaatatcaatgggtttcaatactacgtgctaagataattttagattcccaaaatattagtgtatattatttgggtctgttatgagtttataattattttaaaattttatagactttatcatagaataaatcttgattcttgtacactaaagcatgcgtcttatgacctttaaaacataagaaattataaataaataaaaaatgtaaatgattttaatgttaagttgcaggattgccttggttgtccttaatcataattttcttgaggaggatttacgattaatctaacattaatttgttcacacgaaattaaacaaggtggccaaagctattatctactagtaggagtttcgaatgtcatcaaattaggtgcatagaatatatagttggtaaaagtcatttaataaagaaaaaaaattgaaaaaccacttccaaattaggtcagcgttaaataagattagaccccctaatcgtggaatgaactttggagcgtctttcttataacttagaccttccttttgggggcacgcattagtttcaaaaaatgaatgaagttctagaaggagtgttattacaaccatagaaagggacatataagaagaaattatgaagaattgataaaaacaccaagtagtaagaaaaaatcttgaattccaataaacatcaaattttactaatattgttgataaaaagtttaataaaaaagatgatttctttctgttatagtcaataaattttttgttgactcttagattttgaattttattgtttgaatgggcaatgattcaagttctaaagtcattaagatcaataccataaaggtgaggatgtttgatggtattatgagaatgttgagtaatgtttagcatattgctaagttgagaaagagtttaatttctttagaggctttggatactcttttgtatgatttttctgcaaaaaaataaataaatgatattatgaatatcaattaaagtgctttgatagctatgatagggaaaaggtgaaaaaattttacaacttgattgaaaatataattttaggtggagctatgaaggtagagtcacatcatgaaaagttttttactagtagttaagaagttgtcaaagtagatggatgccacaagatgattgagattccgtttttcactaagtgtactcattaacacaaggatgaaaacactttcaaaatgaataaagttataaagaaaacaaagacaatttcttaaatcaagttcgatgatagtttgaatttgtcacatatttattctctttaattatgcaaaattgagaaattttaatcaatgtggagattgttggtatttggtttaaattatctatttattatatttaggaaagtcaatatttataatagagtttgtgttttggtaaattacctttttcgagtttgactatgattaggaaactattgattttgggttcatccataggactttacaaatatgaggttttaaataggatttagtaagagaaataaaaatgcataaagagtgaagatatataagcaaagggtgtattgaattttaagtaaaaaaagattgaaaaagtttgaagttgttgggctatgtttgtctagcccatgagcccatatattaggctaatttatatttaggttttccctaagcccaaatatggatataaaaatagcattagggctttggtattgagagaaaagggcatttgattgagaaaaggaaagaagatcaggatttgtttttatgggcactgttccagggctcaagggtgaagttacaagttcctttcatcaacctttttggggaattcctatggtacgttttctccctaatttctttctgttcatgtttcattgggtgatggattcctacctaaagtgaggacttaagtattgtatccctatttattgaagtagaagaaattttctctatggttttttacctctattcaaagggtttttccacattatatttggtatcctcttttgtggttgaatgttattgattgtcattcttgattcttgttaagttgttattattcttgagaggtggttattattgttgagtggttgttattcttgtggaggaatcttttaactttggcaggttaatactctagatctctccctttatcttcccaacaagtggtatcagagcttggttgtggaacttttattcttgaaaggaatggagataaaaagggaactcaacctccatgataaaacttaacaatttaaattaggctatgtggaagtccatgatggaagattttcacaccatcaaagatttgtcaaatacttttgaagataaagaagttagtcccaaagatatttttgatttggaatggaataagatgaacaaaaaggcaattgcctatattaggcaatagattgacacatcctcacatcaccatgtggcaaatgaaacaaatgcccataatctctagaagaaattggaatccatgtttgcacaaaaaactgttgggaataaaattttcttgttaaaaaagttggtgaatatgaagctaaaggaaggaacacaaatgacagatcacttgaatgtttttcaaagcattgttaatcatttggttgtgttcattaccaaatagttagaaaacttttgttgtgactattagcaactctactccgaatggtgcattgtctatagaacttatgaagggaaatttgttcaatgaaaagacaagaaggaaggcttatgacacagaaaatgcacgagccctcatcatagaaagtaaagaaagaaacaaggataaaggatagaaaggttatgacaagtttgagggaaggtcccaatccaaaggtaaaatcaaatgtttccattgtggaaaagataggcatatgaaaaggaattttcgaatttggaaaagggaatagaataggtagaatcaggaaaaagaatatgaaaagaataccacaacctcagtatctaacaatgatgaagttttagtgctctcaaatgagtgtttgcatatagataagcaagaaattgagtggactatagacattgtagcctcctacatgctactcctcacatggagtcgtttttttattatagagttaaagactatggcatagtcaagatgggaaactctagtcactccaagattgtagggatgggtgatgtttgctttgaaaccaatatgcggtacaagttgacattgaaagatgtaaggcatgtttcaaatttacgccttaatctaatgttaggttttgtcttggacaagcaaggttatgaaaagcactttagcaaaggcaaatggaagcttactaagggctcattggttgttgcaaaagaagaagcatgttgcactttgtataagacccaaggaaaagtttgtaatgatgagttacatgttataaagggtacttccttggagttatggcataaaggttggggcatatgagtaagaaaggattgcaagttttggtaaggaagttcttaattcctttggccaaaaatgaatccttatcttcttgtgatcattctttaattagaaaacaacatagggtttcctttagtagcagatctaacaagttagagaagttggaattggtatactctaatgtttgtggcccaatggatatggaaaatcttggaggaaacaggtactttgtcactttcattgatgatgctaccaagaaggtatggatttatttgctcagatcaaaggatcaagtctttcagtattttctacaatttcataccatggttaagagagaaactggaagaaaattgaagtgtctcaggtctaataatggaggtgagtacacctcaagggagtttgaaacttattgcactaagaatggtataaggcatgagaaaaaagtttatggcactccatggtataatggtgtggctgaaatgatgaattgcaccatcattgagagagttaggtgtatgttgaatactgcaaagttgcctaaggtgttttagggtgaagctactcaaactgcctgctatttgataaacaaatctttatcaggtccattgaactttgaggttccaatgaaggcatggacaggagaagatgttacctattcccacttgagggtctttggatataaaagttttgtgcatgttcctaaagaacaaagatctaaacttgatgataaggcaattccacatgtctttgttaggtatggtgatgaagagtttggattcaaattatgggatccaactaagaagaaattggtgagaaatagagatgtggtcttccaagaggatcaaaccttaggagattttgacaaagccaatcaattgaaaggtacaagtgatgacttcattgagttggtacctattccccaatcattagagcagcctagaaatgaacaggaggaaattgatgagctaccaagagatgatagtgcaaatgacatacctgcacaagagctaattcaacacaaggagtaggaggatttgataccccaagttaggatgtctactaaagagcatcgtccctttactatatatccctcttctgagtacatgttagatgagagggagccacaaagttttcactaatctatgcaagatgagatggattccttgtagaaaaatgaaaattatgagttaatacaacttcctaaaggaagaaaatcattgaaaaacaaatggatattcaagtggttaagagatatggttgaagaaaatgcagctaagttgaagaagattcacttaaacatgttgacaaaggttgttcccaaacagaagcttcagttgtgcattggaacaagaggtttgaactctatgtgatggagttatagattggcactctcctctcatatgctggagggggagattgttaggctatgtttatccaacccatgagctcatatattaggccattttatattttggttttccctaagcccaaatatggatatataaatagcattagggctttggtattaagagaaaaaggcatttgattgagaaaatgaaagaaaagattagggtttgtttttatgggcactgttctaagactcaagggtgaagtcacaggttcctttcatcaacctttttggggaattcctatggtatgttttcttcctgatttctttctgttcatgtttcctggggtgatggattcccacctcaagtgaggacttaattattgtacccccatttattgaagtgcaagaaattttctctatggttttttacctctatttagacggtttttccatgttatatttggtgtcctcttttgtggttaaattttcttgattgtcattcttgattcttgttaagttgttattattcttgagaagtggttattattgttgagtggttgttattcctgtggaggaatcttttaaccttggtaggttaatactctaaatctctccctttatcttcccaacaaaagtgtgtgtttttaaagtttattaataaatttgacctccttttcccatgaatgtaggcgattataatgaaccccataaatcttttgtcttccgtaatttattttgaaacctataaatggaggagatgaaagacaatatgtttcaaggagaattgatagtgctttcatgaatattctatctcaatatgaggggaaacattgtcaactccttttttgttgaaagtttctcatttacttctttttaggtaaacaacttaatcttggcttgttcttacttcatgtgtcaacgacaattatcatgaacataatatgacttagttgcaacaaatgtccaggaaaatttgggaggataaaaaaccaacgcacttgagaaagcaaccatttataatagccatagtattgaaaacttatcaattatagctatcaaatgtttttatcccacaccctcaacaaaaagcaccgctatacaattttagaaaaagagcgataacaaaccaatggtatgtttgaaaatagtaaaacaatttcctatttttaagaggaaaacaataagtaaacaacatctagcaacaaaaaaatagaaaatagttttctatttttaaaaatataaaataacatgttttctgataacatattttagttgttttcatttgttttctaatggttattttaaaaaaaacaaatatttaaatatgaagaataattaaaaataaagcactacaaataaaagttattttcaaaaaagttatgtgatagctcacatcaaataggagaaagacattatacacatatgaattcttcttaatcatgcatgtagatgtgttttaaagtcataaaggttcttttgacctacaatggacaatatctacatggctgagattagattgtaagtcaatccctgaccttagtgtgagtttgtttagccctacaagaaatgtttgtttgtttgtttgaccccacatgaccctgaaatgctatgagacataatgtggacgttgtgtcttcatggaggtcaattatgatatctcacaattagatggaacaaaaatttcttaacactaaatatgtatgaactactcttaactatatagatgtgtttttgagtcatgaaggccagagcaaaaaatatctacataattaggaattttctatatattaaatcatagaactcaaataaacttttgtgcaataaaacatcaaataacacttttcaaaaacagttctcaaaatctattttgaaaatactttctaaacagaacccaaatttttagttgaaaaagaagttaagagcacgaaacattaccatataagacttaaaggaggttttcgaagttcaaacgaatttcaaactactatattttgtgtaacaaataactattgcttcctcttatgtcacaaatcttaattagctatgtttaacaagcattaggtagatctattcattgaaatgtcgcttttctttgtctttttttttcatattttatattgaaaataaagacctttgaaaggctattgttttctatatagcaagaaacacagaaagataatattggtactccaaaaacattgagccttatttcagtcttagaaactatgacaggaggaaaaaaaaaaaaagaaaccactaaggggaaaagaaaaggaagaataaatttcaatcaaccatattgagcagaaatggactagtaattaaatgaataaatgtattcacaagcgtaaatcatgtggagaataactcaaattaaggcgtttcctaggccatacatgcgccatgtatggtaaagcatcaactaccagcaaagatgatttccaacttattcatttattctcaatttgtcttagtgtaaaaaccttcagaagggtacgtacgtaccacatgtgaataataatcaaaattacaaaatacgtacaattgccagtatgttcttcattatgtaaacaaacgcacaaactttatcacaagaatgacaagatacacgaccta

SEQ ID NO: 12752 - DNA, 7934 bp, Vitis vinifera
  Intron number 2 from transcript GSVIVT01031951001 (locus G SVIVG01031951001) derived from phytozome v7.0 (chr-ID chr3 ; pos 5641637 to 5649570)
tggttccgagctcatcaggcgagtctgaatatcccaaaaccctaatttctgtgcatttgattatgtttgtttgctgagaaaaggaaaagaaaatgaatatttgtctcgtattttacgaagttggtattgaataaggaaatattcacatctactgagctaaatagaagcattaggtttatcattttctagggtttgaaattggaactccaaatccatagtctgcatcttttctaaattttccgagtaaccaaaaggagcatcaattttttttacctgtaattcaatttagcttgcctcttaataataccctagtttttgttcctttggtttggttgaggatatagactagtttactagaagactccttttccagtggttaattgctgaggaaactaatgaaaaggaaagaaaatgaaatcttgaattttgtgttttttttggttattttggtttttgaaaaatccaaatttagataagccaaggtgaatagctcttagagcccatttgggagtgattctggttaagacaattttgtttatagctacttttgttacatttcttattttatgtttttgaattcataaaatcgtagtatcttttatataaaatacaagaactctttagaggtttacaatgagaaggtaatggttttaaaatcatttttaaaaaaaattaaggtattaggaaatttttactacctcaaattttagaaaattttaaaatgatttttaaagacataatgtaaatttatatttgttgtacaaggtgttatactttttatataaaatttatcactatttcttatttttaaaagcaaagaataagaagtgcatccaaacaaacacttggtgtttagatataaattaaaaaaaaaagtggtttaattgtatttttggtaatgtattatataacaaaaaaaatgacttttggaagaatcatctaccaagttattatcgaggaaccacttggagcgatcctctagatttttgaaatattttcaaaatcttgtcaaggacctaatttttttgtaagaaatctcttccaagcattaggaagtgcatttagcccatttcaaaatcagtcccaaatgggctcaatctaagttgactagtgtctttttatttttctcacctgtcaaataatgaaattttgtattttttctcttttcccacatattagcaaccaagtaggacacctttggtttttattttagtgttatggaataaactattctcataaagatgaagggttttggaatggactacattcataattttttattttttattttaagtaagagaatgtattaaaactgcataaaagcgcacaagagtgcactagacataaacagtgagtgaaaaaagcaaaactaaaaggagagaaaacaaaaaactaccctctccctcaacaagagccccatccattcaatctacacaatcaattaaggaaaaagaactctcatttatgttcacccaaatccgcatagcaagattgttaaagaaagaactttttctttttttgacagatagaaaaagatgtatgtaaagaaaagaagagacaccaaacgcaatgccctcaaagtatatagagagttaaaagaaagaacttttaagaccttgatttgacgtttcttcgtctttgaacactctttaatttcctctctaaatagtccaaattatacataatggggttgctcttcaagccttcctacactttcttccctcaaaagaaccttgtaaccctagtagggtgtccctaacagaggcagaaataaccttgggaatgttaaataaagagaacaccaacaaccataagattcttgccttgtagaagaatgcgcttaatggatgttgcctcctctttgcaaagagctcacctattaactaatgactaacctcttctttggagccgatctaaagtcaatacattccccccaacaagcttctcaagcaaaaagcttgctttagaaggaatccaggagttttgaataatccctgaaggaaaaggggtgacacaatctgattctaacagagaggaaaggtctcttacaaaaaaccttcctttgtgtttttttttttttgatagataaagtgaattatattaaacggaaagaggaaacactttgatagtgccctctaagtatatagggagtatgctaaagcagcccaaaagctcgaaaccaagggaggaggaaataaacaacaaaacccctacccttacttagagcctagccacttaaaaaagctaacaagagaagaaagactcaaaactataaacaccctaacccaaaaccaaagattacatacaaaaaaatatttcagtctttgaagcgaaagttcctcattcccaaagctaacaaattcctttccttccagactgaccaaaatatacattaggaggccatttgccaagcctttttacgggttttccccacaaatgctcaatgtcacccaatgagagtttccttcactgaaccagagagaacccaagccacaccaagtaaggagaaaataagattccacaatgcccgcatctttacacaatgaaataaaaggtgatccactgtttctactttagaaagacatagaaaatacctatttgtcaaagagtaccccctcctctggagttgctccaaagttaaaattttaccccaggaagcctaccaagcaaagaaagctaccttaggagtcacattcgccctccaaatactaccacaagggaacaaagaagaacctccgggctccagaatagaataaagcaacttgactgagaaagctccactcttagatgctatccacaccactttatcctcgtccttcctttgcaccctaaatgcttagatcttaagcataaaacgctccaccatctcaatctctcaatcattaaatgcccttgagaaaagaggggtccaaccatccccaacaccgtctgggctccaaacatctgatacccaagcatctttagccatggaaatggcaaataaagaagggaatgacttgcaaagaggctcatctccacaccacttgtccttctagaatctcactctcctaccacaacccacacggtaggctaaactgctattcagacacaaccactcctttctaattgctttccaaagcccgacaccatacctcccgcttacggcccgagtgcaccattcccttctcctctacatcatatttgtgactgatgacttgcttccacaaagcctcactttcaatggcaaagtgccaattccacttactctagaaaggtttattcatcaaagctaaatttctcacacccaaaccacctttctttctttccaagcaaaccaagttccacctaacaagatgtggcctctgcacaagagttcctccaccccacagaaaattcctctggatcttctccaatctcaaccttacttttctgggcaaataaaagagagacatgaagtaaatacgcatgctagagagagtgctccggattagagtgagtcttccaccttttgatatataccgtctcttccacattgcaagcctttttcaaaacctctcttcaactccatcccaaaccacctctgatttgaagggtgcccctaaaggcagactcaaataacagaatggcagaccgcccactttacaacctaactccaaggccaaatcctctatatcatgtaccctccccatcgggataagctcgtttttttccaaattaactctcaatcctaagcaagcctcaaaccacatgagaagccagcttagatacgtcaactgatcatgagactcctcacaaaacaccaaagtgctatccgtaaatagcaagtgtgagatcagtatcccctcacctctccagcctctcaccttccaccctgataaaaaccccccactaatagccattctcaataagcaactaaacatctccatggctatcacaaacaaataaggggagagaggatctccttgtctcaaacccctcgaactttggaaaaaacctaaaggagagccatttataagaacagaaaatctcatagtagagatgcaccactctatccacttaatccatctctccccaaagcccatttttttaagcattgccaacaagaacttccagctgacatgatgataggccttctctatatccaacttgcacaacacacccccttgattgcttttcaacctagaatccacaacctcatttgcaatcaaaattgcatctagaatttgtctaccctccacaaaggcattttggggtttcgaaatcactttccccataaccttcttgattctatttgccaacaccttggccaacgacttgtaaaggcttcccacaaggctaatcggcttgaaatctttcaaatcttctacaccacccttctttgggactaaaaccaggaatgtggcattcaaagactttacaaatctgctcctttcatgaaattctctaaaaaaacccataatctcaaccttcaccacatctcaacaaaaaagctaaaaagtcatggtaaatccattaggcctgggggctttgtccttgcctagatctgatagagctgcaaacacctcttctttcgaaaaatgaatctccaaaccctcagcctcactgctgactaaccccataaaagacagcccgtcgatacaagggcgccacccctcttcttctgaatatagcttttgaaatgcccccaccacactattttttaaattaatctcctccgagtgtcatcaaccattcactttcaacttggacaaccagtttcttctactatgagcattcgccatcctatgaaaaaatttggtattattgtccccttccttcagccacaactccctagagcaatctggccaaattactctatcctcctactgcttcattgactaccttgaagttgaaagaggaacctctccatagaagctaactcctaatcatttagattcctagcaaaatggaagttctaaccccctcctccctcccttcgctcctataaatctaccacccacacctcttctgcatcggataaggcaaacaaattggggaacatcacgtttaaagtctcctcactataccaattatctttccaaaacttcactcttttcctacccgcaacaatatagggaactcttgaattgaagaaatctcactctttacttataactttccataaagaccccataagtgtctctcacccaatgatgaaaaatcggtaattacggatatatcggagatatattgatagatgttttgacacaaaatatcggtgaacttaaaatagatcagaaattataaaaatctaagaaaaaactcttaaaaataaaattagaagtataatagaattgtaatgatatatatatatatatatatatgtatatatataatataatttattatatttgataataatattgtacgtgctaataaaaaaatatgaatttcataagtatacatttattattaaattatatcaaatattattcgataataatattgtggtatttgattataatatgtttaatttaaaaatatatttaatattaaaattataattcatttaattcaattatattaaatgatatataataaatgataatatatgtataatttttaatacttaattaatatattaatgatattaaaaacactatgaagaaaattattacgataatttttatatttttggtattcaaatagataaaataaattcatttaattataaaataattataattgatttgttctttaaaacatttttttaaaattatgtttatatgttgaatttgaatatatatttatttggtgcaacttatataacaagggataaatttgctccaatggccggctgaacacattgcaaaccttttggcatgggttcgagcccctgcagtgaagaaaaatgtaagtcatttttgaagtttgactgcacatgccgcgttgaccaccccttgaccgccccaaaatattgtgataaaccgacgataaataggtaaaattccaaaaaataagcgagatttgcaataaattgccaaaatattgcaacacctatatttctctcccatatatcgtgtcgaggtctattgatactcaatattttaatcactgctctcaccccacatgatcgccacccaccccccttcttccttcccatatttccccttaatgaccttcttccaaagtgttccccttttacttgagtaacatcaacactatttgcaaagaagagtttcatgtagcaaaaagagagagaacaaacacctaatccacctttctcctttaccttaaatggacaaccacttcactaagtgggctttgttctttaaggctcctcctccccaaagaaagtccctttgagttttctctagtctcaacctcattgttcttgggatagtgaacaaagacatgaagtaaattggtaagctagaaaaactgctacgaattagctaaaatttgtccccttctagagatgtattgtcttttccacaaaaagagccttttgcaaaaccgctcttcaacctcatcccataccacttttgacttgtaagaggccccagtggaagacctaagtaaaatgactgtagttcccctaccttacaattaatctttgaagtcaacacctccagattgtccactgaacctactagaatcatctcactcttatccaaatttatctttagccctaaaatagctttgaaccacatgaggagccaaaataagttagtgacttgatctagagaagccccgcaaaacacaatagcatcatcagcaaagagcagactacattcattaaaaaatcttaaatgtggggtttgtactaattgcattttgatttcaaggatgaattctgaaaattgcatttggttagttgacttgagaatgcattcttggaaaatgaatcctctatttgtattggagtcccataatttaaaaaaagtaagaatttattactttgccaagttgatggtgatacatggaatatattttaccatactctagacacaaaaaacttatctctcatttgaatacacttcctgttttttgttttaaaaacagaaaatagtaataacttctatgtaagaagtagaaacatttatgcaaaaagtatgggcttaccttatgttcttaaaaattgctttcaaaaattgtaaaattcgagataaaaaaaaaatttaataccttaattttttatacaccattacatttttaatataagcctctgaaagtttttgtattttatataaaaggtgctactattttctgtctttagaaataaaaaaaagggagtatatctaaacaaacactttaaaagtaggtttccctgcttgataagacatcaccacttcaatgcctctactgccactgccaacactgcaatgtcattcttatgaaatggtaagtgccagtctgccagggttaccatcatcttgcctttctctctctaacattctcacaattcctgtgtccattaccaacacctcctccatcagtcactggcactgcattattgccttttccactgcctcagtgtggccgttgcaattgctggcactattattgtcatcattgttgccttttccaccactcacatgggaagttcatttttctaactggttcatctatttacttatataagtttgagatttagtaaggaaatctcaaacattatttcttgcatcccttaacccgattttttccaccacctataaggggagtttattttttcaactggttcatctaggtaatcatataagtttgagatttagtgaggaaatctcaaacattgttttttttcatgccttaaccagatttttcattttggaaaattttattgttatggttcattttaaggttcatactatttcggaaatgttatcttaatttcatgacacagtcacaatcctgatttaggattttgacttcaagatgtagaattcatttgtttacaactctctctacaggttggt

SEQ ID NO: 12753 - DNA, 1794 bp, Vitis vinifera
  Intron number 3 from transcript GSVIVT01003955001 (locus G SVIVG01003955001) derived from phytozome v7.0 (chr-ID chrU n; pos 14031164 to 14032957)
ttggccaccaggtgaggagatttactttccatacacaatgagatgaaagcatgtgttcaatgttttcagttgactgatatctcttgaagctttacccagtaagatacaaaattccattgtagtttcaaaagtttatttccattctctttggcttggaattaagaatatgaaaataaaaatgcaaccttttgaaatataaagaatctctccaaaagataagaagaattagattttccttagatttgttttttgtttttagaatgcgtatctaaggttatttcattttcattgttaggttcaatcttatgagatgtgatttgtctcaaattcccttttttttttttgggttttaatttgcaagcttccactttatatgattaatttcattattagtttatactcaattgatattaatttgctttattgatttgttcactcctttctcaattctactttgtttgacatattttcttcctttttatgtttgagtatataattagatgatactattttcactttatctaacatattgtcccatcatttttttctttttcttttgaattgattttaatgtttccctttatttgatccaattttattttttaccttaccaataattgtcattgttcacttcatttaatattttttgttgatcaaatatagtctattattaagaataactttatttgacttaatttcttcttcatcatactgaattgtattttctaatttgatgatcttaaaaaacgcaaacttttgcactcgcttttattttgttttatgctttcattttattgaaattgtagatatattttgagatggagataggtctaaagttaatatttggttgaggataaggaatactattgagaatatatacatagctattcaagtgtattaagagccaaataagatctcaagttgacttttttgattgagaaggaggaatatttattaaaagaatattattgacttccttgcaaattgggaaccatttcttgtctttgtaaaagcaaaagattgagtttcttcttgatttattttcatgggcatccattgagatttcctttttatttctaaagcacaattttctaattattttattttattttttctctttcactcaagttatgaaccaaagctgaagtaggtcccaaatatgctatttttgaaaatattaaatctgctttcaccatgtgagcctactaaggaagatgttgaaactatttcatatttggaatctattgcttcaaggtttagtttccctaagagtatttcctttcacattcatggagttagaaatgctatttttgaagtcaaattaactattttgatcaagagggaggaagtcctattttataaatctcctctttggcagatggaagggtttgattccctcctgactgttgtgattgacatcaaagatctcattttaacttatttggtttgaatgggtctcaccctctttagttctaatggttcaatttccttttcatcagttttctattttttacatgcttttttgacatgggacgagtgttagactaattgtttgggtttggtagatatttgattttgatggctccaactaactattagattaaaagcccgtttggtagtgattttaggaaacgcttctaatttttttaatatttaaatggtagaaagattagaaatgttttatagaatcactatcaaacatacttttaaagtaaggaatcttattgagaattttgagtaagagaaatacatcttgcaggcctacccgcacaaaattttgacaggaaggaggtc

SEQ ID NO: 12754 - DNA, 650 bp, Vitis vinifera
  Intron number 1 from transcript GSVIVT01008150001 (locus G SVIVG01008150001) derived from phytozome v7.0 (chr-ID chr1 7; pos 5315220 to 5315869)
ccaaacgccctccactggacgtcgtcgaacttgtggtaacctgctctcgtctccttattcgtcgtttggttgctgagaaataacccatctccctattccaaacgaatctttttcctctcattctttgtacttgtatatctactacaaaacaattttgactgagttgatgataggaatggctagtgaacagtataaagaggaaagatgatacataagaggatcacgaaagaagatagggcaagcggactatccatttcttctttcttttgttctctaattcaaatctactttttatatcttggaattgatgaagatatcaaacaaagaaggctgttgatttgtaaaaattgctctctgtttgtagttcttgttctgtttcacaagggattattttattaaattaggttttttttttttgtagcataatattggcgttcagttattatcaaatcatgtaacagaaagtggaaaaaatgttgctatgtttctcatgaagctatttgagatgggttgtctctgtataatcatgggtctaggtcctttatttggatgattatgagtattggttcttgtttattttcaattttctgggacctccctttactgagtggctgcacaggttcgtgagctagaaaacaacccaaacttca

SEQ ID NO: 12755 - DNA, 214 bp, Vitis vinifera
  Intron number 6 from transcript GSVIVT01022278001 (locus G SVIVG01022278001) derived from phytozome v7.0 (chr-ID chr7 ; pos 18117387 to 18117600 reverse strand)
gaaaggtatggctggattggctcagatcattgtcatatgaccttgatttgtgaaattctctgttattttagtttttaaatatcttcacttgttctattgtatctgctttcttcaccatgtgcaggtgttgaactacaaataaccataatatctgttgttgttgtttttttttttttttttttgcaggaggagcatagggctcgagatctatttt

SEQ ID NO: 12756 - DNA, 2057 bp, Vitis vinifera
  Intron number 13 from transcript GSVIVT01036631001 (locus GSVIVG01036631001) derived from phytozome v7.0 (chr-ID chr 13; pos 19426192 to 19428248 reverse strand)
cctcatattgtttgattatctgaaggtactgatgttcatctcttggtctttttcataatgtgcacgtttcaaagaggttactgttttattgttaattatgttacatgatgatgtaaatttgaatgttgtatgtttgaacaaggctaacttagaggttgaataatcacactaccctaagagcatttgtgatgctaagaatgctgtctcaatcatactacccttaaaagcatttttgatgttgattagactgtcagcattaattcttgagactgtgtgtgatcacttttgcttgtgccagcatgcccacctgtcacatatgcaggagttgctggtacattgtttataggtcaattggtagtttaacatggtaatgaaattctggttagttggagctctcatatttaagtctttcattgatctgttatttgtaatccgtaatctcttattttcaaaatttggtggtttggacacattgaaggattatagcctatttatctggttagtactacataaaatttcctgggaagttatttcttcttacataggaggtaatggattgacttttgtccttaactcaagactgccttggtcagtggaattgaaatgattgatcagatgttaactggcaaggagtgcatttattcaaaatgtggagagattcttaggatcggtgtgaatgagtgatagtgaaaggcttatggccatgccaattaggattttttgattaattaatttcggaaggcattgaaggattattccctatttatttggttagtattgtttataaaattgtctcgaaagttatttgcttctctctcaagaggagtgattggttgactttcttaattccaaccacctttgttagtggaagcgaaatcattgatcaggtcttaatttttaatgaatgcatttatccaagatgcagggtgattctgggtatatgtgaaagagtgacatgggaaaggcatataaccatgtcaactgggactttctgatcagtgaatttggaaaatagttcttgataagtaatggagaagttggatgtgtatctgagattttctactgctgttctctcttcttttcagcggttcccatagattttttacctagattaatctttttccttttttcttggttctggagtgaaggcaaagacgcaaaggtgagatgtctttgatgtgcatagactgttgtcttgtaaacaatatcacagcaaattaactttcctatacctcctggattattctctaggtatattggttggtttttaagtcttatccagaatttatcttaaaaggtgttgttatcatgtgagaattagagagtgagagtagtggaaaacaacatttaaaatgttttggggatttgtaagaaggctggtaattctttttggatatctattttgaactggcaagtttatgcggcttattttctaactccttactttattggaattttttcttggcatatatccatgagatgttagtgcacattttcttctttcagtatcatttagagtacttcatgtttcaattttttcatggtataccttgttggctgttttgaccggaatttagaacttagagttccttctccaagagcatcaccatgccctagggctatggctgggatttttttttcttcctttttttgattagctgtgtatttttttctttctgaactactacaatacttattatatacttataaagcacttgttcattgttcttttgatgtggcataacattatcatgggagaacttcgatcaggggattctgttgttttagattttgtaaggcaaatgtgctgataagtgtaaaatgtttttatggaaaacttgaaaggttcaaattcttggatgtttttccttttaccttttggtttgggagagcagatcttgttggtcttatatgtgacttccatgttactttttcaatgtagtagttaacagattcgactcttgttatctttttgttcttagcaaagctttccttttccatcacaagttagttgtcaactgatttgactcttatttgtgtataggcccctggaaaga

SEQ ID NO: 12757 - DNA, 1932 bp, Vitis vinifera
  Intron number 3 from transcript GSVIVT01036607001 (locus G SVIVG01036607001) derived from phytozome v7.0 (chr-ID chr1 3; pos 19141645 to 19143576)
tcaggcgacgttttcgtgcttctaattttcaagtgtgtaagtctgcccaattgttttaatactgtgctattttctcttgattttcttgttgtgacaacaattttcacttaacaggatcttattagattagcttagtctttcaggaatattctattattggcagcatgaattatttgaaccaaatgatcgattgctaagtaatgaatcctaggaagacatgtgatgtgatcaattatcttggctggatactatggtttcccaacaccatcaactgatatgcatatagcctttaattgaggttctcctatttgtttggtttctaataaaatcttatgaatagccctaccattgtttggtttggttatgctataaaaattgcaatctatgtattttccttttccatctaagattagctgatctcccttgagttccatatgcttcaaaacaagtggttgtccatgttgtcaataacattttttcttcaacatcataccaagagttttatggactgaataaatgtctcatttgacctttggtgttactgagatggcacacttatcttaagctttagtggagtttggaaggacatgtttctgttccagctggcatccacaatgggctgataagtgagtagatggaaaacttgaaggtgttaaagacttaatatgtgtgtgcttgcttgctcttttgtttcccttggagatgttaccagatagcttttactcttgtttgtgaatcccttagagattgtccacaatgataagtgagaaaacctgtacacacatgcacaggcagtctagcatacccctgcaccaaccacactcacacatacctattttttatgggcacaaacacacacacatgcaggagtatgataaagaattcagctcatgatttttatgaacggtctagaatagttcaatttctctattcaagcagttgaatagaacttgcctgtatagtctagtggtatctcatggctccccacgggaaaggctttgggttctactcttgggaaggtggtcttggtctatggggtaggtaaatgggttctctagtgctaaaaagggaggggagtgaagagcttgtcttccacgtgttgtttatgtttactgcaagagaactttatgctagtattattctgtgaatgctaagatatttggtggaggtattatagccattcttgaacaattggaaagcagggtgtaagatgatagttgtatatttttactgcaaaaaaagtatgtgttggcaaatattcttgctttagtagtttaaggataccaaaatatgaattgggcatggtgatttgtttttcctagatactcttttttgtggtcaactttgcttggtttgtttgtgtggtctttctttgtttgaggtgtgtttggcttgttgtaggacgcaccccctcctttttggccctttttaatgcatgttcttgttgtctatgaataaaaagagatcatatagccgtagttttaaaagaagcgctgtaagcatacctaggctcaaggtgcaaccacttcctagttatagtgtctcgcttgccaagacatgcgccttattgaagaggcacgttttgttgactttactcttcctttttaaacacttctattcatgaaatttttaattctatactgaaatttatataatttcattacttttttattaaatgtttcttttaaatgtttggaatcttatattttttattaattggattagattttgaattacattttataaaattgatatgcatcccacatcgcatttcacttcactcaggtgcgcgtctctgttacaccttgtgcctaagctgtaggagacttttgtgtcttttaaaactatgcatatagcaacataggtaaaaatgatgcaagtatgaatttggttttttatgctgtaggctgtgactcgagtgaagccatacat

SEQ ID NO: 12758 - DNA, 4620 bp, Vitis vinifera
  Intron number 5 from transcript GSVIVT01000280001 (locus G SVIVG01000280001) derived from phytozome v7.0 (chr-ID chr7 ; pos 21005982 to 21010601)
ttttccagttggtttataattactggagagaaaaggtatggattaaatatcatagcaaaagtttttatgaaatacatgaaagatcttacatcatttggaaagaatgcttgcgctagaagactgttgattgtttgcggtatgcaatattcttttgtagggttgagagcttagttgtcaactcataaattatgtcttgtatcatttttacctatttcttcatgttgtctatcatttggtctcctcacaaattatgcataaaaaattgtctttttttttccacagttagaaataaactaaaagaaaaaaatgtatatagattagaaaaatgacatataaagcaatatgtaaggaaaaaaaaaaggtgcatatatcccgacaataaagatttgatgatgtcattaaatatgaaaaatatggtccatcagcacagtaatcctgcctttggttatggatttgtataaatagtggtgcacatcagagcttggattttatcctgccccctctgtagagtggatatgctccagggaattatggaggctcctgcaattctatgactaatctgtacttcttgaaatgtgacgatctcagatgatgaagagattttaaatctatcccaaattctttcagtttgtagtgttgtcaagggagcatgcatgaatcccttacaactccaacaaagtatgcaatgtctagccaagtatgagatacataaatcagccgtcccatgagcctttgatatctccattttatctgtaggaacactaccttctttggccactaactttggtttggatttgcaagagcatctatgcatttacatcctaatataccagtttcattaagttgactttatatttcctttaggagatgtagatccaattgaacctttcaatgtaagcaaatcagaaatctcttaggtttgatttttgttgagtgccttcatatcctcatttatggtgtctttccatctaggatgaacaagggcttcctccacattcttcatgattgaatctacaatcgattgagctgtaaagttgtatttgttgtttatcttgtcataagacataaaattggacaaggggtgtttggtacaactccttacaccttgtttgatagaggaatgtccaggtcagtacaagaaacaggagtggagttggaaggatacagtgtagaattaaaatgattagagttggaagttgcaccttcttctagagtggatgatggggcatccataggaagaacgatctcttgtaccaatctagattcctaatgtcttctggagtaaatgagatgttcgacatcttaagttccttgtcatattgtttgattcttcccatttctttcattttccttggcaagcatagataatggaatagaacatgatttgtgattgaccttcaacttgtgttttctccccccgaagagcagttctttgatagtatggtcgttcttaaaaaataaaataaaattcacatccatagtaacaaatttctttctagattgaggatgaaaacatttatattccttttttgtaggtgagtaaaaaatataactaaagattttgggagaaagagaaccaaaaccaggaatataaaagtgactcttcaagattggtaatgggtatcaaagtcgagagttttgggagcattctatttatcaagtaaacaatcatgaagatagcatcaccccaaaaaatgtttagggccatttcttgcaaacattaatactcaagcaacatcaactaagtgttgagtttttctttcccacattttgttttagtgttcttccataactagattggtgaataataccattttatacaaaacagtctccaagttttttattgaaccattctcctccattgtgggaattaaattacctttacttgtgcacatgcaccaccaatatctactatttgagataagataaaagaaagaaaactagtttgccgggtccttacaaacatttccttttcccatggaagcttcaaaactggtagaactgcataaaaacctctttgtcaagatctccatgaagaaatacactctctacatcaagttataacatcggctaatcacaattttctgtaattgagagtaacactcttacagtgttaatttttgcaattaatcaatccatatgtatgagtgagtcccttcgatacgagcttggccttatatctgtctatggttctgtcaacattgaacttaatagtaaacatccacttacaaccgtcttcttatctcttggtggttctgaaacttcccaagtgttctttttttctagagtctgcatgtcctccaaaacaacatctcttcactttggattttcaagtgcctcatgtacatttttttggggtatttacgccagagagattagtagcaaaggctttacaagtagagttaagacgatgatagatgcaaattttgaaatagagtgttgagtgcaagatctaaccccctttggatggttattggaatatcaaaatcaaatgaggaagtaggaactgaaaataggagagtcaaaactagtgttacttgagttaagaatttctaaagtggaggattttgactatgcatttgatgaatggcctctttattccttcgagagtaaagttggagttgttttgtttctttcttagcttgctcaagtatctcatcagtgagaagtagtatcttcctcggttgctccccctcttcagaaattccaacaacattcttcactttcagcaaactctaaaatgggttgttaaaggattccatcacaggtaacacattgcaaaactgttcttcatcaaccttattctccccttgaagaacagtctgggagtaatatagttgttgttcaaagaaagtgacatccatggacacataaaactttcctgttgctggatgaaaacacctatagccttttttgttagcgagtatcctagaagtacacacttgtgagattttgggtctagtttactccgtccctggctataatcaataacaaaagcagtaaaaccaaatatccagggtgaaattgaagaaattaagaagagattggatagatctatcatatgatccagggccactaagtcaatgatttaagggttggattttgaggtatggagagcaatgatgagaaaattacccatttgggctagatttgatgaggaaggttgtttgtgacattgactcatgaacctacaaagttgctccatttgttcctttgtgaagagaggcacctttgtattcactgcatttgctgtttcaggaccattaagaggatatgttgtttttgctttgcatcgaggactattgctacgttgacttcaattgtttttgttccaattttgaagccttctatgaagcttccaccacatatcataggtgtgttgtgactggtaacaatgatcacatcataacttatctttgtcatcatttttgtgcctcggtcctccaaaaacagcagcttcaggtttgctaactgcaagtgctgagtttttcagctttgtattcactatggtcagtcgagaattttgctttttagtcgtcaattagagtatgctttcttctttcctgattgtggaaaatacttctattatggataggattgactccttccctaaaacgtgacttcttacttgatcgagttctggattcaaatcttccaaaaattcaaagatttttatctctcttgaattgtcttgaacaacacattatcttccatatttttccacttatgatcttggttcttatccatcttgccaaattctatttatctcattatagcagccagttacaatcatagaaccttgacaagtgatacctataaaaaaaaaaaaaggaaccttgacgagtgttccatacctttccttttaattcatacaattgtgtgctgctccccttatctaagtatgtatcaccacctcccaaatttcttgtgtctattcaaaacatttcacttatcgggaccattgcacaaaattagcaccatttaatttttgggtggtgatctatagagaatagttgttgtttgaaataatctcctccttagtttcttttctactgtttcctaatgcaaaccttagacatggttttttgtttttatgggagaaccagcagcaagctggttaacaaaaatggactatgatagtcgagggaaaaaagaagatgtagaaccctagaatggctctgataccatgaggaaactctggattattccattgacttcttgagtggtgatgattacatatttatatagttacaaaatttaatctaatctaaactaagaaagcatataaagtgcatctgtacaattggattctgcataaaaaagggaaattcaacagcctaattacatacataattctagggaaacgcaaaggaaagggaagtatctagaaagtaatattcatagttagaagactgattcatgcaattttggtctttgaatttttcatcacttcggtttgtgagatttgttttagattgcaatatgatgaggtgatctagttgtctgctagtgcctatcagactacattgcctttttaatttcatggaaagagctcttatgcatgcttccttctttgttttaccagcgtgaacggtggcagaagcctattttgcggcgatt

SEQ ID NO: 12759 - DNA, 572 bp, Vitis vinifera
  Intron number 7 from transcript GSVIVT01013108001 (locus G SVIVG01013108001) derived from phytozome v7.0 (chr-ID chr2 ; pos 8212725 to 8213296 reverse strand)
tcagacaagaagcttccaggtaaccatcatcacatgatcgaaactccatgcatgctctgcacttctacagcatgaatgaccttcttttacatatgccatgtttccaaaattttgaaaatagaaatggcaactgagggttgggatattacagcacattgaagctgaataattttagccaagattttttaccatataattattctatatattaaaatataataaaaaataaaaaaacgcagaaactacatagatgcaatagccaagtatatttctttgaaactggaatgatttccacaggggaaaagggcttttttgagctctatttggcatgaaagtaaataaggcatggttttttcttggagcctatgggtctgtttggttattggaaaatcctaggaaaggaaaaataaatgtcatttttttgtttaatataattaatatatatatatatattttttcatattatttaatctttaggtaaaagatttaaaataaataaaataaatctaaaataacataattttattttctattttctttgaaggtaagaagagcctctacatcaggctagg

SEQ ID NO: 12760 - DNA, 22105 bp, Vitis vinifera
  Intron number 2 from transcript GSVIVT01026800001 (locus G SVIVG01026800001) derived from phytozome v7.0 (chr-ID chr1 5; pos 7437058 to 7459162 reverse strand)
gcattaaagtgtcgagtttaggtcttctcaaccaagcaagttattactcttttaccatttttagttccaatatatattttttttttctttagttctcccattccttttagttctctttcatgcatggatgtagggtattatataatgatttgactctcccatatggagattgtttgctttaaatataacattgcccctatatggatattgtctgctttaatataatgctaagaattgataaaggatatcacaaatcccttttatattgatattatttgttttaatataatgttacaacctaagtgggatattataaatccctctatgtgaatatcgctccctttaatatggttctaggaattgactaagatattacaaatgtcccttgtgattacaggaataaataaacacacatttggaggtcctccctcatgtgtagattgttaagagatagtttcatatggttacaagatgtacatgtgtcatatgctcattggttttattctattattgttagagaatttgttagttaggtctactatatatattaccctgtaaacaatagaatatagagagaaaaataaaaaacagaaaatcactttaccattctctgttctgttaccttcctttctcatctctatttactttctttacatggtatcagagctcttgagttgcatcttgaactgatcaatcttggcacaagtttgagcagcaaagaaaacctctaatttcttccaaatctcaaaagaagttacacatccaaccattctcattaaaagcccttcgaacatcaatgaaaggagctaagagactagtaattggtcctatttttcccaataagagaaatcttgattgattttaccacttgtttcatccatggaagaaataaattttggaagagcagtatcgattccattgatgaactttgaaagcttgtaacctttgattgcagcttcaacttgttgacgccaaatcaaaaaattattctgatcaagttttatggagattaagtgattgaaggaaatcagaacaaattgggatgagaacgaaaaggtgggggtgagggaatacgcaactcaagagctcttagaaaggttcatcatccatgaatgattatctcttacgaatcaaaagcattgttgatagcctattagttggctattctatctctacttcagatcgtattgacacaatttttgaaggattaccctcagagtttaacactttgattactgttgttaccacatgcatagattcatatactattgatgaaatagagtctattttttggctcaagaaaggcacattgagaaggctacaaaatttttagattctaatttgagtgctaacttagcaactcagagccagaataacaaagacaagaaaagatctgataattctttcgaaaatgcctttttctacttttgatcaaggcaattttcgtggtttcaataattttcctagtagagaaggttctggtagtcgtggattcaataaatttagaggttctagtagaagaggtcatggaggcttcaatggtggtcgaaattattagaatttcaataagcctcaatgccaattgtgtggtcgtgttggtcatttggtgcaacaatggtactacagatttgatccatcatttcaaggcccatcttcatttcataatggatttccttattctcaagattcatcacaaatgactgccatggttgctactactcctgaatttgcctacgacctagctagtacccaaattctggagctacaaatcatatcacaccagacattcataatttgatgaataaagttgaatttgctgggaaagataagatcatgatgggcaatggaacaggtttgaacattaaacatattggacaatcatcttttcagtctcaattttcttcaaaatcgctctctttaaatcatcttcttcatattccttctattaccaaaaatttgcccaatgtctctaaatttgccaaagataatgttgtgtattttgagttctttcctaacttctgttatgttaaagatcaggtttccaaggaaattcttatggaagggagagttaagaatggactttatgtatttgatgatttcacacttctacattcagtaaagccattgtcagttccatattctacatcctcttgtgagtttctgccttcagcaaagccactgtcagttccatcttctatagcctcttgtgagtcctttacctcttcatttcagaatcatgtttctagcccgtttcaatataatcctaaatcttgtattgcaactaaggattctattggttctttgaatactttagatctatggcatcatagaccacagacttggacattcatctcttaaaattgtaaagtctgttatgtctaactacaatatttctgttcctaataaaatgcagttttctttttgctcagcttattgttatggcgagattcacaaacttcatttttcttcttctgaaactatttacactcaacccctacaacttatacactttgatttatgaggcccctctctacttcaatcctccagtggttattactactacattcactttgttgatgcttactcaagatttacttggatgtacttgcttagatataaatcagatgcatttcaagcctttcttaatttcaaaactcaagttgaattacaactaggttttaaagttaaggccatacaaacagattggggcagagaatatagagctttcacaaattttttaacttcaaatgacattcttcatagatatcttgcccttatactcatgaacaaaatggcttggctaaaaggcggcatagaaccattgtagaacatggtctcaccttgttagcatctgcttcaatgccaatgaaatattgggatgaagcctttagagcttctgtttatctcagcaatagattaccaacatctgttcttcatcataaaactcttctagaagttttgttcaaaactctaccgggttactctttcttaaaaatattcggttgctcttgttttcctaacatttgttcatatatcaaacacaagcttcaattttgatccactgaatgtacctttttgggttatagtctcaatcataaaggctaaaaatgtcttgattctaatggcaaaattattatttctcgagatgtcattttcaatgagtcttcatttccttttgctcataaaattcagtcgtccttatcaaattctatttcaccctcttttcatccctctactgctcccccaataatttcttcatttggtagctttactcatccagaaattgtctaatatgttactaatgcttcaacacctactgcttgtctttttgctactaatacttatgacaatgttactggtcatagagctctttcacatgaccaaatacaagaagatttagcttatgttctaatgcagccttacaaaaatactcattctatggtcactcggtctaaatttggaatttttaaaccaaaggttttggttgccacatgtgaacctacttgtgttgaggaagcttgacatgtacatcattggaaacaagcaatgactgatgaattgatggctcttttgaagaataatacatggtccttagtcccattaccacctggaagaacacctattagctgcaaatgggtatttaaagtgaaagaaaaccctgatggctcaattcagaagtacaaagccaggttagtggcaaaagggtttcatcaagttgctggttttgatttcacataaatttttagtccaatttttaaacctgcaactattcgggttatgcttactataactttgtctagaggttggttaattcattaattagacattaataatgtcgttttgaatggagtgtttcatgaggaagtttttatggaacaacctcctggatttattcagcacaaccaatctcatcttgtttgtaatttgcatagagctttatatggcttaaaacaagcacgaagggcttggtttgaaaagttaagtacaaccctatattcctttggatttatctttaccaagtcagatcagtctttgttcattcatgtgacaaaaagtcattctacttatattcttgtgtatgtagatggcattcttatcactggtagtagtgaacaagttgtgatgcaccttattaccagtttgaatagagagtgtaggacctcaggtgctaccaactctcctaaaagcaattgctgttaggaaaggcgcataccctaaccttatagtgcattcacccaagcgcccacggcgaacacaatgggagttgatggacgcagccaaccctccaatcccccctccctagtgacacccttggggttcgaacccgtgaccttggctctgataccaattgagaaaataaaagctatgcttaaaggagaaaaacacccaagagggtgaattgggtttttcaaaaacattttcaatacaacaaattcaagcacaacataaacaagaaataaagaaatagagtcagagaattcaaactcggattttatagtggttcgacacttccttgcctacatccactctcctcaatctcctaaccaagtgagggttccactagcttgaagcttcaaccaagcttctaatcctttacacttggattccgactccaatgggttcttacacaatctcttcaagattcaaacctcttgaagtttttaacactcaacttttacaagaaagaatccctcaacctagcttaaagatagcttaaataaaaaacaaagctaggatgactcacaagggtgcactaaaagatatgcaagtgatggtttaatgcactaagaaagaaattagagcatttaagccaagaataggtaggtagacaattgattgcaagtgttctctttgtcataaatgaagtggatctctcaatttataggtttccaagctcaggaaccaaaaacaacaaaaagacagcctcaaccagtcgagctgggggtcgaccggttcattagccgttagagcatttaatgctttcacaggttaccgttgcctcgatcggagatcgaccgagaaggggtgaacctcaatcgggaagaggaagctagtggatgagagagagtgttcactataagaaaaaatgccattcatgacatatattatcttgacttaaggtaatatatgtcaatattgtctatttaaatgaacaactatgacatatgcaacttagttcaaaccaataatgacatatataaaatttgttaaattcttctatgacttatgatgatacaacattgacaaataatatataagtgaaagtatatttaatatgttcatatgctaagatatctaaatgaaagcaatgctaacatatatatatatatatatatatatatatatatatatacacactaaatttttccataacttaatgatgatgtaatcttgaaaaaaaaaattataaatcaaaatataattaatttactcatatgtgaagcatggaggaaaacaaaattttctatcaacggtcgcccatgttaaccgaggcaaagatcaacattgaccaagaagctaaaaaatgagttatttacatgctgcctgggggagttgagcccccaaccaaaagggtgggggagtatccacattaccattggggcaaatttgcaccttgttaacaatcttgcactatatatacatatattaaaacttttcatatacaaaaaatattaaaacaatactttaaacaacaaattaattataattaaataaaaaaatttcatttaattgagtaacaaaaagtttttaatatcattaatatattaattaatattaaaaaaattatacatttatcatcacttgttttatatcatttaatacaattaaattaaatatatcataattttaatattaaatatattttaaaattaaacatattataatcaaatatcacattattattatcgaataatatttaatgtaatttaataatcaatgtacacttatatatatatatatatattaatttctttaacaaaacaactttaaaatgtctattatacttctaatttcatttttaagagctttattttacattttcaaaagtttgatcaattttaaatcaatcgatattttgtatcaaaatatctgccgatatatcttcgatatatccccgatatatctgtaaaatcgaactaccgatatatccgtgattaccgatatttttatccttgatgtgaagtacctaaataaaaagcaataataacatatattcatttgctaaattatgtgatttattataatataaccttcatagaaaatttataaatcaataaatatttaataaatttaaatgttaatgttagaatatttgatagtcactttcacaaaaatttgtaagtgaaaatatgcctaattttttttaatctatcaaggttgacatcaatatatagaaaaaaaaaaatttaccttggtatttttttattttttctagaactcaccatttgaaaatcattttggacttatcatccgaaaaaggtgtagaaatgagatttttttcttgcattcttttattacattggggggttttattagagaatatatcctcacaataaattgaggttttattaaagggattgaatttttctttatgcattcttttatgaaataaattgaggttttattagtagaatataatatccgcataaattgaaattttgttagagcatataaaggtttcaataaggaatataagataaagttctaattatttttggtaactttaacacttaggaatggtagtttaagaaagtttgggaattattaaaaaaacaccatccttatgttaaacaattttggaaaattttgaataattatagtctattaagacaataaaagaaaatattaaaattgtgtctttataataataaaattaagttttatataaatgcataacccactcctttgaatttttggtatggttttttaccttaatatttttattctaagtttggagcattccattccacccaattgttgaagctcaacccaagtattttaggttttttggaagagacctatataagctttttttaagccctactttccccctctatttttttttcacgaccttctctctcccacctattttatctttagtttcattctattttctcttcatccaaacaccctttttcttcattcttcttcatattcttttcctttctctctttctttccccttttcttacttcttcctcacctgagatagtttcgttgtcacagctcctctaatgccatcatgggctagtaacgtccacatcgtgctgccttgatgtcggagtttctcaccacaacaactcctcatcgacatcaaagtcactcttctcgctttttcatccttaatcgtaccacaggcccccatcgtgctcccttgtcgttgacaaccatcttttctgtcggggatgcctttgtttcttcgaccactgccataaggaccatgtcatagtgattcatgattatagatctcagatctcctcgatctattttggtatttttcatgtttttatgattttggcatgtttgataggtgaaaatttgttttgtaactattttgggttttttttggttcaaaatcccttacttggaacattcacattctttaagcctaagtagttattggtattttcttgttcaagctaatgagtttcatattgtaatttgagattccttactcttagtctgtttgtacattgaatgcatgaaaataggttttgttcgagaatgaaaaaaatgcaacatttcatgagtaataacatgtaaggtaactagataggtttataatattctaatatattctcaaataacatgttccagattttactattgttttttctttactatttttaatttttgatgatttgtggatgtaattacatgaaagctctatattctatagagtacaagaatgaagacaatgctctgtatattctatttttgattcacatgggaggtattttaaacattgcatttcatttcatttgttggattttattctctacaatcatttctgtcttttatgagactataggataaacaattcaattaattaatatctcattttctcaagcagagtgtttgtgctctggatttagtttcttgtaaaaagtttagtttggttggagaattcttaaaaatgatattgattcgttcccaattggtgtctcagttgattcatgtcctctcaatggtccctagcagtggtaccatttgatttgtgtccagctggtgtcccttgattttggtcatcaaggagtaatcaacaaaatttgtaacctattacaccatgtactaggatagccttagctagcatagcatagtggctctaggttcgttcaatgggatgggttttcacttcacagctgatattaattcaaagatgaattggtgccttttcatttcaaggttagctttaaaagaaaacataatctttggtggaaaaggtttggttttaagctaacaaaaaatagtaactgattttacttacaaagaaaagtgtttcttggagtttagatcactaggttcagattccttgtacaaaaagggagtttcggtcacttgtttcttttccttgcattagagaattaacatgtagttaattctctaaccggtgtggtacagatgcttcccattaatgggttcaaacactaaatccctctcactgattcatcttgcaatggctcgtgcctctcacctagcattttccattcaaggtgatctttaaccttggattacccgtcaaaagctcgcaagagataactaatggatgtctccttggagcccaaaagcttaccaagtgttggctattctagaaaatcctaccttcaaaccacctcccaaaggctcgcaagaggtaaactagtgcatctcaatggatgaagatcacttaccttaccaagtgttggcccaagtgatttaaaggcgttttaagttaactaaaaagataaaaaccattaacgggtcacactttctcttcattaaaaactaaaacaacaaaacttccaatttatgcatgaggaaacttacccggttttcttcactccaagagacaaagagcctagcctctcatcctctgaggaaaaatcctcagagtttgattggctagaaataaaaagaacgagaaaacaaaaatatatatgaaaagcatagcaagtgctttgtattttacttccttccaaaactgtacaaaggatgcgtctctgagaacaagctcccgagatattgatcctcctcttttctaaagaaaattacaaactatatataagaggttattcgtctttttgttcttacttaaagactaaggaatcctatgataggtgggttacaaggagagtttggggatttagacatcaaatatctaaagcaaaatatctcaaaaagtcggtcggaaatatcaggaagcttcagaagaaatttcgttgcattgtgcaaaatggagacttggtcgtcaatattatcagaatttgctttttgattgtgggcggaaatggatcctgcgaatcgcgagtgtctgacgagccaagctatccagggaagttgaattgtctactgcggatgctttccgggtaagcgctattagaggatccggacatgtctgactggggaagttgaaacaccctcctttcccatccggtgtcaagcgccggatgtgaaatatccggagaaggtggaacgtcggccgaatagaattccggatgtaagatatccagagaaggtggaaagtcggccggatagaattccggatgtaagatatccggagaaggtagaaagtcagtcggatagaattcctccccgggtggaatgagctatgccatgtgtcgcaagggggaccgtctacttgtgaaaggtgtagagacccctccccctgatgacatggagcgcgcatcgctatccggagaaactccatccggattccccaagaggacacgcagcgcgctcccctatccggactccctcagggagaagcacacgacactcgcaaacatcacaccccgaacaatagcatatcctatccggatatgttgtccagatcattgactaaagtgagcaagccttgctacatcattccgccagcctgccacagcccacgtttcgctgccctccgatggtgtgttcggacgccctgtccggacatctttgccatggattccaaagaactctcctcaatctcggattgctttggtgatcaaaaagctatcaaaacaccaaaacttaacacaatttgattagaattgattgcaagggtccttaatatgttaattgggttaaaaggtgataactactactcaaaagtgtttaaaagagttaattacaagctatcaaataaccctttttgagtagtaatcagatatcttgataatagataatttaatttaagattgaaaatagaaagtagtgaagggttgacttgaatgaaactgctcttgataaaaacatgggagaatgagttcattcatcataaaacggaacttgtttacagtgttgtaaattctgatcaaagttctatttgagatgtctctaggacatcatgatctttctcatcctgcatcaacgaacatggagcaagtcttgcttgcaattacgtttcaggttactttgttttgttttgccttgctacatacaaattctacttgaaattggagaagcttctaatttatctctccaatcacttttacccactagttaggacactatcaagtttttccctaattttctattaaatcctctaaatgaaaatgggtaactgttcttgtggtgactgcagattatttagttttactgctttaagaaaagtagttctttgctatatcatttttctagctttgcagcaaatttgggtggttggttccaccatttattttgttgtagtttgattttaggatggttccatatgttgattattatggacaatagaatctccattaaagcaattgtaaaacatatatttgaaaatctttatataatggatgtgaattgtctatgctttatcatgattactaactgatattctaatcttatatcattatcttttttttttttttttttttttcaggtcatcaacaattttcttgatcttacaaggtagaactaaagaacatgagagcatggtcaagtgcttattttgattggggaaagttaatatcaagattgtcaattcaatgctctctatttttatttttgtttttatcactttcaaggaataacatgatctatgtttttagaaaacctaaatttatatcaaatctgcttatgtaagcatattaactatcaaaaagatgtatttatatgcaatgattgtattaggatataagaattaaaaaatatataaaagaattaagaaaattaacaagctatcatgagggttgcattttaatatttttaactatttctcataaatttcatgtctatagtattattcaaattagatagttaattatttagtaatgaagttcttcaatgaatataaactaagagtggaaagacctataaaataaataaataaactaagagtggaaataggtaagacaatgaagaaaaatatagattttttaaaccaaaaacaatttgtgaactaaattataatctacttatggaaacaaaaaatgatctaccatgaaaacaattaacataacattaaaagttagtttaaactttaaagagttagccttaaaagcataggtctttaacacaatagttttttttttttttttcacgtatcatgtgtgaattctttgctatgttgctcttacttcctcttttgatgaacttaataattgtaaactaggatatcttccatggagtttaaatattaatttttttttacattgaatttagagttacaaagttaattcaattacaatcggtgatatggaaggtcaataggtgtattcattgtatttatcttttatgatattgaaggtaaataggtgtattctcctatgattttttatttttattttttgttatttgttgcttatgtttctattaatgttgtgtttatcctactaggtatccaagaaatacaccaagaaggagacaatggtgaagaaataaagaccacatcttacgaagataatgttgtacttttcaatttaagtttgtatattatcttaattgaatgtttttaactaggttttgtttgcatataaaataaaatagagagtaacttgaaaaagatttatgaaattatctttttaatgttcaaatgtatatgtaataattttatttttttgccttgaataatagtttctttacattattctaggacttgattgttatgatcataattaaaaggtaccaaatttaatttggagatatgtttcatatggtaataggttcattttccattaaaaaaaaaactaaaattataataaaataatattaaaattttcataatcaaccttggttgatgggtcatgcctaattttgccatgtgcagtagcaattataagacatgtgataccaaacattgacatatataagccaattatgatatatataaaatctaaccttgacatatgtatctaaaagccttgatatatgtggggttaatcatgacatatatgatacctaaccttgacatttgttggactaatcttaacaaaagagtgagttaaccttgacctaagattaagtaatcttgatataagttgaatccaaccttaacatatatgaaagaaacattgacatatcacatactaataagatttcatcatttgtaaaaatagagaaaatcttaacatatgtatatgtcaagttacctttaaacttttcttgacactggaatagataacatatatgaacaataacctaccttgatagatataccttacattgttagtgaaaaactatcaacaaaggttttttttttcttgtagtggtttttgacactcctcgactagacctcgactaaacaagggcaatcggtagaccggttccccaaccggttgagccggttggccagagccttgaccggtttaaccttttggccctaaaaatctatcattttcaattcctttcttttctaacacttaggcaaggtctttaggcaaattaatatgccaattttgaaacattttgcctgaggtacatttgataaaactcgggttttaatgaaatctaaattttaaagaataaaccgagttttcaaatatgcatgaaaaggtatggaatacctaagtgcacccatgcattcatcttacattcgtttcctatgatcaaaagtcttctaatagtctcaatcttgtatctctttggtcctttgatgaatttccgaatttatacttgagattctttgtcattcaaaccaattagtcacttaaccatggtttttttatcatcaaaatccaattgggagaacccttgggctaacaatctccccattttttatgatgataaaccttggttatctaggagaaaaaagaaatctccccctcaaaccaatcatggatcaattaattcaaaatttatgaatttaaaacctagataattagaaaatgtgaattttcaataggaaacaatgtaaatcatgaaaataacatatcatatatagtaaatccaaatttacatgaaacatccaaacatatgatatgataatgatatgcatgtataggtctcctagatcctacatatctcttcccattttataacataaaaaagaaaagaagggggtctcgatgaaatcaaggttgaggaggtggaggtggaaacactgagtgtaggtaagccatcatctcctcatgctgactctcctggcgactctcaatgcgctcaatcatctgctgaagatgctcaaatgtagcctattgttgatccatactatcctctatacgctcaaatcattgttgtagaggctcaaactgagaggtgaagccagtctgatattgatcaatgcgatcctccatagaatagaatcaagtatcactgactactgcaagctcctccataagagtgccaagtgagttgatttgagcatataaatccatccaaggcgcatgattaggagtgtgaagtacctgatgaaatggtatctttgtgtgaggaatcttggtgaaagatggatgagaggatggtcctattgtgtaagtcggctcaaacatcataggctcagagaatgtggcctcaacctgaacaccctccatctcatgaatctcggcctcctcctctactccgggatgcacctgtccctgtccccgagcctattctggtggtcactcaactctcttaatccaggagccattgggggccttctcaaactttatccaccctaaggactactcatcataagtgtcataaataccgggggccttgaatttcgtctctctgctcaaatcaacctcggtatccttgaatactttagtaaggaaacgactgtaggggagtacttgggttcttctctcgcagtatgatatcatgtgcatcatcattagacaccccacgtgaatccatttccccgtcataatggagtccacaaggaatgcctcaatgtaggagacctcatcattagataccccatgtgaatctgtatccccgtcatgatgaatgactcagatgatcaaggtcaagctatgtgccgatggtttgcccattccctaggcttctgcaaggctgcacatcctcttaataacctctctaagctcaaaacccggcacagtgggccaagccttggactcatacaccttgagtccaattggaggaatgtcgaagatatgaaaaatgctctccgggtccagttggatctcaacacctctaacggtggaaatgattggtcctcctagtctataggtcactcgtgaatagaattcacggaccagatttgggaaaatcggctcaaaaatcgtcactactggcaaccatcccatccgtctgaaaagtccttcaaacccgaaatactgaagttgggataaattgatacttctccttagaactactttcctcttagcgaacttctgcttgtacctctgataatcctctacggaactgaagaggctcgtgtcatacctcgcctttcggggaacctctgtctgagcaggctgagatgactcagtagggcacttgccttgagccttagaggttgttgtctctctcttagaagccatcataagaatagaaaagaaggaaatgaggctggtagagaaggaacggagcacaaccaagagaaaacaaaattaaacaaaaaccctagacgcgcaggaacagagctgaaatcggctgtgatgcgcgttgaaggagaagccgtcccaaaacgtagccttatgtcccaaaaatcaaactgaaacccctcaaaatgctgcaatgttgtcaaaaatctcttatggccaactgaaatggcataacccttgaagaaccagaggaaacaggtgaaaaaatgaggcatgggaagggtatttaaaacgacaccccgacgaaccggttgatcgatcctgattcgatcgaccgcctggtcaatggtcaacgctttgatttttgtgcattttctcgtctcgtgatcctcctcctgcccttttaagaggaaatcccctatttttgatgtccaatgccaagggaattttgatttttggtcaaaatttgtccattttcctaagtatatgtctatatgatgcatatgatatgaaattcatgcaatcataaggtatattaatcaatcatttgatcacaaagaaatcacccttagttgtcttctaatatcaaaaaattgttcttcacttagaggtttcgtaaatatatcggcaagttgatcttttgtgcttacaaattcaagtgtaatgtcaccattttgtgcatggtctctaagaaaatgatgtctaatttctatatgcttattcctagagtgttgcacgggattttttgaaatatttatggcacttgtgttatcacatttaataggaacatgctcaaaagacaaattgaaatcactaagtgtttgtttcatccaaagaatttatgcacaacataaaccggctgctatgtattcggcttccgccattgacaaagctactgaattttgcttcttactatgccatgaaacaagtgattgtcctaggaaatgataagtgtgactagttctttttctttcaactttataaccggaaaaatcagcatccgagaatccaattaattcaaagttatcacccttaggataccataagcctatgtccattgtccctttcaaatatctaaggattcgttttacgacacttaagtgagattctttaggacaagattgaaatctagcacacaagcatacgctatacatgatgtcgggtctactagcggtcaaatatagcaaagaacctatcatgcctttatacatagtcgagtcagtggatttacttttctcatccttatcaagcttgatggatgagctcattggagtcttcattgttttggcttcttccatgttgaaccttttgagaagatctcttatatattttgcttgattgatgaaggttcctttctttagttctttgatttgaagtctaaggaagaagttgagttctcccatcatgctcatttcaaactcactatgcatgcacttagaaaattcttcacaaagagagatattagtagctccaaaaataatatcatcaacatatattcaactaagaacatgtcattttctttggtctttatgaaaagagttgtgtcaatttttcccattttaaaaccccttttcaaaagaaatttactcaatctttcataccatgctctaggtgcttgtttcaaaccataaagtgcctttttaagtttaaaaacatggttaggaaagttaaaactgtgaaaaccaggtggttgttcaacatatacttcttcatttataaagccatttaagaaatcacttttcacatccatttgatataaaacaatgtctttaaaacatgcaaaggcaagtagcatcctaatggcttctaatctagctacggggacaaaagtttcttcataatttatccactcttcttgattaaaaccttgggctaccaatcttgctttatttctaacaattaggccattttcatccattttatttctaacgacccatctagttccaataacactttgatttgaaggtcttggcactaattcccatacttgacttctttcaaattgatttaactcttcttacatagcaagcatccaattttcatcaactagagcatcatttatatttctaggttcaatttgagagataaaagaaagattattgcaaatatttctaagagatgatctagttcttaccccactagatggattacctataatttaatcttgtgggtggttgatgacaaacttccaatctttaggaaggttttggcttgattcaccttgcacttgttgaggagggggtagagtcaatggtgattcttctttcttgggatcctctccaatttcttcttgttgccatctatcttcaatttgtaattttcccatgggggtctccaagcctaaatcatcatcaaaactctttctttcttggagagaattgttagattcataaaaaataacatggatggactcctctacaaccatggttcttttgttaaaaactctaaaggctttacttgaagttgagtaaccaagaaaaattccaacatccgattttctatcaaattttccaagattgtctttagtgtttaatataaaacatttgcacccaaagactttgaaatagctaatgttgggtttcttgtttttccaaagctcatagggagttttcttaagaatgggtctcaataatattctatttaaaacataacaagaagtgttaaccacttcggcctaaaaatattttggtaaattgttttcatttagcatggttctagccatttcttgaagatttctatttttcttttcaactaccccattttattgaggagttctaggagccaaaaaaattgtggttaataccatgctcattgcaatagtcttcaaaatcaatattttcaaattctctcccatgatcacttcttatacaagtaatggtaaaacctttttcattttgaaccttattgaaaaactttgaaaactcataaaaggcttcattcttttgacttaaaaacaagacccaagtttatctagaaaagtcatccacaataacatatgcataagattttcctcaaaggcttggagtcctagagggaccaaagaagtccatatgcaacaactcaagaggcctagttgttgaaatgaaatttttgcttttaaaagagtttttgatttgctttcccatttgacaagcttcacaaactttatctttttgaaaatttattttgggaagacctataacaagttcatctttgttgagttgggaaatgaggtccatgttagaatgtcttaacctcctatgccacaaccaactttgatcatgcattcttgaaaagcatctaccatggccatcatattttgaaatatttatagcataaacattatcatatctatggcccatgaagatggttttatcattttgaatatccttggtgatgcaatgagatgctttgaaaatcactttaaaacttttgtcacaaagttgactaatgcttaaatgattatgttttaaaccatccactaataaaacactttcaataagagaggatgtgtcattaccaatgttgccttgaccaatgatccttccttttgcattgtctccaaaggtaacgtatcctccctttctctttgtaaggaaggcaaacttggattcatccccggtcatgtgtcttgagcatccactatccaagaaccacttatccttctttgaaccctacaaaataaaattcaagttgatttaggtacccatatctttttgggtccttgagggttagtgaccttggatttctcaatctaaacctttttaactttagcatttgaattcttttaagaaccatttcttaagggacatgtggtactaatgtgccctcatcttccacaaaagttgcaagtagtagaaggacttgcacttgaagattcttttaaaaaatatttttgattttttgaagatttgaatcctagcccttgtttgtcaaaaacacatttttggctagctaagatcatttcaaaagatttttgtccacaagaaaaaattgaaagagaggaggtcaaccattcatttttctttttcaaaatctcattttcacttctcaaaatctcattttctttttcaagatgagttttagaaatttcaacaattgaaaatttttctttcacttcttcaagttctttttcaagttcttgaattttcttttttaagagaattatttttcaaactaagtttttcaaaatcctcatataattcttcaaaaacatcatgcatatcttcatcactaaaattagagtttacctcatcaagttcatctatttccattaagcacatgtttgccacttctttctctttttcttcttcggaggattcttcactttcactccaagtggccatcattgcctttttcatttttctcttggcttcacttttgtagagagggcaattatatttgatgtgtcccagttttttgcatttgaaacacacaaaatcttttttctcttctcatttctccttgtcaccatgagatgaggattcctttttagaaaggtctcttctagaggtgaactttcttcctctaaacctttcacccctcatgtatttgttaagctttcttatgatgagggctacatcatcatcttcctcactttgtttttcttcttcaacatcttctttttccttagttgtagctttgagagttatgctcttcttctttttgtctttaccctcttgtagcttctttgccaagttaatctcatatgtcatcaatgaccctatgagctcttccataggtagcttggttaagtcttttgcttcttaaattgtggtgaccttagtatgccactttgatgggagtgacctcaatatcttcatcacattttcggattccttgtaggtttttcccaaagcttcaagaccattgacaatgtcggtgaacctagtgatcatctcaacaatagtctcattttctttcattgaaaacaattcatagttatgaacaagtaaattaattttttactctttcacttgatttgttccttcatgagttatctcaagtaatctccaaatttctttagccgatttgcattgacatattctattatattcatttctatccatagcacattgcaaagtaaaaacaccttagcatttaattgaaaatttcttctatcaagttcattccattcttgcttgggttttggaaccaagactccatcaactagtttagtaggaaaagttgggccatctttaatgatgtcccatatgtctaaatcagttgattgtaaataccaagtcattctagttttccaatagggatagccggttcccgtaaaaaatggagttctatgttttgtaaaattttcagtttgaaatgagcttgatagaatagtcacttcctcttagacaactaagtcttaaacaataggtctagctctgataccaattgtaagacctcaagcgctaccaactctcctaaaagcaattgctattaggaaagacgcataccctaaccttatactgcattcacccaagcacccacggcgaacacaagtggagttgatggacgcggccaaccctccgatctgcctacagagagtttgccttaaaagattttggagaagtcaactattttttagagattgaagtgaatcatacttctaaaggtattcacctttctcaatgaaaatacataattgatctattatgcaaagctaaaatgcaaggtgccaatcctatttctactactatgaccactggacagaaactttcaggctatggaagtgaatcagttcaggatgtgaagttatatagatcagttgtaggagctttgcaatatgtaatagttactaggcctgaaattgcctatagtgttaataaagtttgtcaatatatgcaagctccattagaatctcattggaaagtagtcaaaagaattctcagatacttgaaagacactcttcatcatggattacatttaagaaagtctcatactcttgatcttgtagtattttgtgatgctgattgggcctctgatcctaatgaccgaagatcaacttcaggattttgtgtatattttggttcaaatttagtcacttggcaattaaagaaacaacacactatatctagattaagtacaaaagtagagtatagaagcctagctagtttggttgcagaaatcacttggctacaatctcttctctcagaaattaaaatcactttgcctacaccaccagttatttggtgtgataatctcaacactgttatgttagcttgtaatccagtattgcattctaggacaaaacacattgaatttgatttgtattttgtcagggaaaaggttttgcaaagaaaggtttcaatccaacatgtgccttccattgatcaagtagcagatgtgttaactaaagctgtctcaagcactcagtttgtaaatctaagaaacaaactcaaagtagaaaatctttctaccttaagtttgagggagaatgttaagagatagtttcatatggttacaagatgtacatgtgtcatatgctcattggttttcttttattattgttagggaatttgttagtaaggtctattatatatattaccctgtaaatagcagaatagagagagaaaaataaaaaacagaaaatcactttaccattctcagttctgttatcttcctttctcatatttgtttactttctttacataggtattattttctaggtctcacaaatttgaaatacattgacatacaacttcgtcctttaatcaatgtggggtattcataagaagatcttggattgattgagccccagactatcttttattaatccaaatattgattgttatacacccaaaatctatatattaaaatctctcattttcattataagagaagtcaatctttgatggcttaaaaataattttaccatcttggtctatacttcaaatataattaatatactcattatcttctttcattttgagccctctagcaattcatccattgaaaagtttttgttcaaaataaatttctatttaattaattaaaaaattatacagggggaagaacttaatatat

SEQ ID NO: 12761 - DNA, 9686 bp, Vitis vinifera
  Intron number 1 from transcript GSVIVT01029899001 (locus G SVIVG01029899001) derived from phytozome v7.0 (chr-ID chr8 ; pos 1155884 to 1165569)
gtcgaaactcaacaactcacaacaaagcatagagtgtatccttcatattgaaacatcatacttatatttatagttatggaaaactgtggcttgattttataaaacctgcaaggcttgattgcttattggtccttaaatggcatttaactgtagttagtaggtatgggactctaagaggttttgatttaagatgaaatagttattttatattttctgtttgtagctgggaaaaactgtgacatgttttttgttaaccaatttggccaggataatgggatatgcctttctttcatgtctgcaacattttacttatgtatgtgtggaggtgggggtcagctaatctaagttactatcagtaagctagtaacttaaacaaagagggtgtgttatcttctatagagaatttgatgaaggtcttttttccgtgaggctactaggatctcttcttggggggtgtttgggtttaggttttgtggttgttttgtttttgtttttgtttttgatagccaaaaagtgaatatatattaaagatgcctaggcaaatgaggcagtaacatacagtgtgtacgtttgatgcccaccaaaggtgcagttaaaaagaagagaaacacaagaaacaatcttcctctcattaatggtgcatgtcttcagcttcctttttaatgatagtgaatgagacccctattgatttctttcaaagttccaaaggactgaggcaaggagaccccctttctccttatttatttgtattggcgatggaggctcttagttagttaattgtaaaggctaaggaaggaggtttcatatctggtttctcgataggtaagaggagcagtgggctagtagaggtgactcatcttttatatgttgacaacaccatcatcttttgtgagactaatgttgagcagctaaggtatttgaattggactctcatgtggttcgaggtgatctttggcttgaaagttaatatggaaaagagtgagctcatctcattggggaggatctataactcggacaagttggtagctattttaggttgtcgggtggggtgtcttccttcttcctattttgttatcttgttgagagcctcttttaagttgcttttgtgtgggaaaaggtggaggagagagttcagaaaagactagccctatgaaaaagattgtttttgtcaaaaaggaggagactcactctcattaaaagcaccttgtctagcatacctatctttttctgtcctagtgaggagctctagagaaaaaacctcacctagtgagctgggctaaagtgtgcgtggagaagaaaaaagggggcctgtgcattagggatctttttgtccttaagatggagctcttaggaaagcggggatggaggtttgcctttgaaatggaatctttgtggaagcgggtgattgttgggaagtttggggtggaaggagggattggagtttaggggtgtctaggaggggtatggagtcggcttttggaaggctattagaaaaattgggagatttttaaaagcataacccacttccttgtggtgttgtaacacatcactaagagtctttctccactttatttgttattgccaattcaaaggacgcagaggtagctgatatgtgggagcagaatggaatccgaatcattagcatcctagtttttccagacagttggtggagatctttcttcggaatatccaaaaacattcggttggatgtaatgttgaggatcaaaagatttggttaggtacatgaaatggaaacttctccattaaagctctctatcctttcttggactttgggggtgtagaggccttcccagctagagttgtttggaagctatgggtcccatcgagattgggctcttttgcttgggaagctacttgggaaggatagaccacctgaaaaggaggagggtgtcactagtaaatagatgctttatgtgaacgggaggaggaatccattgattacttgcttctacattgtgttataggttgtcttctctagtagttggttttttccttatttgggttacaatgggtgatgcacttctcagttaagataatgtccctaagttggaatggggctcaaataggaagaaaacggtagaaagcttggttagctgccactttgtgtcttttttggatcatttggcacgagagaaattgaagggcttttgaagatgtagatctttcagatcatttgctaaaatcctcttttctgctttcctttatggagtttgttaggcctcatatagaaggaaagtccatgtctctacttgatttatcgattggttagttgctaagtaaaagtcgggcaggttgtttttcctttttttatcctctccgctcctttcttttttttgcttgcttccctttgtgtactctcggtgtactttggcgagctttaattgttctgctttgtaccaaccttttcattgatattttttttttttgattggaaacgccacaaagatatattaatataaaaaagaagtacaagaagaaggatgagaaatccttccaccaaagacaactaaattacaggaaaatacacataaaacaaacgaactcccactaaggaccaatccctatggagtacacaccgctatccaatccagttgaatcacattaaggggaatccccttaaatgccttggaacagaaagcccaaagggaagcaaggaaaacaatagagtcccaaaggaactctgaattccttgctttatcctcgaaaatccttgcgtttctttcccaccacataatccaaattagagctatgcttgcagcttgccacaaaactatccctctcttagaattaccgaaacctttaaatttgatggacatcatgtcatatatgctccttgggggaacccaatccatcttagctaactgaaataacctgtgccacaacccaatcgtcaaggaacaatgaaggaaaagatgatctgctgattccccgtgcttcatgcacaggatacaaatatcaggactaagggctttgtagggtcttctcacttgtaacatatcattagtattcaccttcttgtgtgccactaaccagacaaaggacttcactttgaaaggaacttgagaattccacacaaactttgaaggaaagttttgaagagatccagaggattgagataatgttagaaaaaaggatttgactgaaaaaagccctgaagaggataatggccataatctggcatctgggactgaaggagagagatacaaatcatcaagagaccgcatgaggccttctaagtcctcaatctcaaaatctgacaggttacggcggaaattcaaattccacgagaaaggccaagatggaccgagaactgaagaaatagaaatgtttttatccacaactactctaaatagtcttggatattgggttcccaaaggttggtcctcccaccacaaatcttcctagaaccgaattctttccccgtttcctacgacatactgagtaatcaaagaaaacccctgaaagacttgagcaatagccttccaaggacagcgatgtgaccatctgactaaagtgttagcatcccaatcattagagtgtgaaccataaatgcttaaaatgacctaatgccaaagagctgaaccctctctaggatatctccataaccatttccctagaagagcgagattcctcctagaaatattccccaaacccaaaccccctattgtcttcggtttgcacacaacatcccacctcactaaatgatcccttttgccttccccaacctctgaccataaaaaatccctttgcaacctctcgatttttgcagccactgaagcgggaattttaaataaggaaaggaagtaacttggcaaatgggtaagacaagattggataagagttatcctccccccgaaggataagaggccttttgccacccatctaatctacttgagattctctcaatcactggatcccaaaagccacacgccttagggttcccgcccaaagggagacccagatagagaataggccatccggacgccttacaatcaagcatcacagccaatcttgaaagatgagcttgatcaagattaatgccataaatactactcttgttaagattgaccttgagcccagaaatgtgcccaaacactaacaaaagactcttcagagtctgcaactcttcctccctcgagttagaaaagaatatggtgtcatcagcaaattgcaaatgggacaccctagttctatttctacccaccctgaaaccctccatcatatttctttcctcagctctcacaagcatcctactcagtacatctgcgactaaagtaaacaaaaaaggggataaagggtcgccttgtcttaatcctcttgatgccttaacccaccctttagcactaccattcaccaagattgcataagataccaaagataaacatccactcatccatttcctccatctaggactgaaccccttcttttccaacacatgatccaaaaaatcccacttcacgtgatcgtatgccttttcaaagtctattttgaatacgacgccttcctcccctgaccttcttctctcgtccactatctcattcgttataagaaccgcgttcaatatttgtctcccttgaacaaaagcgccttgagaatagtggatggtctcatgtagaacccctcttagacgccctgagagcactttggctattatcttgtagagactagtgatcaaactaatgggtctaaagtctgatattctctttgacaaactctttttgggtattagaacaatgaaagaggcattagtgttttgattgataattccgctcctatgaaattcagcgaacactctcaccaaatcctccttaatcacatcccaacactcttggaatacggcaatagtaaagctatctggccccagagccttgtccctatccaactgaaaaatggccttagaaatctcttcttcggtgaaaggggagtctaaccttaatgcactctcttccgaaataggggaccaatctaatccttcaacaccccaagactctcctgtaggatttgtgtaaagcttttcaaagtaatgtaagatctcctctgtgatactctcggcattcttcagcactaagcccctctcattctccaactccttgatatatttcctatttcgcctgccattagccactttatgataaaacttagagttgcaatccccttccttgacccatttcactttggctttttgtatccaatgaatttcctccctcaataataattcctctagttccccttttcttgagactctttggcttaacaaatcaggattgagacccccttcctgctcaatggcgtcaaagttagctaaatcattgagaatactttttttcttttctttaagctctccaaaagaaaacttattccactccttcaatttagctttaacatattgaagtctcctcatgaacttatgaccttcccatccgtttccttgaaacccactccaccaatctctaaagttctccttgaaattagtgtgttgtaaccacatattctcaaacctaaaaggtgttggcccccacataaacgggttggtatccataacaattggccaatgatccgatgtccttctaattaagggttcttgaaggccttgggggaagagcagcccccactcatttgagtagagaaaacggtccaatctcttacacacgggagactcttgcatatttgaccaagtgaatgaagcattccgaagaggtgggtcaagcaattcacattctctaataaaactatcaaagtccctcatgcttggagttaggctagaaccccccattttttctgagcttctccttatgacgttaaaatcaccgcccacacaccatagcgaataagttaatccataaatgtcaaaaagttccacccaaaaatccttcctaagtgagggactgtttggaccataaacagcagtaatccaaagaggtccacaaccgtccaaagagaacttgactgagatcgagaaggatcctattaccacctcctctctacgccgattttttgaatcccagatgatcaaaatcccacctgatgccccagacgccggaagagcaacccaatccttatttctgaccgtccagacactacccacaaaccttctatcacaattctccttttttgtttcctgaatcatcacaacatccggattctctgacctaagaaaatctttaaccatcctacgcttgttccttaaacccaaacccctaacgttccagctaataattttcatgggaaaacacaaagaccctaaccttccgagccaaaaccaacatgtctcaataacttgtggggcctctattcttcctcctagaatacaccttaatgtcaagagagcataatacctctcgcactttggccattttcccgggggacagaccatcaataaggaaatcacccgaatcctccttacgcgacctgacaagagattccttaggggtacaactctcgatcatctggttagataaagcacactggttctcctcctcaacacggtcaggtatgtcaccatgttttaaatagtcaacaccacctttttcataaaattttttcgagttgccttgattttccataggagactgagaaagagggactgaattgggaagaagtggaccagagggattcatcaaaggagaatccggactacaggaaggaaaagaaggtgactcgggtggctgagaaggagagggctgacatacctccaagtttttggctcccggaatttcgcaaaacccctcaaagatgagtcctttacctctgattattgaattagaaggtgaaaccacgtctgaatagccacgaggatcaaaccccactcgtcccgttagccctcctctgacttcaacacggctcgccgaggtgtcctccttcgaaagattactagacagaggacatctggagagaggattcactttgattcctcgctccatctgaaagcccatcccaaactcctcttccatgttgcggtcttcacttgatgacgacgaaccccgtgtgaaaataggctcgctgctacaccgatgtccctgtcgtcgatcggcgcttggagggaagagggtagaccacgtcttctttgaaattgctgtctctttgtcctgagtagcatctctcgtgtgaaccgcgggggctttccccttcgcgaccagacttccataccagagggctttgttcctcttaagttttggcccaaccccgacgggcctttaaacttacagcccacggtgttgtctgaccatggcctagggttgggaagggactgggcctttagctcaacggcccgaccttcttctccaaagaaaacctcggcgttggcccttgcaccgtctggacagagcatcgcgatcgcctttgtagaagaagtagctcgctggggagaaagggacaaagccgatgcagactggtgggcttgaggagcttctaggccatcttgaagcccacgatgcctcatcccactttgggcactaaccttgtgggctttaaaagaggactcgtgctcgggcccaataaaatttgcttcaactgggcccgatctgctccatctccttcctatctcccctttatctgccaaacccgtccttgattgccgataacgtgcccggggaagacgcctctttctgtagcactcaatgtccctaacactacctcgtagtccttctgcagcttttgacgactgagagacgcaacctcccactctcacccactcgttcctgctacggtttatctcagacatgacagcgtcggcatcttcatcttctccggtgactgaaactgctactgtataggaccattccccatcttccacctcaagcaacgctggtaacacgacgtttggaagcatctccacccacagctttgccctcgtcaagtccaccagcttcaaagtttcctttgccaccttcgttaccctcccccatttcttcaaaatgaaattcaactgaacttcatcccacaaatggaaagggagacctttcaatactagccagcccctcctgaactttccttgaaccaccatattttccttaggcgaccatttccttagtagaatcgtccttcctttcactgaaagtcttccctgatcatgaaccctttccgctctccttgttgaactcacaaagcatcctttgaaagcggaaatgggatttatggacaccattcctttcatccccatcatcctcgcaatggctcttccttcgtgagtccagtcttggactttttcttggctttcacatattacagctctggcccattttccaactgacaacgtacctccagtcctcaaaccagcctctgccaccacttctgcatatgaccgtcctcctctgaaagtgtccccattcatccggatatcaccattcttctccttcgaagctcctccgtctcgttcagaatactcttgcactgataggatcgccttcctaagatcttcccatcctttccctttgacgcccttggggacgacaagaaataaaggtttcctttttgtaacaaattctgtaattttcatgaacctccctctgttattgaagcatatctccatcaagagggtcttagtcttgcccctgatcttttgtacaaaacccctggaagcctccacctccacagctttcttcaaatgctccatcaaccaatccagctcctccatgtcaaatcctattgaaactacgaaacctcggctcctctctgttaccaatacccaagttccaccattcaaaccttcaaactctacctgaaaagactttttctccacaataatcctttcaactttgctcttcatctttctaagacaagagtgactatacaaatcgtgtttgcaacaatgccttgtcggagcatttgctgaagaaggaagcttatctttttaaatttcattggtgtgttaagggtgctctaggacttggatgatggctttgtttttctcatttttcttctttttgccatttccttttgtttatgggtgatccctgtatacaagctatgtttcagggtagctcaacctttttttttttccagttttttctaatgcctttcattgatatttatctactctggtttgcttatcaacaaaaagaaaaaaaaaaatctccttattttaagctaagccaatcaacaaagtcaatcattgggttttgtggttgttgagggtcttttgctcgtttttatttttctttgtttgaaggatttctcatccttgttatctttccatgcatctttatgcttgtagtctattgttagtaatattttcctgtttgcattaaaaaaaagaaaaatactggtaaaggaagactacctagttctgatatcatgtaaaattaagtcttaacgtgttttgatgttcaaaacaaagtgtactacaattaaagcctattttcattcctgtggagcagcattagctctttcctgcaaaatctaggattattaaaaaccttatatcaatatttttcatcttcaaccagataatatccaaaaaagaaagcatgtttctgaaattgatgcacaactcattgttctaagattccaggtttaaaaaataatacagatgcaaaaaccacctgcttactcttttcttcctttacatctaggttcttcgttgctgctatggccaatttattttagtatgcatttcttttaacatatgatcagcactgtctcgttggtgcatttctcaccggaagaaa

SEQ ID NO: 12762 - DNA, 2055 bp, Vitis vinifera
  Intron number 14 from transcript GSVIVT01029062001 (locus GSVIVG01029062001) derived from phytozome v7.0 (chr-ID chr 5; pos 11633407 to 11635461)
gccattggacatcctttgggtgcaacaggtatctacaacacagattccaacttatactttgataatgcttatctgcattcttgtctatttcaatcctttttatttggaaatgatattcacatatgcccaactatcaaaacacatgcctggattgctgttttagtaatgtgtttaatataaagcatcttaaagtatgatatgatttgtaaggatgatctgtttctgactcagcatggatcaggttggaattatttgataatgctttacattatttataggttgttcttgggctaaaatccaacataaatgatgaaagctttgaaattttgaattttcatgtcattgaacaattaggagctataatccaatagagtaaatggtttcttcagaaaattctgagacatccaccttgaaatagttaatttacttttctttattcctcttatttcatttttaaggaccctttctaaattttttgtgtggatggtacttggaaacacaaaaatgccagtggttgcataaatggatcccacttgcttattgtgtggtattggcctaaaacaagcacaattagggttctagaagagagaatgagttgggttttgtggtcttggggtttggttgataggacaactgtgatagggtagtagctttgtgagaaaaaaatggagggaagtgagttctgaatcatggtggcctcatattctgggttaaggctttgtcatcttttggcatctactgtggatatacctactactcagcagagatcttgcacaatatcttctatttgataatgcagttttacttgataaaactagagttaatggggggaaggtgagggtgggctttattcaaagttggggctgagtgaatgctttagattcttgagatttatattcttgatattggtggagactgtttagtaatgacttcctccttttgctagtaagtttccctgcatccctccccattagaggaacccctgaataaatttggatggatttatctggaacctagttaaaattgagagtgggtacacatgaaaatatttcattgtcaatttcctttttgcgactttatgtatgcctcttcattgttgggcatatatgtaaatgcatgtttttgtgtttgttgagcatatatatggatggagatgtgttttttttttacttaaagttatttgctagattaagatatttcacatggtgactgaccttttatgcagagttataacaggggatcatacaagaacaggaaaaaaaaaaatagcagcatcacataccacattgttcttaacatttttaaaaatattggtgcactagctttataattatccatgctggtggggaatgccagactgcatgtcatttcaataagtgttgtgcatattaaacatcaataaggggaatgccagactgcatgtcatttcaagaagtgttgtgcatattaaacatcaataaggggaatttataacacataacagagcacaggatctgttatgattctctgaccatttcataggaaaccacccgtcatcaaaaaccaacatacatcctttattggaattttgagtaaatggtgtcatttgcaaagacatggctattcaacacccagatagttactttgcaatgttgaccattcattgtataaaaacctgaagtaacaacagtctgttgctgcgattcaataagatggggtttgtgtatatgggaaacctccgttttattctatgcatgcaagcaagatatggttggttcaggaagtgtttgcaccctctttcttattaaggatggagtgccttgcatccttcctttcaaagaatcttacttcagttcctgagaatttgagattttacctaatctctcttctgctaacatgtatctttgcactgagtgggaaaggttttgtccacttcccaatttatatataggttcaacatgggttggcaagacatgaatgttacatggagcctattatcattcatatgattgtatgctatctcttgaaattacttgtgtgtgtctacaggtgcccgctgtgttggtactctattgc

SEQ ID NO: 12763 - DNA, 3206 bp, Vitis vinifera
  Intron number 1 from transcript GSVIVT01001856001 (locus G SVIVG01001856001) derived from phytozome v7.0 (chr-ID chr5 _random; pos 55773 to 58978 reverse strand)
tggaggaattcattgatagtttttggattttcaaggtaaaagaatttcattgcagcctctgtatttgtgaattggaattaggatttacattaaaatatgcccattttagatatatggaaaatgaacggggttccatatcttgtgaggagttgatgtggtcggtgattgtgttgtttttcttatcggtattttcaggcattgtttgggttagtttgggagtgtgtttgttgcttttggaagtagagttgcaatgagttttggatttaaaagcaccagtaatttcaaaatactgactgaataactttttatgctgtgtctattaattatgctgaggaatcactattagcctttctacttgatgaatcgaatttggagaaactagaccgtgtttggaatttttttcaaaaacagttctcaaaaaacaatttttagaataggttgttaaaaatagttcttagagtccgctttaaagtgcttttagcaagcactttaagagtgtgtttggttatgattctagaaagtgtttctagcctttctaattcttgaaagataaaaatttttaagtattagaaagactaaaaatactttttagaataaccgttaaactcactctaagtattttatttagtgtttttgcagaaaaaattagtacaaaattcaaaaggaaaaagaaaagaaaaaaaaaagaatgaaaaaactttcaaaaagttgaaaatcacttataggttaatttgtccattcatcaaataaatagcacttctatatatcaatatgtatggtcttggaccatcactaaagatttttctctaaagttcggctattcgattgatccacttacttatattatgtcaatattaatcactatgattggaattatggttcttatttatagtgacaatttatatgtctgatgatcaaggatatttgagattttttgcttatatgagttttttaatacttccatgttgagattagttagtcgttctaatttgatacaaatttatattttttggggattagttggaatgcgtttgtatttagtaggtttttggttcagatggcctataaatgcttgacaatatagctaaaaaaatgaaaagcaaatttttgggctaattcttaatgaaagtattacggattttggtacaatgtaaaagtttttaaaatattcttcatattttcaattgtttatagaacattatacaaaaagacaatggagaatacttaaaatctattctaaaaaacaacctattttcaaaacaaattcttaaaaaattgttttttgtaagaagtttgttttcttttctttagaacataaaccattttcttgaacatttccatatggtaatgttttgaaaaatagttcttaaaaaatagcttttagaaccattctttaaaataattctcaattatttttggtaacaaaatcctgttgtggaacttaaatataaaaagcggttttcttaacttattttatgtgaatagaataagttaagaaaactgttaacttattctatgaagaaaactgttttttatattctattcttgttgtctataaaagaaaaaaaaacttattctatgtgaagttgttgcacacttatgtatattgcaaaagttttagagtatttattttttcagttattgctcaaaacactattaaaaaaatcaactaaaaacacctaaaatttgttttaaaaaacaatttgtttagaaaagaaattctaaaaaagttgttttgtattaaaaatccgctaaagatgtgttttttgttttcaagttaatccttttttttttgggtaaatttttgtccccatttgggacttgaacctagaatctctcacaaccctcctcatcccttaaccacttaataaactcataacttcttcatcatcatcctattatccatacacaatggcatgggtgtcttgtgttgtcatggataaggggtgttggacatagaagaccgataaatttagacgcaggcatggcactatatgtgaacatatatgtatctatgaggaagatataagacaataataggaatgttaaaccatgtgataagtttcttagcaaaagaaaaaaatcaaaggtattacctattgtgccttgatatcaaggtcaaaaatctcaatatcaccaaagataataaagggtagaagtatcagatacttttatattgaggaaacaaataatgaaaattagtactaaccatgaaaaatttttaaatggagactgtgaaataggtgattatacaataattcattcttcacaacattgtaaataaaatgcataataagcgtgtgatatatgaaatgacttcttggcaaggagtacacataaagcaccaataaatattttaaaaatgtgtcattgagtgccaagatggcttatgatgctcgtttattcagatacaattgatttgcataataagcataatccaatacaagcaactgaatattgcatgtaaaggaaatttcagagggggaaaaaaaataagctaatgattggcttggtcaaggcaagcacttcattaacaaattaagaaaatagaaatcaatgtccgaaacttgaacaattaaatttcacttatgatatccagatacttcaatttcattcaatgttatccgcgttgagatgacatgggtgtgggcatgggatccttgtgtgatgctcctatttaactattggtttggttgtttgaatttttcattaatatcttttttttttctttcaactctcttagtaataattatattagagaaaaaagattagttagttgagaagtgaatttttgtaagaacatttagggacaagaagaaaaaaaaaaatggattagagggaaaagataagagcttctggaaaggatatattggctactaatttatttttaattaatttttattttattatgtcgtgtcccaatacccgtgcctattttttgaatcctttttaggcaagttcccttattctaaaatttgagttgtgaaggacatctagatacatacccatatctgatactcatacccgaacccatgccacatacagtttcacagtatatatatatgtatgtattttactttcagttgaaaatattcaatctaatttcattgcaagacgcatgtaatgccaccgcttatccatagatggacccttttaacaaattgcctggtatttttcttttttgtcagtgcaggtattcagatcct

SEQ ID NO: 12764 - DNA, 644 bp, Vitis vinifera
  Intron number 6 from transcript GSVIVT01031134001 (locus G SVIVG01031134001) derived from phytozome v7.0 (chr-ID chr1 4; pos 1853741 to 1854384)
caccccttccttgttggtcacaggtaatccttgataaatatgtgaagtagtttttgggtgatactcgttttaaggatttcatgttttaaatgcgaagtctaccatgatgccttttggtatgggattttcatacaacactttattgctccccaaaataaacttgaatatatacatatatattttttcttgaaaaacaaagaaaataactagggtctgtttggaaacacttttgaaaacacctatataaagttttttagaacaataatctgtttgaaaactcagaatattttcaatctgttttcttaatttctaattactttttaaaaataatttttatctacaagattttattttcaatcattattctattcatatttgtatagttatttttcaaaacaatccccaaacaatgggttgctttacctgtaatgtcaagcttgaatgacaagctgcaaagttttcttagtagtttctctagttttgaccactaattgctttgtcacaagctgccctaaatttgtgcatctgagcaccctgcacattttcctctttggccaattgtgcccgttttattctgtatcaattttacactgcatattatttccacagttctggtgctagagctgggagctccgtcgcatcct

SEQ ID NO: 12765 - DNA, 9820 bp, Vitis vinifera
  Intron number 1 from transcript GSVIVT01023432001 (locus G SVIVG01023432001) derived from phytozome v7.0 (chr-ID chr1 4; pos 12107002 to 12116821)
gttacattggtgagaaccctcaaagcctcaagcttgttacttgacggtgaagatcatagacacgagtttggaggagcctcaaggttgcttttcatggatgctgataacaagtctgtcaggatgcatgatgttgttcgtgatgttgccagaaatattgcatccaaggatcctcatcgctttgtagttatagaagatgttccattggaagaatggccagagactgatgaatccaaatacatctctttaaattgcagagctgtgcatgagcttcctcacaggttggtatgtccgaaacttcaattttttctattgcaggacaacagtccttccttgaatatcccaagcacattttttgaaggaatgaaccaactcaaagttttagacgtgtctgaaatgccttttgctaaactacctccatcacttcaatcccttgcaaatcttcgaacattacgtctagacaggtgctggttgggggacatagctctaattggagagctaaagaaactccaaattcttagcatggcgggttccaatatccaacaattgcctagtgaaatgaggcagttgacgaatctaaggttgttggatttgaatgattgtcagcagcttaaagtaattccacgaaatatcttatcaagcctgtctcgattagaatgtttgtgcatgaaatctagctttactcaatgggcagctgaaggagttagtgatggagaaagcaatgcttgtttatcggagctgaatcatttgcgccatttgacaactatagagatagaagtaccgactatcgagttgctaccaaaagaagacatgttctttgagaacttgacaagatatgcaatatttgcaggcatttttgatccgtggaaaaaatattatgaagcatcaaaaacattaaagctgaaacaggttgatggaagcttacttttgagggagggaattggaaagttgttgaagaatactgaagaactaaagttgagtaatttggaagtatgtcgtggcccaatttccctaaggtctttggataacttaaaaactttagatgtggagaaatgtcatggattgaaatttctcttcttactttccacagctagaggcacttcccaactagaaaaaatgacaatatatgattgcaatgtcatgcaacaaataattgcatgtgaaggggagttagaaataaaagaagatgatcatgttgggaccaatttgcaactgttccctaaattacgatatttagaacttaggggtctactagagctcatgaatttcgactacgtcggctctgagttggaaacaacatcgcaaggaatgtgttcccaaggcaatcttgatatccacatgccgtttttcagttatcgggtatgtttatgcttaattaatagctaatttctatagtttttttttctttttcacatcatatttttttaataaataaatcaaaggaaaaactaggttcacatgcactttctcattccaccttgtaagtgtgttaaaaggagataacataaagatgagaaacactttagtaaattattttatttgaagatacactcaatatttggaaaaaatctagtttgaataaaaaaatcttaaaatattagtaatgttttagaagttttataaataaattaaaaaggattaataagaaaagatggtcaagtgaatttagatttaagaatgtttagatggaaaataaaaacaaaaatgaatctccattttgtttatttgtttgtttttattttttacaattatttattataacataataagaaatattctatctcttttccttagtaattaactttcttttttttttttttaaatctaattgacctaaataatacaattttttataaagagaaaaagctttagtgattctcttttattaaaatattgacgaaaatatccatatttatgaaaatattggtaaaaaaaaaacaaaaatatgaaaattttagataaaaaaataaaatgataaataatatataaagatatatatgattgaattaatgttatgattaaattagtgtgatttgttaataatatagatatgtacaatcaaactagtatggtttgtaaattacatagcataagttataataactacgactttcaagaagaatactaaaaaaagaataatattttgtgtatttggtattaacctttaacgatagatttgttaaattattttaaaatttaatttcaaataatagaaatataatgaatgatattagtaataaaagaggaaattatgtttagaagggtatggaaggattaatatatatatatataaaattacttttataaacttatcaaaataaaattctatttaaattaataaaaaaaagagactctctcctatttttgttttaatggttaaaattaaccttaaaaatatttctattttttttttaagaatgaaatttcattttctgaggactcccatacgttcttttgtaatgaagaataggaagtaagacccaacatcaataataataagaagaaacaatttagacaacctccattgaaaagaatgatataaactttgaatacccattataatttttaatgcattgttgggagaattatttggttatgaaggtttaattattgtttgtataaaaatgaagaatatcgttgaaaataagattatgaatgaaaatttatatctattttttaagaaaactcgaagcttttttagatttcaaataaggggaaagggttttgtgggttaattacaattgaagaattagataccaaggaagatgagggaaaggtcacaccctttttagtattattttaatttaataagggaaaagtaggagttaatagaaaaaaaactacaagaataaatttgaaagtgaaatcagggacatcttttaaaagagtgttttaaccacaacaccaatgtactcatcatcccctaggattttccactgttttgtcacactgtagcaattcctatgttcttttaacaggaaatatagtgaaagaatcaacattaaatatctaatatcatgtgagaacttgctggaaccaataaatttttagtgataacttgtcaaattttttttgggacaacttttgaaaaatttcacatgattctttttagtcctccctaattgttttagatttttaaaacgtaactaaatttaagatgtgaatatttgagagtcaaaagatgtttatgtttattacaactttccaattgataatgtcatgtattataatacaggtttcatttcctaatttggagaagttggaactcaatgatcttcccaagttgaaggagatatggcatcaccaacttccatttgggtccttttacaatttgcagatcttaagtgtatacaagtgtccatgtctactcaatcttatctcatctcatttgatacagagcttccaaaatttgaaaaagatagaagtgggtgattgtaaagtcctagaaaatgtgttcacgtttgatcttcaaggacttgatagaaatgttgggatcctcccaaagttagaaaccttgaagttaaaaggcctacctagactgaggtatattacatgcaatgagaataagaataatagcatgagatatcttttctcttcttccatgctcatggattttcaaaacctcaaatgcctatccatcataaattgtgccaacgaagacaaagaagagggatatgtcgatactcctatagaagatgtagtactcttcgatgaaaaggttagttttctctcatacacatttttctaatttttccttatactatttttggaaatattgacaaagatattccatagaaataataaaagaatattatgagaagattatattaatctttaataataaatttattaaattatttagaaatataattttagacaataaaaatgatgaataataattaaattgtataggaagtgaaaaaagaaaaaaaaataaatttaaatttaaatttaaaaaataataaatatgaatagaaataatataaaataaaaatggtaagtattattttaatttgaaaggaaaaaaaaaggtgctaattggaataaatattgcgatgaattgcaaacaaaattagaggaatcttttaattaaaaaataaattttaaaaaggatttagtagaattgattgataagaaataatggagtgtggagtgtatgatacaatatagagtaataaatgtaataaatgattagatatgaataaaggtaatttagtacaagaatatatgtaatatagatttctaataaataaaaaattattcaaatcataatattttatccaaatattagaatatttaaaataaataatatttatgaaaatttgggtaaggtgtaaaatggtaaaaatattttaaaaattatgattcgttaaaatatttgagaaaatttgtgattaattttcccttttgaaactaaaaatagtaaagcatagaaattacttacaattcttttaaaataacgactaaaatattcatatttaatacttttataaaaaataattttagggttaatttgttgatcttttggtttaaaattttgtcaaatatctctattacctttcttatttgtcattttcattcacattttctctaattcaaaataagggaggtgtttaatgaaattttaaaccaatgaggattaaatgtatttagtcaataatttagagaaagttagtgaaattaacccttaattttattaaatttaaaaataaaaaataaaacaataatttttttcttttttttaaaaaaattatatgttattttattgttaacatcaaaattaatcgtaatttctctgattttaaattacaaatttgagaactttttatttatagttttttttctatattcattatctttgttttgtaattttatatttattttgaatcttttaattatttgtactttatttaatgctttttctaaaatctttgccaaatcatattttttgaaaggtgtttattttataatggttgtttgatttttggggaaattatttagaaaaaaaaattactttatatatatatatatatatgtatgtatgtatgtattctatttttttcactatgctctaaaatttttaattttattttacctacattttctaccttttcacaataataagaatatttttaaataaaatgatttgatatatatatatatatatatatatatatatattttttattaaatttcatcatcctctagtttgttgaatcagtattcttatataaataaatatgttatatagagcatttataaataatatccttaggaaaattaattattgataatttatttatttatatgtattttaattttataaaacattttttttattatgtggtattttgctttttataaaataaataaattattatgaaataaaagatcataaatatgagtatggttttattatgaacacaatttatttatatttttaccttttcatacccatccctatcttcttttagttttaattgaaaaactaaaaaaaactaggttaggtctagattcattttctacactctaccttgtaaatgtgttaaccaggaggtatcataaatgttataagagaattaagtaaaatattttatttgtagatactatttgacatttgaaaaagtccaggttgaataaagaaaactcaaaatttgaaagtgattaataaaaaaaattagtcaagagaaattggatttaataatttttagatgaaaaatgaaaagaaaaataaatctctattttgtttatttgtgtatttttatttttttaaatgtttaaattaacataataagaaatattctgtctctttcccttagtaattgactttctttattattttatctaattgaactaaatagtacacctaaagaaaagaactttggtgattttattttattgaaatattgatgaaaatatccatatttatgaaaatattagtaataaataaatgagaatttaagataatatatatatatatatatatatatatatatatatatatatatatatatatatatatatatatatatatatatatataaagatacatatgattgaattaatggtaaaaataaattagttaatattatagatatgtatgatcaaattagtatagtttgtaagtgatatagcataaggttatgataaatatactttttgaagatgaatactaaaaaagtaatattttgtatatttagtattaatcattaataataaatttcttaaattattctaaaatttaatttcaaattatatgaaaataatgaatattcctagaaaattatgtttaaaagagcatggaaggatttttttttaataaaaaaataattttataaaattatcattctctctaaattagttaaaaaagagactcccatttttgttttagatgacaaaatcatccctaataaaaaagagtaaaatatgttttattcatatatggagactaatcaatcttaatttttaaataatgatcaaagttaataattttattaactttgtatatacattaatagttaataataattttattatttatttttagaaacaaaactagtggatcataggttaaatataaaggagttgaaaaaaagaaccaagttaaactgaatttttcattttaataacattaaatattaataggaaaacataaaaaagaaaaagaaaagaaaacatagtaaatattattctaatttaaataaataaaaaatgttaagtggtaataggaataaatatggcaatgaattaaaaagtgatacttgaaattttcaatatgaaaaataaatttaaaaaggaaattattaaagtgtgtatatatataagtttcaattacatcatattttttaaacataacaaagtgaacaatgtgaatatcggagagttaataaattatgtttaagtaataattttttgtttatcacaactttacaattgatgatgttatgaattatattgtgtatctactaggtctcacatgattccttttaatttgatttatagaagttttagataaatcatatctttttagacatatcaaagtgaacaatgtgaatatctaagagttaatgaattatttctaaggaatgtatttttatgtttgtcacagctttataattgataatgttatgtattatattgtgtatttgctaggtttcattccctaacttagagaagttggaacttaatggtcttcccaagttgaaggagatatggcatcaccaacttccacttgaattcttctacaatttacggattttaagtgtgtgcaattgtccttgcctagtcaatcttgtctcatatcatttgatacagagcctccaaaatttgaaagagataaatgtgcaacattgtgaagtcttagagtatgtttttgatcttcgagggcttaatggagatgttgagatcttcccaaagctagaaatcctaaatttaaagacactacctaagctaagacatattatatgcaatgaggacaagagatgtctattctttccttccacatccaaggatttttactctctcaaagaggtacatgtatgtaggatgcaagacaagagagatgtcattacttctttacatgatgcaatgcacttcaacgaaaaggttagttttctcccatattttttatttttccttacgctactttcttgaagtattgatagagatattttataaaaagtaataaataaaaaaagtatgagacgattacattaatctttaataataaatttattaaattaatttaaaatttgattttaaataataaaaaattgtgaataataagtaagttataaatgaattgaaaattttttaaatgaaaatttaattttaaagagtataaatattaatagaaataaggaaaaagatggtcgacattattctaatttagaaaggaaaaaattaggtgttaagtaaaagaaatattgcaatggattagaaagaagaattagtcaaaattttattcaaataatttttttaaaaaatttttagaatatttaagttatgtttagtcctaaaaagtattgaggaaaacgaaaaaaatattaagaaaaataattttattatattataaaaaatatgaagaaaatcaaatataattaaaataagttaaaaattcaattctgtatatcattttttacatagaaattatatatgtatatatatatatatatatatatatatatatattttaaaattgaactctttttctttgaaaaaaatttatgtgttattttgttgttaacatctattttacaaaaccttcaaaaagcaaagttttgtaactttttacttttaaaaacaaaaagaacaaaacatactttacatctaattactattcttttataataaacctttattttaacatttttataaactttttttaaaaataaaaaataaaaatacaatcctagatattactttttacatggaaattatatatacacatcctttttaatttgaattgtttttctctttttctcttttttttttctttttttttttaaaaaaaattatgtattattttgttgttaatatcaaaagaaacggaatatttttcaaaaagaaaagtaaaaaatgtaagttttgtaattatgtatttttttgagtaattttttaaattattcatactttatttactgtttggtcataaagccatttgactttttggaaaattgtttagaatgaaaattacttttttttttcactaatgaaaattttataatgtaacataagtgaacatgcgattatcacaaccttccatttgatgccatatattgtgtttttgctacaggattcattccttgatggagtatctaattatgaaacttttgaatcaagagcctccactttcaacaaaattatggatgccttaagagatgacgatatcaacttgattggagtatggggcatgggcggtgtgggcaaaacaacactgctgaaacaagtagctcaacaggctaagcaacagcacttgttcaccgcacaagtctatatggatgtatcctggactcgagactcggataaacttcaaccaggaattgccaaaattcaaaaacaaattgcagacttgttaggcttcaaatttcattggaaggataaaaccttaagaacggatgaactgaaccagggattgaagaaaaggaagatccttattatcttggatgacatttggacggaagttgatttgagggaagtaggaattccttgtaaaggtgatgggacacgatgcaaaatattgttgacttctagagatcgagacctattatgcaaagacatgggcgcacaagtatgttttccagtggaacatttaccaccagaagaagcttggagtttatttaagcagacaacaggtgattccgtggaggagaatcttgaactgcgacccatagccattcaagtagttgaagaatgtgagggtctaccaattgcaattgtaacaattgcaaaggcattaaaagatgagaccgtggctgtatggaagaatgccttggaacaactcaagagttgtgcactaacaaacatcataggagtggatgaaaaggtatactcatgtttggggtggagctacaaccatttgaaatgtgatgaagtcaagtcattgttcttactttgtggttcgttgacctatgatgagatttcaatggatcacttgttacaatatggtatgggtctggatttgtttgagcgcatcgactcattggagcaagcaagaaatagactacttgcattggtggaaatcctcaaagccttaggcttgctacttgatagtcatgaagatagacacaattttgatgaagaaattgcttcaagtttgcttttc

SEQ ID NO: 12766 - DNA, 3026 bp, Vitis vinifera
  Intron number 3 from transcript GSVIVT01009826001 (locus G SVIVG01009826001) derived from phytozome v7.0 (chr-ID chr1 8; pos 11582096 to 11585121 reverse strand)
aaagataagtgcctgtgctttaatttgcaatctaagagctcctcttataatgatccatagctagtcagactttttgtttttgatgatcctgtaatatcccatcatgttattctagttgttcagtgtgaaatatatagctcagggatgtgtttgttgggcatcttaagcccttgtataataaatcctttctactggtgtttctgcattctttgttttgtagcagctttttgtagagattcattcctttatcttaaaacacttgaagtggtgtatactaccttttctacacagagatcctttatgtagagctcattttgaatcactgttccaagttgtattaaggttttcttttgatttagaatatattgtatcacttttttatgagatatgagaaggttaccctgctccttctctgcatttggggctaacttattccatgtgatttgcagcctagattagaacattgaattgaggatgtggttatggtattcttagtctccaaatttgaaaatcagtaaataggggattttttgaatttctaagaatagaacacatgtcagtctggaaaaggtgtttttctttgataatattaaaatccactaaatggttgaatccaccagcatgcttcacaggatacagaagattatgaaattatgaaccctctccaagagcctcatttcggtcattggaaaaggtatgttttccttaagacagtcatgcagactagtttttgttgcggttgaactagaaggagagggaattgatgttagatgtttagaattgctttatagtaaaacccctttaaaataatactcttcggatcaagagaaattattatgttagcggagttatttaatttatggataaatgaataatttattaatttataaagaggattatgtttatattgcccagtacttgtacttatatgacttataaatctaaaaacaatggatgtggtaaaaaatttacatagaagcctaaaagacttaaaaaaataaaagatgattataaattgtaaaaaatagaaagattcctaattaaaaagaagagatatggtgtcaaaaattaatgccctaaaagataaaagaggtctcctaaaagataaaaatgtttcaagtatatgatgattccgagaatgagtgacttgagaaaatagaaattataaaaagttactcaatactaacccgagttgggacaagaagattttattatttaagcaaggttattaatttatcaaacatccatttatcaaggtttcattgtattttagatatgtgcaaatacaagcttaaaccctaaactagtaacccagaatattactgataataggttagatttcaaactgctggctggaggtggtgaaaggaactgaagttagatgtcaaactgctttattcaagatgtttctaaatatatccttaaagcctgagtcactgagatacagaaaaggggagggaggtggaggggtgggctggtaaaactactccatttgagatgtttccagatatattcttggtgacctttatactaattagagagagagagagagagagggtccaaaaggctatattcttttcatgttccctcagtctgttccttcttcttttttgggtctccatgtgatctgatgatgttgtgagctcttcctacttttctggggcttgttctaagttgcaagcgccgtttgcttgtccatgagggcatacctcgagaatctttaatttctaccaaaaacttgctggccatgtggacccttgtttgttcaatatcaatcatcaatattgtttcttgaaacataattaattacaaagacctcttccctaagtaattgattatgtattcttgctgaattctgatttgaactgtgaaatataccaacaaacagaaggtgtgtattgagttgaggcactagaggtttaaggttcttttggtaaaaaatctaccagaacaccaatagttttgctaactgctgttgggcttttgaagctatattcttatttaaaaaattaaaataaatcaacagattgggtatcgtgggcttttgactgaatggggttttatatgtttggagtcattcggcctcaggtaaaatttaaattagataaaataaaagttgcctttagtatcaaatccgttgtagtctagttggttaggatactcggctctcacccgagagacccgggttcaagtcccggcaacggaaaacagttttgttcatttttttaaaatcaacccattgacaatcatacaggaatgtcgtaatctgaaatagttgtgtccattgtttacatcataatgatagtaacaggttctcaatattgcaacggcatctataacttgttacagttgaaaccacatgcaagaaccatgagaaagtcatccacgaagcgtgacaggcactgctcactgccctcttctctcttgttaatgtttaaaaacatggtattagctaaagccagctcgctatacatgagagagacatcaaccacagctcaagcataccatgacagtgaggttagttatgcatttccagtgcctggtaaccttcgttatagtcatgataatgactctgaccgcaaccctgttaacatcatcatctcttcttccctccccatcttcccaacaacaatattatcagattcagcacacagatttccaaggagaggactatgggttttggaatcctacaccccatcacagcggtgggggagatggggctcctattcctcatgcccaagcggcatgctgagtttctaactcctccagattccttctataccacaatggagactcagagcaaggtaaactgctcacttgaacgtaaagatgcactcaattgcatgaatacgttaatcgtatgatgttttttccactaccttaaagatggtgatctgcaatttgtatgatatttgcactggcctcattgactcgagattgggcaccaattttgtatttacttgataacataaaaaaggtattaggagatagaaacccaggcaggcaccaacacatcattccctcga

SEQ ID NO: 12767 - DNA, 17040 bp, Vitis vinifera
  Intron number 1 from transcript GSVIVT01024386001 (locus G SVIVG01024386001) derived from phytozome v7.0 (chr-ID chr1 6; pos 1917398 to 1934437 reverse strand)
ataagaaaccctatttatatatatatatatatgtatgtattttttttttcttgcattctcttttttggatttcatttggtataagagcaatattgaattttaatgaaactttttatttacaatcttattgaagagagtttaatcttatacactactttcatggatccaacttgtagaccctccattttgtccccttaacacatgtcctattaagtgtttttttagtattccacaataatttcttgatggctcattgacactcacggagctaccttcaaagcctctttggttcaaggacttatctagagcccacatagtgaccttgatagctccttaagtttagtttagtttttcttcacttaggtacttttctaggcttagtttttgattgattaattttaggattaggtgagttttgatttgatttttgattgcatgagatggttttccaatctttggttgtatgagtttgatattttgattattatatattgcattagttgaatatcttgattcttttagttgcatacatgatatttgtattttggtttgttttatttatttgttttttttattttttttttatttttttttatttctcaattacatgatttctaacttatatttatttaattctattttgcatgaggaaacgggctaccatttgtttggaaggaggatcaccaaaatttttgaaaaaggaaagtgacaactttgaataaagatatccccaccatgcatataagaaagacacggttacaaggaaggagaggaagttgatgcccattcaaaaatatatggaaacgtccatacaaagaggaatttttggagggatgcaatctccatggacggatagacacatgggaaaaaaataggagattttcttattttctaactaggggcacatataacaaggagaatacatactaagatcaggcaccagaaggaaggcacgcattgcatcctttaaaagcatctccacatcacacagcaaaaggggagaaaaccaaaggaaaaaagggtaaagccagaggaggagaagcacacaaccacaaaatgggagttgctgatttatttatttatttatttattattttgagagaggggacgattgttaacttatgagaaaaggaaggaagcaaggacaggattttagggaggactggcaggagactagaagggacggtaagtattctgattttctctatgagggagagtagaggtgcagagagaaatagagggaaaaatcaaagagaaaagcagagaaactgagggagatcaagtcgggtttaggaaaggaagagtactataagatagacagattactactcggagaggagattttcaggtacggtcactgtgatcttcgtgttcttcatcaaaaatatgagtaggaaagctctagatataggaggctggaaacaaagaatactataactaataagaaactaatctgtagctaatctgtaactaattccagctgatcctcttacaaaaacaattgtttaattaactaacaaaattttattcttcatagttaagagaatcttaatactccccctcaagatggagaatgaatattgtgagttcccatcttgccaagtagaagtgtgcaatgtgttagatgaagggcctttgtcaataggtctactacttgatgttgagaagaaacatgaagtgtttttaatctgacatcttagactttctccctcactaagtgacaatcaatttcaatatgtttcgttctttcatgcaaaataggaattgctgctatgtgcaaggcaacttgattatcacaaaacaaaaatgctaattgtggatgatttatgtgaaaatctttgaataaggaaaacaaccacattaattcacaaatggcatttgccatggaatggtattcaacttcagcagttgatctagacacagtgtgttgtttctttgacttccaagagactaaggaatcaccaatgaaaacacaaaatccactaattgatctcctggtatctagacaagtagcccaatcaaaatctgcaaaagctttcaattcaatggcaaatgaagaggaataaaagagaccttgaccaattgtagctttaacatactataaaacatgatatgctacttgtaaatgaggaatccgaggcttggcaagaaactgactcaatcgattgatagaaaatgataaatttggtcttgttattgtaaggtaaagtaatttaccaatcattcttctatacatagaaggatcatcaagtaaatctccttcatcttgtgagagtttaacatttggatccataggagtctttctagttttgcagccaagatatcccgtgtcagacaaaagttgcaaagcatagtgctgttgactaacagaaattcctttaaaggatctaccagcttcaagaccaaggaaatatttcagatttcctagatctttaagtttaaaacagccattaagaaacttcttcaactcatccacattttcttgattattacttgttatgacaatgtcatcaacataaactagtaatgtaatgaaataattaccattcatcttagcaaatagagaattggtagaagctgattgtttaaaacttgtgttgataagaacattagagaacttagagaaccattggtgagatggttgttttagccaataaagggacttgtgaagtttgcaaacagtgttgataggtaagaagtccccctcatggtgaagactaggtggtaaagatatgtagacttcctcatgaagatcaccatgcaaaaatgcattattgacattgagttgagtgagactccagccatgaacaacaactagagcaagaagaaccttaacagttaccaattttgcaacgggagaaaaagtgtcaaggtaatcaacaccttcttgttgagtgtagcctttggctactaaacgggctttacatcgttcaatggttccatcgggtcgatacttgattcggtagatccacttgcatccaacaatgtgtttaccaggaggtagtgtggtcaatgaccaagttctattttccttaagagctctcaattcctcaaacattgctacttgccactctggaataattgcaacctcagaataagtagtaggctcaaaatttgaagaaatgacattgacaagagatgtgtgaggagtggataatttatgggaatcaagtacttgagataaagggtggcaagtagattgtgaagcaaaggaagttgaggaacaatgataatcttaaaggtaaaaaggtgttctcctaaaccgggtgggacgatcaatagaggatgaaattggactaaaggaaggatttgttgaattattggaagaaatggaaataggaaggggaaaaacaagatcagagaaaaaattagaatgatagggttgtgagtcatcattttggaaagaaaatattgactcatcaaaaatgacatcacaagagataaaaatggtgttagtggacaagtcaagtagtttataggctttataaccagggggataaccaaggaatacaactttgatagcacgaggtgaaaattttgtacgagaatggttcaaagtggaagcataacacaaacaaccaaaggccttaagatgagaatatgaaggtttccttttaaacaacaactcaaatggggttttttttatcaataatggtgaaagagtgtgattaataagatatacagttgtgagaatgcaattactccaatgaggcaaaggcaagtttgattgaaagtacaaagcccaagcaatattcaaaatgtgtcgatgtttccgttccacaacagagttttgttgtggagtttcaatgcaagaatgaaaggacaaaattccttgggcacgaaagaaatcagaaaaggccaattcaggtgcattatctgagatgatagactttattttcacatcaaattgagtttgaataagagtaaatttttttggaaaaacaacaaaacttcagattttgcacatagaaaatatacccaagtaaatcatgtacaatcatcaacaatggtaaaaaaactatgatatccctcagtggtgattgtatgaaaaggaccccaaacatcaatgtgaatcaattgaaaatgagaatttgataaattgtttgaagacataaatggtaaacgacgttgcttcgccaaatgacatattgaacaatgagatggagtctcagaaatttgagaaacattcaaatcatcctttagagtatgaatttttgcgtatgatgggtgtcccaaacgataatgccaaagttcaattggggatgaagaaaaattattacaagttgttgacatgtcaaatgattgagacactaaactggaaaaatccaagacatagaggttcccgtgtcgtctacctatcccaatcattttggcctgtgaatggtcctgaataagacaagaatgagagagaaaattagtagaatatttatggctttgtgtaagagcactgacggacaaaagattaaattgaaattgaggcacaaaaagaacattaatcaaggtgatatgaggtgataattgtatagatcctattctattaattgacaccaagtgaccattaggaagagtaacagaggaatttgatgttgggactgatgaaacaaaggagcaatagacatgatgagtagcacctgtgtccaacaaccaagccaagaaatcaagggaattaggaaacaaaactgaagaaaggaaaaatataccgctgaaactggagactgatggtccaagctgttgcaattcaagagtggcaggagtattttcatggagctaagagctcaaaagagcaatgagttgttgacattaagctggagttagtgaagcaagtggtgaattagctgtaccagaggcttcaatggtgctagaaatagtttgatttgcttgagctttagcatgaggattcttggatttgaatttatatctaggtggatatccataaagtttataacacttatcaacagtgtgacccaaaattccacaatgagaacaagtgggtcgatccttcttaggcttgaaattcaatttggcaactgaaattgcaacggtggaattggaatcatttgtagctactgaatcaggtggagtataacgcataattaatggagcgttgtcgttcattttgtacaactagtaagaaaactttatcaattggaggaagaggctccatcattaagatcgaagaatgtgtttgaacaaaggattcattgaggcccataagaaattgcatcacatattcttgttgctaaaattccatccaagtcttcatagtaccacaagcacattctggaaggggttggaaacccttaagctcaccctaaagaattttcagtcaggtatagtaagtatctacatccaaggatccttgatttaaatctataagaagttttttgacttgaaaaattcttgaaccattactttgacgaaatctatcccgaagatcattctaaattcccacaacggtatcaaagtaaaaaaggctatcggctatgtcctaatgaacagaattgagaatccaagaaattaccatgctattgtagcaaatccacataccaaaaaaaaagatcatcagattcagggcgagggatactcccatcaatgaaattgacttattcttggcagtgagtgtcaaaaccatggctctgctccaagtattatagttagcactagtgggatgatgggaaacgagaacaataccaggatgatctgaattgtggaggaaataaagacttgttgaatcttccatagatgacaatgagttagggacactggtggtagcacgagtgattgtgattcctcgagtcatcagtgatgaaagaagacaaaacagagtatggcgagcaaacaattgctctgataccatattatgaaaaaaaaaacagagtagaaaagagaaaaagaaacatagcaaagaagagaaaagaagaaacagagtgttctataccgttctatttctttcattagaaatatgagcagaaaagctctagatataggaggccggaaacaaagaatgctataactaatctgaaactaatctgtagctaattccagcccatcttcttacaaaaacaattgtttaactaactaacagaattttattcttcacagttaagagaatcttaatactttatgataccgaaattgtcctttaaaaattatgatttttttaatttttattttaagtaaagagaaaaaatggtctcaactgagagccaaagtcatacttttaaaagggtaattttgatattatgaaagtttattaataataaataaacttctatcatggcttaaaaatgggaattatatttggaccatattgtttgttggaccttacctttttacacactccttccttatcttcatctctcttagtttaaagaaaacttgtccttttgattatatatatatataaatgtctatccatctatgtggggatgttttttcttaaatttaaggaagagttttgacttattaaatattaatctcatatatatatatatatgaactaaagaacaaaaataatttgaacccctaacaaataaaatgattcatcgtatcaaaagcttgaatttttagtaaattaaccaataatgtatattaaagtaatacataaatgtatgaaagagtagacgaattatcgatagcattagatgtaggaacaaggcaaaggggtttgggaatcaaaaactcaaaagatctcctactaagtgggataaaaaagctaaaagctctttagattgagatcatcaatattatgaaagttttagttcataggaaagaacttcttagatgtataagtcaaaatagaacttccataaaaaccaatattttcttggttcccacattaaactttttttttttttgagctataaactctttaaacaaaattaggtaaagtgtgaaactcttattaagcctaaaaatgcgttttttatttcttagaagtccaaccaaactagacctatttggatttacaacttggtgtaatttgtttaaaaccttccaaatttggattagaacatggtagcgaaaatgacttaaggacatatatagttggggaaggttaccttctcttagatttatttttctggtaaactttccacaaaatcaaattaaaaaaacagatgaaataaaaattcgtacattatattcacaaagcttaagcaaataattacgacttctatccctccacataaaaaatatgatatttggacaaaataattaagaagtgaaaaatcaatcggtttgctgtgaacccaaaaataaaatgaactctaaacatttctgggtcttaaaaggtttgttcttccccttcaacatttttagaaaagtagaagcaatttagacaattaggaagaaaaaagtaggaactaaaactgagggtttgaggtaataggaagactagagagcatcttagtagggtttcttgcatgcaaaccaagtccatgggggtgaggattcaatatagcgaaacatagtttggaagaaatagggttttcttgggaaggtttttgaaaattattcccaaaaaataatctttgaaaacaactttaaatatagtacttatttatgcttatgagagcaaaaacttatttatgaatttagaataatttcaaatcattttctatgttttcaaatatttttaaaaaatgaattttatatataatattttattttaattattcttcatatttatctcattatttttttttaaaaaaggtaaaatttgtgggttttaattattcttcatatttatcccattattttttaaaacagttgtcttaaagaaaataagtaaaaccaactattgtgggcgagattgtttatttcctaataggtgttttttagataataatgtaaagaatagtcgaatcaaggacatatttggccaggacaatcaagataggaagaagatagaagtgggttcaaatgccaatcgttttgtatttgtccaggacaatcaagataggaagatgatagaagtgggttcaaatgccaatcaaaacgatctcccggtggaataaatattatcgtctctcagtgcaagcttgtgcaggatagcctgacctagaattgatatggtgggagattggatgatagatgcgtaaaccaattgactttatattaattaattatgctgtattagtccttttgatttttagacaagaaaaataaaacctaattaaaaagatttagaacgtatatatatacaccccaaggttgaattacgtgattaaaggtcatttcaaaagaattgaatatttagaagtatgactgaacaataatacgtagtgagagtggggagtgatggttgtctttcaatttctggtacatgagtcttttgaaaattattaatgattaaaagtagttagttaaagctattttgacttatcttttttgtttataataatcagaaggacagctgtatcactgacggccggaagaataataaaacggtggagaatgagtgggatttagtattatcatatgagaactcagaaatcaacctaccaaaccctcagcataatataatacatacaactttattataagctgcatggattcatcaccatggagaagatgatgcttaatttagcagcaaatatatgacactcaaagacatgtactctggactctcattatccctaacttcaaagacacgtacttaggactctcattacccttaacttggggatttcttcagctggtaggtccaggaatcgaacgagttgcatttggaccatggttgggaatcaaatcagctgcaccggacgtagaagcctcaaggtcatctccccggatagagtgatcactagtctgatcatccgaactaattgcatttggatcaacgttgggaatcaaagaagctaactcggccatcaaagcctcaaggtcatcctggacagagtcacttataggcgcatgcctcttcttcaactggtaacctcggttcttcacatcattataagatcgcccaggaaaaaatgttaccatagatgcccagctgcaagcaacacaacacaggaactcctaccttagactcaagctgatcaccacactatcatattacatggaaaaatatgaggatgattctcattaccccacatcatggcgccttagatagatgatgcgttcatcttcctgtggggagaatttctctttgttgaaatcagacttcagatggttattccacctttccgaacagctctttacatccctttctagcttcgccagctctatgatctctccccaaggtagattagggtattctgtcttaaagtgtttgagcttattgtcttcttctggggtccatggccgtttcttctgcctcttctgcggtggttttgtcattacggatttccctgcaaagatggaacatatgaacccgatgaagctgcttccatgaaatatacaacaagaaaacagacaaacaaataaataaataaacattacaatgactgagctttaatgagattgatatgcaatgcttggctgagctagcttcatataaatagcgttggtgtggcgacatgggttcgggtctatatgcctttagttccgtctgggtagaaattttctcgacagcagcaacaaagcattatgaaataaaatattgggtagaccacgagagggaattgattttcaataaaacagtgttgatgaaaaataagctttgaggccaaactgacgccaaacggaaatggtgcatgcatgtctccactttttggttctaataggagataagctacataccaaatgggatttcctcataaatttgtggtatcaaattaaggccagatttgtaatattttgcttcattttaaaatttgtatttaacttctaaataaaataaaaaaataaaaaagaaaaacaattttaaagaatatgcttagtcacccttaaaagttattgctctataagtttattatggttatacaataacgtttgaaaagtcataaagtaaagcatcgatcataacatagctgtaatacaataatgtttgaaaagtcataaagtaaagcatcgatcataacatagctctaatgtaataaattaagatatcaataaccttaaaccgatgaaacttcatcttggctagtagggatggcaatagggcgggtcatttcgggtacccgccccgccctgcccctaatggggcgggatattattttcttaaacgggtataggacgggtttaggattttttttttaaccaggggcgggttcgggtattgcctcatcccgccccgccccgattatatataaaaataaaattaaaattaaatttaatttaaaatttaaatttaatttaatttaatttttaatatatagataataataaattatttttaataaaataagttataaaaaatataataatttaattatttataaaatatatttattttaatataattaaaaaatttaaaagtaatttttaaaaaaaaattaaaattaaataaaaagttaaacggggcggaaatccgcccgccccgccccgtttaattttttaaatgggacgggaataggaattgctttaaataaacggggcggggtttggaggagggcgccccgccccattgccatccctattggctagttttcttactttggattggccacatcgatttatgtaggccctttgattcattattattattgtatgtttatttgtgttacacagcagtttgattttattagtgatcttttgtatatattttttcaaacttgtaaataaaataaaatttgaaatcaatttttttttgttttttttttaattgaactctttttctaatgtaacctcaaacatttttcaaggagtattgagatgaatttttttataataataataataataaaaattatttttcttaaaacataaaactaaaactatttttcttaataataaaactgaattcattttcctcaatgatgaaactaaaatagttggaatcattcttttgaaaatataaattaaactagaactatttcttttaataaaaattgatttcaatacttaataaaaatataaaaatcatttttcttaataaaattgaatcctaaaaactttaattttgcaaataaaatcaaactttttttgcaaatgtataccaaactgaatttgccaggtgggccaaagctttagtaattatatacctaactgacaccaacgaacacagaggttttattggaacaaacatgcctgagggcagaggggcggccatcattgcaataaaaataggaaacaatggtacattgatgttccgatttcaatattcaatcataaagttggaaagcccaaaagtagaccatataaaatcatcctaacatcgatttcaatcccacctttctttctctctttttcttccgtttgtatccgacatcctactcatccgtctcatgaatacttcccctttaatttcctcgatattaccgattatggttttattataaaaataataatgaaataaagttaaaagattattttaataaatattttgaaaaacaatttagatgtgaaatattcttttttttttaaaaaaaataagattatttttttgataaactcctaacacaaattctcacaaaatcatcattttcttaaaaaagaaatatctctataaatattttaagttatgagatagagatgagcctataaagactatataaggttgatagagatgcgaggaagaacgagaggtacccggtgaaacgagaggggtcatgatagggtagggatataaagagtaaggaaacatgagatgtttcaaaaacccaataattgtatttgattctattatttgtaatgttctggttttatcctttataatgttctagttctatcatttgtaatattctatattgtatattggaatgattatctctcatccgtggacgaatacatgattatcgaaccacattaaaacctcatgtaccgtttgtgttgatttttttatctttatgttgttgattaatgatattagcatcaaagcttctcctaatgtaatagtatataaacatgaaaaaacagaaaaggaaagagaaaaaaaaaaaaaaggaaactagctgtgaaattatgcggtgggattagataatcatgcaccacctaattttttttttcttgaagtttaaattttgacttttaatgtacatatgtttggaaagaaataatcctataaatatgcactcaaaattaccatctaaagctccactaatgccaacaactaccgaaatgttttccttttctcattcacacatgacaactcaaagagttgtctcttatttttattttattttaaaaaacattggcatgtgataatcaatcatgtgatatgatttttccttttttatttttttattccttcattaatacctccacctttttgtttttttttaatgtgtagattttataaaatctttttaattttgattttttttttcactttttcatttttctatatttattgattttaattatttatgaatatttttaagacaaaataataatatataataaataattaatgagaacaaatttaatataaaaataaatacataacaaacaaatctaaaagtttacaacataagattttctatattttgctaaataaaatatttatttattttataaattttattacattgttatattattttattatttatatttttaaaaattttaaacttttatatgcaaaatagagacgatgacaatagttttagttttttgctcatggatctaaattgatcatagttttaagtttctttttggttaaattatttaatatttctaattgtataagataaaaacttgattgttgttctaacattttactttattaaaatttttaatttttaatttatataaaataaaaataaagtaaaatatattttccataaaaagttgtatttaatcatttatattaatttatcttaatttattaaaaattaaaatttttatatgctaaaattgtgcacctttcaagtttgagcaatttgaataatactcttgtagttacaatacattggagtaggacaagaaagagaaacactcatataaacaagtaaccaatataacaaaactatattattggtggtaaatgctataatatgatactcggcttctatggaagatcgagaaatgataatctgtttttgttcttccaagaaataagggaatccttaaaaaaaaatgtataaaatctagtggtagacttgtgatatttgagatcactagttcaatcaacatcagaacatgcaactcttaaaaaagtagatgaaaataaaagactatgaaatataatgtcttgaagatactacaaagcacaaagacaacaacacaatgaactgtagtagaagcaacaaattaactaacattatgaacaacataagtaatgttcaaatgtgtaacggtgagatgtactaagttgccaacaatagtacgatataaagtaggttcaaaaggacactttgatgtttcgatttcaattttcaatcataaaaggttcaaaaagttggaaagtccaaaagtagaccatataaaatcatcaaacatcggtttcaatcccaccttttctttcactctttttcttctatttgtatccaacatcctactcattctactaagctttttttttttttttttaaatatatatatattgatttatttttaaattttccatcaaagtaattaagttcatgtcatattagcatttacatctttctttttttttcatgataaaaccatagctaatgactgtgattttagcgctaagattgaaaccgtattgatcaattgcggttttattataaaagaaaataataaaataaaattaaaagattattttgataaatattttgaaaaacaatctagatgtaaaatatttttaaaaaaaaaattacttttctgataaactcctaacacaaattctcataaaatcatccattttcccaaaaagaaaattaaatattgaccaattgtgtataaacatgagaaaatgaaaaggaaagagaaaaagaaaacaaattagctatgaagtcatgctatttttttttttttaagtttgaattttgacctttaaagtacatacattttggaaaaaataaaccaagaaatatgtgctcaaaactacctctaaccctccaactaccacaattttttcttgttttttctttgataaagtttaacttttttaacatgtaaatgaatcaaaaaatttattttatttaaataatattctagaatttttttaattaatatgtaattagttagatcagtttttatgaattcaaaattattcttaaaaataaaaataaaaatcattaaaatttttaaattattgattatgtcctatttaatttatgatttaattacctaaatttaatatatatatatatatatatatatatatatacagatatttgtgtgtattggagaaattgtaaagtcatgatttataatatatcagttttgatcttcttcttttttttaatgattagatttatttttttagtttcaaaatatttttaaaaattgttaaatccattaataaattaaatacaaagtattatttgattttaagaaaatttataaaaatataattatgtggatgaaaaaaataacaaaatcattatgaatcaatttttattcataaatttctactattagtgagtttattatttgagtttcaaattacttttaaaaattactaaagttgttattaaatccaacatattatgttttgtttaatttagagcttatttgtttggttaaaaaaatataaaaaaaatgatgattttatataaaagaaaaataatagtcattttaaacaaatttttgtccataaatttctaatattgattggattattatttaagttttaagttatcttttttttaaaaaaaattaatattttcaaaaccgaatcgatcattaaacaggaaatgttattggttcatggtttactggttggattgatagtcaaatcggtgacataaaaaaaaaatattttatatattattaaaagtaaaaaaatttaaaaatagaattttatttgaaaatcagcaaattatttgaaaatcatacaattatttgaattcttaatgtttccaaaattttattttaattcctaatgttttcaatgatttcattaatttatttaaactcaaataaaatatttaaaaaatcaatataaaattaaaataaataaaatgaacataatgtgaaaaaatatataaaatctaacaaataaataaaaaaaatttcaataaattgatatttcaatatgcaataaataaatgagggtaacaaattttaatcaacagaaattatacatcaacaaaaattaaaacattaaatattaaaaacataaaatgtaaaaatattaaatattaaattaaaaaaaaatacttaaactaataaaaacttaaactaataaaaacttaaactattaaaacttaaactaataaaaacttaaatgtaaacactaaaaactcactgtcacagccaccaaaaggttctgtcggcagcagcaagagagtctagcagaactagcaccggcagcgactggctggggagctggcagcttaggctgtggggaggggcgacgggtaggtttggctttgcaattgggggaagaaaagggaagcttttatagtaattaaaacgaggtcatttcgatgccagaaacatgaaaacaacgttattttgatgagggagagaaaaaaaataaaattgggttgaaccgttcggtttggagggaaccgactagttggctagtccaatcgtcggttcacccagtctaatgccgattcaacccttagacaactcaattgaccggattgaaccaaaaccatgaccggcaggtccagttcggttttttaaaccataaaaaaatttgttagactcgttaatgaatccaatacattaagtcttatttaatttggagtttatttgcttaataaaaaagaaaataaaaaaataatgattctatataacaaaagaaataataaatttaaaccaatttttgttcataaatttcttgtattaagtaattcactatttgatatatatatatatatggaaagaagaaactaacctacgcatttaaaataaaattatattttaagatttatggtattagaattaaaaataatatcatgttcaattttatttattcttatatgagtttttaaaaattttctacatttttcattttgtttttaaaaccattgaaagcaatttttacttgttttctaaaaaaatttctctatttttctttatttttaaaaattgttttcagataacaataacaaaataacgttaaaaaaattttaaacagttttctaccatcagcagcagggagtaagatgatgatcggagggcagggaggagtcatgggtgggtagagatgggggcagtgggccgttgatctggtggggttgctggtgatggcggtgatggtggaggagacagtggagctgaggctgagccaccatctccatggggatatgggagagattgtatgttcaagtctcatctaatgaatttttttatccatgtaaaaaaggtaatagaatccttgttccttgttcctttaccttctggtaattatatttattatagggtcaggtttatattctacataagaaaattcagattgtctgatggcctgcattttgcaaatgaaactgcaatagtcggtccctctaatgagggattgacatggcataattaagatattaaggcctgggttattatcgtcttaatccactcccatagtggtgtaactggtcctaattcatagtccaaatgtctgctactttcgccagtcatgcaactttgggtttctaaaaaaaactccttcgtcgggtacattctagcattgctaagaatttagttgggttggaactcttcccccttttagttttattttattttttaaccttttcccctttgttttgcctttttgttctccatctatttcctttgacctagttttattgatgtacaggtgggagaattgcgggcaggttaaagtggttttga

SEQ ID NO: 12768 - DNA, 7422 bp, Vitis vinifera
  Intron number 1 from transcript GSVIVT01030893001 (locus G SVIVG01030893001) derived from phytozome v7.0 (chr-ID chr1 4; pos 18470492 to 18477913 reverse strand)
tttgccttgaacccttgagcgttcccgtatttcaggtttgtcagtatttttcatgccgtgccctcgatttctccttttgtgtgttttctgtttttgatgaaatttttgaatctctttcttgtttactattgatggcgtaattgtgttgtttgtagaaggtaggagctcctggtttgagagagttggggaattggagtgggtttttgaaattctgatgagtgtagggatgttttattgcttttgcacttgtagacagttggcaggaggatttgaatgtccttggagagatgggtagagtcagtttcgggttggactcctttggtttatgagatagcccagaaatgggtgggtgggtgtgtgcgtttaaggaaattgagggcagtcatgcaaaattctgggtttcttactgttgatgatgtgttttctggagaaaaataattattacatttttgaaaggcaacatgaaaacacgacaaatctaagtccaattttggctccctcttctataatctcatgaaagacattcccattttggactgagcttgcatgagtgccaattgaacagaaagaaatcttgtcactggttgctaagagttttgtaccatactttattgatttctttctattttagttttaagcatctatcaaaatgattatattctcattttggacacgatatgttcatggatgcctcatttctgtcagggcattgaagaaattttggtcatttgtatttcagctatgtccttgtgtccaaatccttagggtttggagaggtttgatacacctgcatacaatttagttacctgaatccatatagcataatcaaggaagctattgctgttaagataattatttgaaggaagcaaagattctcttgagacaccaaaaaggtcgcacataaacatgggaaaacaagaaaataaactctccacccatctacaaccagggtcccccaaggacttgctcttgtgcaggaatggctccatctacttgaaggttgaactgttttttcctttcaaggagttgatagaaagaataagggtaaagccatcaacttctagagagagtagcctgcccaccatttgaactgttcacctgtcaattgaggaaaagaaaatcattcccttctgtcaaattcaccatcttccacaaatgtcacaatcttaaacttccactttcaactttcaccctgttgaaagtactttcattttacttctttacccagatttatttatcttcatttagttttgtcctgtgacttctattttcatttatctgttagtttttacattatttgttagttttttgtgttttttttttttttttttcatttagctttttctgctggtttctgttttcattttatgtttttttttgttattttaaattatgtttatgcacttaataattatgataaattttagagttccaaaagacttaagcctcaaggccttggggcttacaccttgcctcatgggcactaaaatgccccatcttacactttcatgattgtaaatttttatattctctgaagttaggatgataaagagacatgaaacatgatggcaagcgaagaaaaatgctattgacaaaggtcaatctcctctctcctactgctgccctattaacaaatgcagctactaatctcatccgctgtcctaatgggaataaactctctctttctcaaattcatttccaaattgattatgcctcagaacataatagggtgcatctgggacatcttagttgctctacattattcccacaagagatgatggtgtcatcagcatataggaagggtaagacactctttctcctgtcttctctatacccagaacccctcagccaagcaaacttctattgccctggttaccaatccacctgaagtatttatcatactcatgaacaggaatgctgataaataaaggagcctcatcgagaccctttgagatcctggaaaatcctgtttgtgatccattcaccctttgaaatcctggaaaatcctgcttgtgacctattcaccattactttacaggtgatatacatcccacacctgtcttgaaggccaaacgatttactaatcattgaaggaatttccaatcagactgttgtagggattctcaattttaagcttaaatatttctgcctcctattcttccttcgtatgtgagcacatgcattgcaatgaaaactgcatctaaagtttttctctgccattcaagaaggaaaaaaaaggtgttgtgagtgctaaaagcaacttttctaacctgttgctaattattctttcctcgtaagtgaacacatccattgcaatgaatactgcatctagagtttttctctgccattcaagaaggaaaaaaaaaaaaggtgttgtgagtgctaaaagcaacttttccaacctgttgtgagctaagaactttacatttataatagttggaatgatccttaacattctgattcataataattaataaatgcaattgaaaattgatttttgaaaaagttggtttgctagttgataaaattggatacaatttgcagctaacagaactcataaaaataaattagcatcagttatttgattggactttagtgaatttttcctccaatggaaaattgccataaccttttgggaactggtgactaaagaagagggaaatggtgaatctattagtcaaatttttttattcaaagaaagttggactgccaatcaatctatggtagggaacgagatcaaaacaaagttttagaggagagatgaggtgaaattgtagatctaggttcagttgcaagctggaggccagtcttctctctccatatcaatggcaaccggcttctcaattttttaacatgcactcacacaagcgggtaataagactaggtgaaaaattaacttatcatgtgtaggtccaatggtgtgagctagcaaggagagttgtgtgtactttccacctgctttatgatacaccccggctgtatacatttacttagtatttttggaggttcctattgtttagttctttgtttttgagaggatttctcatccttcttttgtattttttaaatccttatttaatataaaaattgaagatgaatctcacatatggataacacctagaggtggggtgaataggtctttttgcaacaattagagaaggtgtcttacaaatgcttacaattcccttgtttttctcctatgaattgatcttctttttcaattctatgaacaaacaagcaaatcactagcaacaatggatgcaataacactctcccaaacaagttattcaatgcaagtcacatgcaaatgcaacagcactccccaaacatgatatataagacattgcatcaccacacactcattttcacatgccccttgacatcaatcaacaaaaatgaaatatatcttgttcttgcaaagctccaatagtcaaatttcaacttatgctccatttaaacaatcaacataactcaatgaaaaacatcctaagctaatgaaatacttatcaaaagatgagatagaataaagagacaatgacatcaattttttaacgtggaaaacctctgaagagataaaaataccaagggcctcaagcaatcaaatgatccactatgaagaaaaattagttgagtactaggatttacctagaccaagccttctatcctctccccaattacttgcctagaacctttaagcttcagataccacctttcttcttttggaaaatacttggaatccactccaagctttgatctcagcctcttcttgagtccacacaagaagaaacttgggttttaccccaaatatgttgaatatgagagcaatatgagagcaaggatgaataacaccatgaatcaacccatttgaaacaaaaatttctcactcaaaaatgtttttcaactcaaacacaagtgattttctcttaaggcaaactctccccaatttggtaagaaaaacttgaagctcagaactaggttttcactctcacagctgcctctcttcttctgaaagcttaagtattagggttttaaaacccatccaacggttgagaatgacttgagaaaaagttgaaggaatgtagatgtgatcaaagtttgattgatcagagaagattaaaaagaattgggtatagcagaaactgttacccttaagtttgattgatcaaaaatcgattcaaatgatttaaacattatattttacactccttatgcaaccactccattttttaataaaatgataagagtttaaaacaaggttgatcaatgttttccgtcatccgataccttaaatgcacttaccaactcctctagccatcttcaaacacaaacaatttggaaaaggcaagtgtccaaggaaggatttgaagagtatgagctatgagacacaatgggaattttgacccggaattgccaatacacaaatacacttacaaaaattaaatgaatcagtttgcttgaccaacccaagccttggagcctctacttcttttgctaacatcctttgatgacaggccaactgaaggaagacgcgcctcctgtaggaagagtgtaaataatttctatttttatttttgggaatttattttattttattctatgagtcttatatttttgggaagtgtcctattgagaattattttttattttattatattttattttattctattaatgttatatttttgggaagaatcctattgggattgtgctagtggagtctcattccttttataagtagaatcactttccactttgtgtcatcttctaattacaagtagattcccattgggactgtgttagtggcctataaaagcaggtcacctctctctctatacatcaataccaatttttcagagaatttttcagggagtattttcatacatttatttggaggaattttttcaaaacccgagttgtacacatctcgcttacagagagatctgactgttgaatcctagaggtagaccactggtaccctagtgcttcgagttcgtcttcgaggagggtggatctatttcaagaacaatacttgtcacgcctcagccaataagtttttcttttaattcattttattctttgtttgtgtcttttgggctagtcttttgttttcatacccttagactccaacacctcctacttctgtctcatcagaagtagacacttaggctatagaatatagaatctcactttctacactatcagctactgtgcctaatttgaagcttgttggtcaagttgaagttgatgttgtatgaggaaatccctagataatccttgagaaggttattgaacatgatctgctcgactccccttccagagacaacttcttttcccccagcctgattccaaatgaagaagaagctaggctctctcttgaaatctctgaaatccagcctcccatggaggttgaggatcaagctagccactgatctaaaaccagcctgcctctcattccagtcccgctgatagtgaggagcttcattttgatgaagcggatctatgtatctctctttctctctctctttatatatatgaaatgttaaaatttgaatttagatttaatttttatattagctttaggattgaaaagcatgatacatttgtgacaaaattcatgagacataataggagggtgggcttggtatcttaaattattataaagagaggaatttatatgtgtcttaaacacactcttcccatcagttgtcctaaatccatgtgtataaattcccttagtctaaaatattattgtccacagaattgttggaatagggctactgcaccaactattcaatttacaaagagagtccaggagaatttctcgtgttttcacctattctcttcagtttatcattgaatttgtttctaatgattcgtatatatcttcggttgatctctgataatgtctcactgaatggtggagcccttataattgattaagttaggcttgcttacatcagaaccactccttcattgagttagctaaaaggtcaatgtttacaacatcatccaaactagttggtttcagaaatcttaaatattaaaccttctaaatttctatctggaaatccaattttgtgttgacttggtttacccaaggaatatccatccatatttagtttgacttgactcttaactcaagtaattctaggacatataatgttacttctactattaggaagtggtggaaaatctgaaatgtgtatttgcctagctccgaatgactgatcctgctcaaataaggagaaagttgattgtaaactaagtgttgttgggcgttcctcttattcctattgttcagattgccgtagaagcattgaaggaacagtcctaaatactgtggcctatctgacagacacacatggtgttaacatggtcaaatatcaagaagtaaaattagcagtgttattgtttcataagaggtcagcaactaggtaatgtaaatttgagtcactgttgtcagttccaaatacctacttattagtaatttgaatatgctgctgtattttcattttaattgatgttagttttaattctctccaactagtatttagcttttgaaaatgcatctatgctcattaatcagttgtgtttatttatttatcttttgactcatttaaagaaatctggttgctcagtcttttttccccctttttgttcttttctttttctttttctttttcttttttaatataaatcaactgttcaccaattgcaaattgaaaaaaaaaaatgttggaaactgttctatggtttaaaaattccttaccaaatggatgtaagctcttgtactccccttggtaaattggacataaatgtccagtgtttttcttctggctttctttatttcttgttgctgtttctgttattgttttggggagtggggcttgggtgggaggtcttttcttcattgtggcgaggaagttgtcatgtgctcattttctgattgtttataaattattcgaggaggcaaatcagaaatttgtattattaagtctttttagatagcaagcatggattagattgtacacattgagctagaaactatgtcaacgtgttagcacagacaacatgagacaatcaaatttcgacacagctttctcttgaaatatttttcaatttttattgagtaaagtatactatggatttctttgtatctgatattcctgcttgaagtttgaaagaacaggatttaataatgattgtagaagtctgtttccattggtttctcttgcctagcaaaagtatgttttcattgcttcccccaacagagattactagaccagatagtttgtcaaattaatttcagaactgttcctgttcccagcatgaatgcatagtaacacgtctgatatatgtgtgtttttttttcctcttcttcttccctttttgtgtatgcttgtttggcaattcagtgtgaga

SEQ ID NO: 12769 - DNA, 19082 bp, Vitis vinifera
  Intron number 3 from transcript GSVIVT01020147001 (locus G SVIVG01020147001) derived from phytozome v7.0 (chr-ID chr1 ; pos 9847394 to 9866475 reverse strand)
tgcggcgattcccttgtttctcttgagcattcaaggtttcttcttatcttcatattctttttcactcgcagaaaccacgaaagcaaattcatcttttttttttttccctaccactacgactactactacgattattattattttaaatttctggaacacagtatataacgttgaattgagaccggagacaaagataattgcatcacaaaagctcaatgtaatggaagtagcaggcttggatgtgttgaaatgatgttatattagttatgagacaggttaaatgaaagtataacgttggatgtggacctaaccttttgggtttagggtttggcattattgaaacctttagaaaggatcacttttagctctgcttaaaataaattcagctgtgatggaatggggaaaagtgtcgtttcaaaagtagcatttaagtgtttggtaaacttcactgataaattgttgtgaattaaagcaattcttacaattctgattttgacttttattttttgaaaggagtattttttcttttagctaaattcataaacatatttataataattagtttatttttatttatttatttattttttacatgtcataacaaatggtattaaatataaatctcaacagttataacacattgatactaaaaaagttttgactagacattcaatatcatgtgattaatattactctgaaattgttcacttatcgtgatcttggtcaattagtaaatgatatataaaaaattttgatccaaaaagttaaatttttgttgaaaagcgaaataaagtcatttgagatgtttgctttctgtaataaaatctaataaaatatttgatagattagaatatatcttacaacagtaaaacagtaacaaaaactgtaaaacaaaaacaaaatattggttggaactaatattgaaacaaaccagagtttgtagatgtattgggaagtcttgcatataaaatacaagatgataaaaaagaaataaaaggaataaaggaagaggcagagggtacaaactaagtatgatattacaagaattttctttgagtttgtagccaatgcctttccctttgcagctggtcttcttttatattggagcaaagggattccactgtctcttaagtctaaggtcttgagaaggtttgaagtccatataatttagaaggtattaagtatgtaaatctttcttttgaaaaagttgtcttgatggataaggatgagctagagggatgccttatagtgggagcttttctttccttttgaaatctgtcaaatctgtcttaacagaaatggatgtcttgcatagaaaagtcatgatgccctgtcctgcagagactattttctctttgaagagtctagatgagcttgaaaaattcaaatgacctggatcttgatgagctgttttttttttttttttttttgataggaaacgacaaaggcatatattaatataaaggaaagtacaagagaaggatgaggaatcctcccacccaagaaaaacaaaactacaatgaaacaaatgcgagaaaatacaaagtaggtacagacaactgctataagttaggccaacccaatggagttgcatgccgctaaccaatcaaggtgtatcacattaaggggaatccccttaaaaaccttagaacaagaaacccaaagagaagcaaggaaatgaatcatgtcccaaaggttctctgaattccttgttttatcctcaaaaatccttgcatttctttcccgccacaccacccataataaagcaatgcacgtagcttgccataatacaatccctctcttagaatatccaaaaccattaaaattggtagatagcatgtcaaagatgctcctaggagggacccaatctatctttgtcaattgaaataatctgtaccacaaccccatcgtcaaaggacaatgaagaaaaagataatctactgtttctccctgcttcatgcacaacatgcaaatgtcgggactaagtgctttgtagggtcttctcaactgtaacatgtcgttagtatttaccttcttgtgagccactaaccagacaaaggacttgattttgaaagggacttgagaattccagactaacttggtagggaaaactgaaggcaaaccagaaatttgggataaggcaagaaagaaagatttgactgtgaaaagtcctgaagaagataaagaccaagatctcttatctggaatcgaaggtgataaatgtatatgatcaaaagaccgcatgagactttctaaatcttctatctcggaatcggaaaggttacgacggaagttaaagttccaagagaaggggcgagcggatccgagaaatgaagaaataggaatgtttttatccatgactactctaagtagtcttggaaaacggacccccagaggttgatccccccaccacaagtcttcccagaaccgaattctttccccatctcctaccatgaaccgagtaaacttggaaaaatcttggaaaacttgtgcaatagccttccaaggacaacgatgtgaccatctaacaacaatgttggcgtcccaaccattagagtgtgatccataaatgcttaaaatgacctgatgccacaacgctgaaccctccttgggatacctccataaccatttccctaagagagcggaatttcgtaaggaaatccttccgaggcccaaaccctctttcatcttcgatttacacactacatcccaactaactagatgatctcttttgccttccctaaccccagaccataaaaaatctctttgcaacctctcaattcttactgtcatagaggcgggaatcttaaacaaggaaaggaagtaacgaggcatatgagtgagacaagattgaatgagagttatcctgcctccaaaagataaatacgccttttgccacccatctaatctgctcgagatcctctcaatcacagggtcctagaagctaccggacttgggattcccacccagaggaagacccaggtagagtatgggccacccagaagccttgcaatcaagcaactcggccaacctatgaagatgatcttgtccgaggttaatgccataaatattacttttgtcaaggttaaccttcagcccagaaacatgcccaaacactagcaaaacgctcttgagagttagcaagtcctcttctcgagtactagagaagaaaatggtgtcatctgcaaattgtaaatgggacacccttgttccgttcctacccaccctgaaaccctcaaatacatttttttcctttactctcaataacatcctgctcaatacatctgctactatggtgaacaaaaagggggataaagggtctccttgtcttaaatctctagatgccttaatccaccctttagcatttccattcactagaattgcaaaagacaccgaggacaaacagcctcttatccatttcctccatctaggattgaaccccttcttctccatcacatggtccaaaaaatcccaactcacatggtcataagccttttcaaagtcaattttaaagacaactccttcctcccctgattgttttttctcatccactatctcattggctatgaggactgcgtccaaaatttgtctcccttgaacaaaagctccctgagtggaatggatagtttcatgaagtatccctcttagacgccctgctaacactttgactataatcttgtaaagacttgtgatcaagctaatgggtctatagtctgatatcttctttgccatactttttttaggtaacagaactatgaaggacgcattagtgctttgattaattatcccactcttgtgaaactcatcgaacactctcactaagtcctccttaatcacatcccaacaatcttgaaacactgcaatagtaaatccatcaggccccggtgctttatccatatccatctgaaaaatggccttagaaatctcttcttcagtaaaagaggattccaacctagacacactctctctagatataggagaccaatctaagccttcaactctccaagattctccggaaggactagcatagagcttttcaaaataccttaagatctcctctttgatgctctctaaattatccatcaccaagcctctttcattctccaacaccttgataaattttctatttctcctgtcattagtcactttatggaaaaattttgaattacaatccccttctttaacccatttcaccctagctttttgtctccaatgaatttcttccctcaagatcaactcctctaactcccctttccttacggctttttggattaaaagttcaggggagagacccccttcttgctccatggagtcaaagttagctatatctaacaaaatgctttttttcctttcaattaggtcaccaaaagaattcttattccactctttcaatttggccttaaggaattgaagtttcctcatgaacttgtaaccttcccacccatctccttgaaactccctccaccaacttccaaagctctccttaaaacttggatgatgtaaccacatattctcaaacctaaatggtgttgggccccacttgaacggattggtttccaagactatcggccaatgatccgacgtccatctaggaagaacttcttgaagactttgtgggaataattgttcccactcatttgagtagagaaaacggtctaatctcttgcacacgggatgctcttgtatgtttgaccaagtgaatgatgcactccttaaaggaggatcgatcagttcgttttctcttataaagtcatccaagtccttcatgcttggggtcaatcgagcacctcccaatttttctgaacatctccttatgacattgaaatctccacccacgcaccagcatggggaagaaagtccaaaaatgtctgaaagctccacccaaaaatcctttctaagtgctgtgctatttgggccatagacaactgataaccaaaactgttcgcttccatccactgcgaacttgactgagaccgaaaaggaacctaataccacctcctcactgtgcaattttttagagtcccaaatgaccaaaatcccccccgaagccccgcacgccggaaggactgcccattccttatttctggctgtccacacactacccacaaacctcctgtcacactctgccttttttgtttcctgaatcatcactatatctggtttttccgatctcaggaagtctttaactacccttctctttttccttgaacccaaccccctggtattccaactgattatcttcattgattaaacacacggaccctaatcctccaaaccagatccaactcatctcacaaacctttggtacatctgctcttcctcctggagtatacttttatatctagagtctttaagacgtcgcgtacttttgccatttttctaggagaaattccttctatttggaactcacctgttggggaacccgcaaaaacactctgattaactgtagcctggttgggagatggatttgtattaggcatcactgggttaacactatcagtcatctggttaggataagcagtctggttcacctccaaaacgaggttagggaagccaacaccaatttgacccacagtaccatcgtcatcttttttgaaaaaaaaatcagagttttctcggttctccaaaggattcagagactaaatgtctgaactgggaagaatgggggcagcaggactcaagaagggagaaatggatccataagaaggggggaaatgagacgagggagactgaaaagttgaagatggggttacctccagattttccgcggccaacaatccataattccccaaaaatcttagcccttcacctctgatttttggcgtagaaggcaacaccatgactgttgcgccacgaggatcacaccccactcggcccaaaaatccttccttatattcgtcggagtagaaattgtgcagggccgcttcgttttttgatgtcgaagccctttccccaaagcgatgcttccagatccttgaataacggcgagagaagagaggactcgcactaaatcctctttccgccaggtaatcggctcctaaagccacaccttttggcttctcatcgatgtctaccttgtccttctcgctcaaaagagtctcgctgcgacatcgaagaccttgtcgacgctcagagcttggagagagaaggatagaccacaacttctttgaaccgatcgtcgttttcttcttctcgggactactggtctgagcctcaagaccatatccagaagctattttcccctttcccgctgcgggtgactcgtttccagttcctgacgacgcctccatctccattgggtctttttctcttgggctaaggcccatccccgacgggcctttatatttgcagtccactttttcaactgttgagccaaacttagatggagtctgggccttcctctcataggcccgacagtcctcaacagcggaggcctcgtgccctccgaccctttccccgtccccttcctttttctcaacgagcccaacattctttttatttgaattcaaattgggcaacgactgtgcctgcactcctttgctacatgtcccctctgcaacaaccacagccatacccctttcttcccccttcctcgttctattatcctcctcgacatggcatcttcctctagccgttgatctgattttctccacccgtcttcctccacctgtccccatgttagatgcaaaggcctcccaagtcgactcgccctatacgctacctctccgacagtcttcttctccgaccactacgacggcaactgtaaacacccaatccccatctgtcacctcgagtaaagctgggaggactgacctttctttcattgcgattcttaccctcgccttgctaagatcgaacaattttaacgtgcgccaatcaatttcagtcaccgtcccccattgctccactattttcttcaggtgtacctcagaccagaggtgaaatggtaacccccgtaattcgatccagcctcctctgaacttcccctctatttccgcattttccttcggcgaccatcttctcatctgtactgaaatccttccctcaacccgtaacttcctcaagtcttggagaaagagagcttcctctgttgtttcgacgaagaaaactcattttccgcctgagaatggtacaatcgtgactacgcctttcttccctaattttctcgccaccactcagccaacctcaacccagttaaccctatcctcaatgcattcacacaccactgcgcacgcccatctcccgaaagaaataatgccgccttctcttgatccttcgccactgaccactttctcaaaagacctatgtaagggacccacgtgactttgtgagaaaccttctcctctgtgttgccttcctttttcaactgtattcgacgaggggaccaccaacattgaagacaacgctcttctaatattctcccaccctctgccctcctcgacctctggaataatcaaacagcaatatcttttcttggtagcaaacttcgagatccttatgaaccttccatagtcgttgaagccaacttccatcaaatgggcacaacgttttcccctgaattttttgttaaaacctaggtgaccctccatttctatggctttcgtcaaatgtttgatcatccacccgactgcttccttttcaaaacctaagacgaaatcagcgcctctactgtgctttgtgatcgaacaccaagttcctccttgctcgccttccaacttaaccaagaaggtctttctctccacgataaccttcaccgacatccctcttctatttaactaaagactaaattcataatatcaaaatatgtaatttttcagtgctttcttgatgagctgtttttcttatctgaaattgtaaggagtccaaatgacctgagtcttgctaagtcgtttttcttgaaggaagctaaaaatcttgatgataggagtcttgtgtcttgaaagaggagatatttaagtcttgaagtggggccttatggcaaaatgtcataattgtcatcttcattttctagaataaatctagaggtcaagtcttccgagtctttagaattacttcccgtctttgaaagggttttttgaagggcctttttgctaagaagtcctagaacttttgaggatgatgcagaaggaatttccatgagaatgggtgttgagggagttttaagttattgaaatttgagtgatttgggcttgagcaagtcttgattgtaaagtgaatcaattttgagtacaattgatataggtaagatcaattcttgtatatcttgtccaccatttaattttgatttctctaaccaaatgtgtaggaaatggagagcctaccttctgatgtagattgaagtcctaatggagtatcaaagggactatgaaatgggccatatacaacatcaattttgagtgttgagaaggagctttgaaattggtcttgaaaagttcaaatccttgatgaataaaagggggagaatctcttgagtagcactaatatagagttactattcttgaaaccagttgaaaaaagggtttttgatattcaaattgaaaatgaaaaaaccatgaatggtttgatggcttcaaataaaaagcattgtaccactcatccatataattatagtaattataggagtttggtataaattttttataagaaaatcttttggaagtacaaggatgttgattctaatcctctgtagaaaaaatcttgaaaatcttgattttgaaaaaaatatatttattttttttgtaacatcattttcatcaagcttatgcttgattttgattgatcgtatatcaatcaaaatatattcatagaattctcggcctttgtctaacaatcttggggagaaattaactcctttagggaggattttggtcatgatgagttgtttctttgcattcaattgaaaatttttcagttggtgtgtagttaggatatattatcaggttctactgggaatgatgcctgctaaaagaggaggcagatgctggtttgcagtggactcaaaatcctttgaaatctccatagaggtgtatggggagagatgtaagggaatcattgtggaaaggagtagaggctttacttcgtgggtcatgtttggaagtctcagtttgtgctgtttgttggaaggggtggaggcttgttgtaggggtgatattgtgcagggtcttgttaaaaggtgggaggatggaggaaggaggtttactggaaagtcgagcaaatgaggcaggcaggttcttattgtgttctgtggttgaccttgaatcaaagatatattgtttagtgtttccaaaaggaaaaggtattttgggaggatgggtcttgttggctgaaaagcttcgtttccttggtgttttgtcttgggatgagcctaggggaactgctgcttcctatgggacagggagtatagatggggaatctgaggggaaagcccaaaaatcctatgtttttttttttttttgataagtaaaagatatgcattaaaaaaggcagaacgccgcatagcatacaggaagtatacaaaacagcataggcctcaaaaaacaaaacaaagaaaaacctcccattaataggaggctaaccactctaagaagcctataagggagaacgcctcctcacctacatacaatttggcccaactccacaggttacaaacaaaagaattctttaacttttgaatatttaaacccccccccccctaaaagctaatctattcctctccttccataccgtccaaaaaatacacaacggaatggcatcccatatctttttccttttctttcccacccacgagcccctccaactagctaaaacctcctttacagttcctggagaaacccattttacatcaactaaaccaaagacaatatcccataaggctctcaccactgtacagtaaattagaatatgatttacactttcttcttcgcattcgcacaataaacaccgatttggaagttgaaaacctcttctttgcagactatccaaagttaacaccttcccccatgacgcctcccacgcaaagaaggcagctttagttggcactcttgccacccaaatgcttttataaggaaaacccataacatcagaattcgtcaacaacctgtacgcttcctcctatgttgatgtggtgaaaacaagagtgaaaaagttaggggaagcagtatggttacaattgggggagaaagatattccaagcgaaaggaagttaatggaccgatgcctggttggaagatggggacagtctccattgtatccagatatgtctgctcttgaaagttgggggagatccctgtgggatattaaaggagggttgaagtttgcgaggctagggggccctctcttgttgatcgagtttgagaataaagaaaaggcagataaggtgcttttaagaggaaatcgatggttcaaggaatcgatcttgcacttggataggtgggacccaaaagtggggtgttctcaaaatggcgagacagccaagagtgtttgggtgagagttgtgggcttgccgttgcatttttggagtcaggaagcttttagaaatatcggggactgttgcggggggttcatcgcagtggatgaaaacactgctaaccttaaggaactacgatgggccagattattagtgagatttgaagacttagagtggccgagctccttgcacgtagtagttgggtccctttgttatgctttccagctatggtgggaggtgaaaccagggatgtttgaagtggttccggtgataaaaaatgagaagggtaaggagcgggaggttagggatgacggagaaggagattcacgcgctggattcaaattggtgatggaacaaatgcatggggaatctgcaaaagtggttaagccgtgcaaagtaggtgaaagaggctgcggaaagaaagctcagccctctggtactgtgtcggaaacagtaacagaggccaacgggacaacaggaggccagctttcagcttgggggaaaagctcttgcagtaggcctggaggaaatctgccgttgagccggcaaagagggcccgttgtggagggccaagtgattgatgcctttaaaaaatcagtggagatgggccggcccatttcggagccttctaaaggcccggtgggggagggacgacccattttgaagaacataaaaggggttagggcttccaatgggagtctctgtgtcggcgaagagcaagagagggatttgtttggttcctagttggggtcgctccttccggccgttaatctctcagaaatcactgacaaagcgttgttggaggaggcttccaggtattctgatcaaatccctcatcctttgttttctttggggaagcgggaaatctctcttttttctactccttctgggtgggacggggaaggtgttgctatggctagggtttccgatcggggcaaaagtttagaagctgtagggggagctgttatgggcccgttaaggatgatattggttgatgggagggaggccgaggtctcggatttggcaggaagggagtctgggacttccgaggaggcttcaaagggggtttcgaaaagggtctcccaagaggatgaggaagagagggtcgaagagggggaactgtgttggcattctagtagctcggctaaatttagctgctatctaggaatgccgacggagggcttcgaaggggaaatcttgtttttgcttaaaagaatgaaagagaggaagcttcaaaaaggaaagttggatggtagaaaaaggaggaaattggagtcatcaaaattcgaaatagaattgagaaagttggaatggacagtgaactatattggaggaggaggaggagaaagggggggggggggggggagtacgagcaggactaaatgaagctctgtatgcttacctggaatgtaagaggggccaataattgtaacaagaggaaggtgatcaaagctttgataaagaaaaataaggtggatctggtttgcctacaggaaaccaagattcaggaaatgtcaatgagcattgttcgtagtttaggagtgggtagattccttgaatggggagctatagattcaaggggcgtagccggaggaatagtggtgttttgggataacagggtgttggagttagttgacctgcaaaaaggattgttctctatttcgtgtacttttaagagctgcgaggatggtttcatatggacgtttacaggtgtttatgggccaactttgaggaggaagagggagagtttttgggaggagttgggggccattaaggggctttggaatgggccgtggtgtgttgcaggggattttaatgtcattctaagtctggaagagcgcagcagaagagggagcttgaattcaatcatgagaaggtctcagaagttatagaagatcttgagttaaaggatctacctatggttgggggccctttcacttggactggaggggcgaataaccagtttttttcaaagttggatcgctttttggttaataaggggtgggacagtcactttggagatgcgagacagtttcttctaccaagacccgtgtccgatcactttccgcttcttatggacggaggggacctgagaagaggtcctaccccgtttagatttgagaatatgtagttgaaagtggaaggtgtaaaggacctattgaagtattggtgggaggaaggcagcttcagtggatccccaagttttatcttggccgaaaaactaaaatttctgaaggctaagcttaaggagtggaatagaaacacctttggaagggttgaatatagaaagaatttggctttggagcagatggagtattgggatgcaaaggagaaaatcagcagactgtcattgaagagctggaagctagaaatgaagcgagggaagaatataaaaaatgagtcttatttgaagaaatcacatggaggcaaaaatctagggaagtgtggctgaaagagagggatagaaataccggtttcttccacaagatggccaacgctcacaggaggaggaataatgtggacaaaattaagattaatggagcttgacttacagaggagaatgatataagggaagggattgccaatgcttttaggctgttgctgtctaatccgggggaatgacgcccttctgtttccgggctgcagtttgagacgttggagtctttggatgctagtgcattggagactccttttacggaagaggaggtcttcgatgctctattgggctgtaatggggataaagcctcggggccagatcgtttctctatggccttttggcaatttgcttgggatttcgtgaaggctaatgtgatgtgttttttcaaggaattctacaaaaatggtaaatttgttaaaagcctaaatgcaacttttatggtcttaattccaaaaaaagcaagggctgaagctttaggggattttaggcctataagcttggtgggaagcttgtacaagtggctagccaaggtcttagccaataggctaaaaaaggtggttggaaaggtggtctccaaggcttaaggggcgtttgtggaaggtagacaaatcctagatgcagtgttgatagttaatgaagccattgattcggtccttaagaacaatgagagtggcattttgtgcaaactggatttagagaaggcgtatgataaagtggactggaattttattctcacagttatacagaaaatgggttttggggagaaatggatcgggtggattaagtggtgtatatccactgcaagtttctccgtgttggtcaatggaacccctacgggcttcttccaaagctctaggggtttcagacagggcgatcccctttcccctacctctttgtcatagctatggaggtttttagtgctttcctcaaaagggccgtagagggagatttcttgtcaggttgtagggtgaagggtcggagtgaagaaggggtcctaatttcccacttgttgtttgctgatgatacactagtgttctgtaaaccttcacaagatcagttgacttatctcagttggctacttatgtggtttgaggctgcttcgggattgagaataaatttagaaaaaagtgaactcattctagtagggagggtagagaatatggatgatcttgcttgggaatttggttgtagtctaggtagtctttcaaccacctatttggggatgcccttgggtgctccttttaagtcagttacagtttgggatggtgtggaagagcgctttcgaagaaggttagccatgtggaagagacaatatttatccaagagaggaagggcgactcttattcgaagcacgttatcgaatttacccatctatctaatgtcattgttgtgcttaccaagctcagttagacggagattagagaaaatccaaaaggactccctttggggtgggggcaatttggagcgaaaatctcattttgtaagatgagagttggtgtgtttaagtaagtcgaaaggaggattgggggtcaaatgcctttcctttctcaacaagacacttcttgctaaatggaattgacgtttcgcaaatgagagagaggctttgtggaatcaagtgattagagggaagtatggagaagctagagggggttggtgctctcgggaagtgagagagactcatggtatggggttgtggaaagggataaggatggattggaagttggtgagcgataggttggttttcatagttggtaatgggagaagggtgagtttttggagggatagatggtgtggggattctcctctgtgtatgtcctttccttctctttttgctttgactgttgagaaggatgcgtggatggcagatatttgggaccccttggctgaggggggttggaacccctgttttttaagagcgttcaatgattgggaggtagaggaggcggaaagatttttagagaggctacagggtaagagagttattgaggatgtgaaggatatggtgtcctggactgaaactaagagtggtaaattctcggtcaagtctctctatgtagcccttgaagcgggtggttcatctttgtttccttcaagctatatttggaatgtgaatgtgcagcccaagattagtttcttcgcatgggaggctatgtggggcaaagccttaaccttggatatggtccagaaaagaggatgggctttggcaaatagatgctttatgtgtcttgagaaagaggagaacataaaccatctcctccttcattgttcaagaacaagggtgttatgggatctacttttttctttatttagggtgtcttgggtcttgccttcttcagttagagaaacccttctaagttggaatggttttttcttgggcaaaaaacacaagaaggcgtggagagctactcctcttcacattttctggacggtttggaaggcaaggaatagattgactttcaaggatgattcgttgtcaattcagagactgaaacactcttttattcttactttttgggctgagactaagttgttcatagatgattgccctctaactatagctaattttattgattggttgggttctaagtaggtttgtggtgttgggttttctttgtcttttggccttgttgaaggcgggtgtataggtattatatactttgagtcgcttttttagcgtctcttttatatatgaaatcttatttacttatcaaaaaaaaaaaaaaaattgaaaaatttcaaggggagaggattgaaccattagggagaaatcctttttaatatattggcttcgaagatagggactttttagtgtttagatacaaagaagaaaagggtgaattggttggagaagagggtctaatagaggaatttatatttggaaaatgaaagatatttcaaattgatttgaagtagtagtgggtgtaaagaaaggggttggatttaagggtgaggattttagagtcttagaatttttctttctagtatgggattctttggtcataataatttcatttcaagatgaagatggtttggaggaactcctataaaacttctcttgtaaaaaaatctggaatagaattagaagttccttttataaattctatttgaaaataaaaatcagatggaattgtttgtcatcttgcaaagacttgttttgaaaccaattttttttttaacaatttttgaagaatctctttaactctcttgcaatcaactttgaaaagaaattgtttgttgcaaaagatcatcttgaaatttctaaatacataaaacaatggataacacttcctttttagtagctgagtaatgcaattacggtcttatccagattcttgagtgatatctgacattttttttcttgatctcatattctatgttttagtattcctccatatccttcatttgaagcatccgtttctacaattataaaaactttgggatctagaaagtttagatagggcaatttttgacttgactcttgaccttttgtgctatctttgtattggtaggagtccaaggataagagttgttcttaagtctactaacaatgaatctttcttaaatttaggtaaaaatttgaaacatgatttaaacttcctaaaaatctttggagttgatttttgtccttaactttatttagaaatttgttgtcaaatttgattgatctttgaattagtctaattgtcccttgatacacttcatgtcctaaaaatctaattttagtgtttgataaaaagggaaaaaaaactctaattttggtgaaaattttcatttttgtagttgaaactacaacttcggattttcttgacaatatcaaaaaatgtttgaaggtatttagaatattggtctattgattatgaaaatattaaaacatcatctatgtatacaatttaaaatttgtataaggattaaaaatatcattcattcctcctcatattgtccaaatggtactgtaaatgctattttatatttgtctcattctttaatttgtatttgccaaaatctagatttatgtcaaattttgaaaattgttttgcttgatacaacctttctaacaaatcctttctgttagtaataagatatctaatccattagagaacttcatggagaggtttgtagtttatagcaagtatagaggttcatctagttcaacttggttttgaacatgaaaagcagcacattgctaaggagacttgttttttctcatcaatctcttctctaagagattttgaatttcctttttgcagtgttgaagcaattcttgattcatttgtatggatcttgctttggttggaatttttttcccattgaagtcgttaataaatcgtgaagatatagtatgcttttctctttcccaaaatgaattgaaaatttctgagcatgcttctctttctaatcttgttttaaaagcagtgattttttctattacttctggtttgtatttatattgaacttctttggataaataccatccccatccaaaccatcttcatcctcaaatgaaatcatcattattagagaatcttattctagaaagaaaaattccatgactaaaaaatccacacctttaattccaaccccttacttgacacaatttctaatacttcttcaaattgatttggcattctttctcatttgctaggtgtaaattcctctattagtcctcttctcctactaactcacccttttgttcctcatatatccaaacgttgaaaaagtcccactcttcaaagccaatatattaggacagacttctcattaatggtttaatccactccccttgaagaatttcaattgaatgcagagaaacaaacccatcatgatccaaatcctcactgaaggattcaatttctttccaagatagttggctaaagcttgacaattctatgaatatattttgattgatatgggattagtcaaaatcaagcacaagctagatgaaaatgatgttataaaataaaaaattgtttttaaaaaaatcaagattttcaaaattttctccaatgaattggaatcaaaatctttttgcttccaaaggattttctaataaagaattaaacttctataattactatgatcatatggatgcctagtataatttttattttaatttttttttaattatttatttatttattttttatttcagacaatgaaggtaattgttctattaataaaatataacaaaatatttgatagattagaataatttcttatatttcatatgaataatgtaccttacatataattactagaaaatatttttgaaaaaaaaaaattactagaaaatatttaataatataatataatatctatttattacataaaatgttaaatatctttgttttttttttctttttatgtagttaaatatctttgtcgctaatattattagcaaataaataaataaaaattatcaattagttattaatattccatttaatacccaatatttgtcttgagtgtaaagtgggtagttcactaattttagggattcttggaaaaccatttttgaaaagctgtccctgacctatttcttaaaataattgccaacgtgggtgatattgtcagactatcactttttgtttacttcattaaacaaattagttataaaaaattatgagaaagtgattctaaggggtctagaatcaatcttaaatgagaatttcattactagatttgcatttcaatgtacaactttatttgcaaagaagtcaagtttcaactgttcgttgacttttcacatatgcccctggacataaccataatcaaccaactattatcttgtgtaccttagttgcccaagccataatcacaccaatgaaaagatgaccattaacacaaaaatgctatttaacattttgtagcttacttatatgcttcatttatgtttggaaatatatcattgaatgagagaatggtcctttcaaattacataattccaatgaaggacccatgatctgcaattccagagacttttgctactgtggttggcaaaagatcaaaccttgtgaaagataaaaatatcctagtgaattagcatagatgtcggatggctatggggttaaactatttttagaatttactattcatgtaactacatcttttaaggttcgctcacacattttttttattctattggcaggttaagtgattgctggaatctttcaagtaccttgt

SEQ ID NO: 12770 - DNA, 7989 bp, Vitis vinifera
  Intron number 3 from transcript GSVIVT01036936001 (locus G SVIVG01036936001) derived from phytozome v7.0 (chr-ID chr2 ; pos 17335447 to 17343435)
tgatttagaaaccaagagagtaatatacttgtgagttttttaagcaacctcaagatttgttttggaatgcttgtggcaggagcctagtaattccttactttcataattgcttctattgttagcctatggtttttgtgctgaaaagagattcttaccattattattacatggcatatgaacataatcatatggattacctcattattgaatgagatgggctatttgttaagagttttttgatgtattgctggtttactctcctcttcttaggttaggagctttagtaacatatagcatgtttcttagtagtgagagaggagttttgatgcttgaggacttcagaggtcattttacccttttaatgtccatgttgcatacttctgttttctttattagatgcttttgtttatttataaggatccttgctcatccttgtactattcttttctttttattttttctaatttcttagtttcttattgaaaaagaaaaaaattgttgtacatttgctactatcatatgcttctgatcattattactttttcatgtttaagaaacttttttttttttttttttcttttgatcagataaaaaactttttttttttggttagacacttggtagcattattgttcaactaccaatttttttaaaagattaagcttatagaatttaggctcacaatgtatatcataccctctaataccctccttgtcgtgtaacctcttttttctgggcttacacgtggaggtactaaattgggaaataaatgtatggtggttagctcgaacacaagacttcccacaaaactagactttgataccatgttgaactaccaactttcctaaaagtttagatggtatgatagagcccaaatcttataagcttaaacttttagaaaaattgatagtttaacaattatatataagagaagtcaactaaaggactaagaaactaaggtcaagaagaaagtgcttcttttttatcctatttttttcttatcagaaacaaaagatgtattaattattgtaaagaggtcatgaaaaggatgaggaatcctccccataaaatgcaaacctgatcaaaacaccagaaaacctttgctttacaaggagatttgtacaaaaagaatagaaaagactatacaaatattacatctcctcaagctcatttaggctcctcacgatgtaggtccaaccctaaggtgtacgtatcaaaagctaacttagctgaatgtcattcaagggaatgactttaaaaacattggtacaagaggcctaaaaagaaacaaagaaatatagcaagtcccatatcatcttagacatctcccaattatcgtaaaaaatcctagtattcctctctctccatacaattcaaatcaaagtgagacaaacgatctttcaaagagtcttgcctttagtggggttcccaaaacacaaaagaaataatcatcatatcacaaaaactccttggctaaacctgcaccatcctgacttgtgtgaatagcttgtgccataattccaaagtgattggataatgttagaagagacgatcaattgtctttccactccccttacatagaatgcaccaattaggactaagggctttgaaagtcttttcaattatagcatgtcattgctatttactttcttatgtgccactaaccaagcaaaggccttgatcttagatggaactcttcatttccacaaaaatttggttggatggaaagaaactgaatttgataaattgtacaaaaatatcaaagagttttgtgatgaccatcaattataagggttttggaaaatccaagagagacatagttttgtggcaaactgcgtgtattgctttaatttgggttgtgtggcgggaaagaaatgctaggatatttgaggataaagctaggaattcagagaatctatgggataccattcacttccttgcttctttttaggctttttgctccatggtttttaagggcattccccttaatgtgatgcaactagattggctagcagtgtgtagctccaatggggtggtctagcaaagagagtttgctttttgcaattaccaattagcttattgtttttgtattcttgttgtttagttttcttttgtgggaggattcctcatccttcttttgtacttcttatttctatcaatatatttctttgttgtttcctatcaaaaaaataaaataaaattatacaaggttagaaaaacgattttacagagaatacacttgaagaagaaagtacccaagctttcgcatttggaacatatggagataattgtacgtgggtaagagaagtcattagtcttttgagatcctcgatctccaaatcaattaggttacgatggaaaataagattccaaaaaaaggaggtgatgttaccaatatagctgaaatagagaggtttctaaccgtgatgactttgaaaagtcttgaaaattgtaaacacaaaggtttaatcccctcaccacatatcttccaaacacaagttctctcacaaaatggcacatggttggagaagaaggtattttttgggctcaactaaagtgaaggggagaagactttctgatgaagcaaagataaaggaaggagtgcttagtgcttttcatagtattttgatcgagttaggggatttgagattgagcattagtgggttgtctttctcttctttaggtagtgaagattcgagatcccttgaggatccttctttgagcaagaggttctcttagctctttccacccctgagtggggataaaactcaatccaaatgacttttccctgacattttggtagttttgttgtgactttgttaagaatgaggtaatgagattttttttttttgtgaagtttaggtttgttgattttagtgtagtagatatggttatggtaaggataaagcttgaacaacatcatatggataaatataagaaactttactcaaagaatgttggtccatataaattgctgaagaaaattagcttcggtccatatgttcttgatttgctagaaagtaaaggcattagtaagatcttcaacattgaggatctcagcatatgttctaatcctaaagattttacaattgatggtggcccaaatgctcacttaccaccaactcctcaattaaaggatgaagttgaagatattattgatcaccaaattgcttcaactagaggagggggttatcaaaagtatcttgtaaaatagagagggagggcactttcaaattacacatggatcacaaatagagaattccaacacttgaatcgatgcctttatgagaggtttcatgcctttaactcgtcaaggttgagttttcttaagtcagggggagttgatggagacaagtggtagccacctataaaagtttactaaaggcacaaaggagtgggcttcaaggaccagactttaatttgacactctttggacgataatgggcttagttgggatcttatataattcaatatgggttcagcctaaaaagtacttttcagaaatcaaattatgggtctagtcaatggtcataagttactatttttagttattaatattgtcattttccaagagtctttaatatggtttagtagtttgtccaagcttttgtaattttcaagttgcattaatactatgtgactagttccaaggagttacaagtccctagaaaagttctatatagtagttgatttgttttttgaaaataatcaatgaatgaataatagaatttccagcaaggtttggggaagaagaggtttaggatagccttgtgggaagtatcaagaagaagagggtgggtggagttcaagtgaagtgagagaaaggtttgaggtaggcttgtggaaagccatcaagggagaatgggatgtgatgggcagcaacatggcttctactgtggggaatgggaggagggttagattttggaatgacatgtggtgtgacgatgctcctttatgcatcttttttccctccttatttgctatatccttgtttaaggaggcttggttggaggatgtttggaaccattttggagggggggtttaggatccccgtttctctaggtggctcgatgattaggaggttgatatggggcgttttttccagagtttgcaaggaagaagggtgtgtagggatgtggaagattaggtgggatggacaaagtcaaaggatggtaaatttactatcaaatctctctataaggctttggagccagaaagactaggggattttcctgcaagtgtaatttggaactcatgggtgttgccgagggtgggcttctttgcttgtgaggctacttgaaaccaaggatgaaaatatcggtaatcacggatatattagtatttcgattttatggatatatcaaatatatcagagatatattgatgaatgttttaacataaaatatcggtgggcctaaaattgattacaactcttaaaaatgttgagaaaaaccccaaaaatgatataatgagcaataatagacatttgaaagtcattttataaaaaaaatgaaatatgtatatgatataatttatcatatttgataataatatcgtatgtgtcaataaaaaatatgaattttataagtatacattattattaaatattattcaacaataatattgtgatatttgataataatatatttaatattaaaattataatccatttaattcaattgtattaaatgatataaaataaatgatgatatatgtataatttttttttatctaatttggatatattaaaaaacataaaaaaaaggaagtgatgatacatgtataagtatttttaattttaaaatattgataatttcattaattttatatttaatcattataaaaaatacgtaacaattaaaattaatttacttactataatcgatattttaattaaatattaatatatatataaaatatatattaatttatgtatatataatatattcatatatatagataatatttataatataaatacataaatgatatttattttatgaatattatagataatgtttgtttataacttaaatatatataatgcgtattaaatattttataagcagtagtgtcagcctggtggcaaagtgggcttattttgaacctaagatcatcggttcaatcccacgcctctacaccaacacccaattatttttcattgcatcttgagatgtagtcccacatcagtcaggaacaaaatctaaaaccggtatttaaagcaaaggcagtgcaatagcgaaggagtggagtgggctaggctgctcttctaagggctcgaaatatgagtcaggatttggaattcaaaattttgaaagtcaaaatatcggtgatgtggcattaaaatcgccgaaaaattggcaatatctcgaaatatcggcgataaatatgaaaataagaggaaatgtcggttgtcgatatttcgaagggtattatcgtatcggtaccctccgatacatgatatgttaatccctgcttggaataaggttttaaccttggatcaaatttagaggagagggtggcctttggctaacaaatgttacttgtgtcattcataggaacagtctcttgatcacatcctcttacattgtgatgtggcaaggagtctttggcccttgttgtattctctgtttggggtgtcgtgggtgcttcctttatcagtgagagagaagttgttaggttggcatggttcttttgtgggtatgtagaggaaaaaagtgtggcgggctactccctaatgccttttctggatagtttggaaggaaagaaacaacaaggtatttgaagatgagggtcatttggtataagggtgtgaattttattttctttgtaacctttggcctggtctaatgggtttttagttttcaaaccttattcccttgttgattttgtagattggatgggctctgtttgcgggggtgctacttttgttgttatcttgctttttttttgaggcacttttacgcatcctctgtatacttcttatgtactttggggtgcttttttagtatgccttgttttaataaattgctttttatccataaaaaaaaaaaattcaagtaaccattattttttgtgtgatacgaagagcacttgggtgtggtctaaaggtttttagcacttgggtgtggtctaaaggtttttaggagtgattcctagagttctttcaattactccactactcttgttgcattttagttcctgtcctgcatcacttagtgatgatggaatctcaccctaaagttgtgcaaggatggggtatcttgtctggaagctggaatgatgaactgggaaatatggaaagttcaaatggaatcagattgcatgaaggtttgtaaattgatttcaaattgatttggtaccaagaagtcaatttggttgttggtgaaattaggttcaaacttgatttcatgaagcaatgcaatttcaagccaacttgggcttttggattgcaaggatgaccaaactgatttttgtgaagatgaaattgaaaattttgctttaggtgaagtgaaataaatcaatttgaccaaatggagcaagattgctttagaaaaaacctttcaattcaataattacaaacagcctaaaaggagccatttttttttaatcatgtctattgtttccatttccaaacaattacaaacaaccgaaacatcctttcaaatcccaacaccctgagtaatttttcttgcatcttctcgacaaccaaccatattcgatgatgcattttcatggagatctgcctcacaatgtttaactcagaaaccatttccttggtgggaaaggaaaaaaaaggcttttccaataaatatacctgaagatggcgagcctagatctgagcttcacccacagtatgccgaagcaaagggtgtttatttttttttttttttggtgttgtttttttcttttttctttttagatcataatgataccaaaaaacatgggaaaacaacttaaaggagttttgggaacaatttcagaaaaactgtttcacactcttctggcatccaaatttgtcttccacttaaaaaatttgttttctattctcaaaaatagaaatctgtttttgagagcaattaacaaacaaggccttaattttactcaaccattctcctattagtaagaagcttcctgctagctgacatacccccaacacccttctgcccctggtgcaaataacccattttcttgtagtataatggctgatgcctatgctgcagagaggcttcctactgctgcctcctttgcttcagactttctcaccttccaagggatatgaccaatctcctttccttaattctggcactatgcttactctctgtgaatgacctatttgcttctagtattgtggtcaaagtctatgctgcttcttaggggtcctgttggccaccaacctatgcttacacaatcctgtaagttgcctccttgcctacttcttggacagatgtcctagaaaaaaaggttatcctgaacaagattcaaagggtcaggttttttttttttttggctactacgagtataagacctgaaagccctaggaggtggtacctatatctagctaaggaattgaatgatctaagtctaggttaaaattgcattataggaggttcaaaagctccagactttaaagaatgtgcaatgtggtgagagtttaggtgtgtctcatccttcccttgaactttacttgttttttgggtttttaagttttctgaagataatgagttggaatataagttttcctagccaagtacataatgttgttacctcaccattaacagatggtttaatactattctatagccaagtgtaactatacttgtctacatctatttttgactcatttttctttattttttctttttggtcaattttaatcttgtaatttatgtgcataaagaacttatatttttaaaattatggttttaaatttgttgtatttcttaacttccaggaatcttcctcatcacaagttgagtggatcaattt

SEQ ID NO: 12771 - DNA, 1337 bp, Vitis vinifera
  Intron number 9 from transcript GSVIVT01029247001 (locus G SVIVG01029247001) derived from phytozome v7.0 (chr-ID chr1 1; pos 18062203 to 18063539)
tgagcttcttctcagttgttatagccttgtttaaggtaaatgcatttagtttttcatttcagaattgtgggcaattaaggtttattaggaagggtggctatcattgttaactacgaaaagcattgggtagtttcgtgaacttttctgaactgggcttaagtttacagattagtaaatacataaaacatttatgcatcaatgactccactcttacatgaaatgggcataactatcagtttgttgctaatattgtcttagcataaaagtctcagaacctttggtggtggtggtggtgtgaggggaggtgttggggaatgtttcggttggtgtttttgggctagtgaaggaaagggtaccaaaatcagacaaaaccatactggaatgctacctactgagcatcccacaaaatagcaaggtggattgctgataagagaaatgtgaggccatgtttcccacagcctagaatgtgcttgtttggaaatctattgtgctcatctgaacgaaccgtaaccacctgaaatcagacctgttgatgtgccgtccttatgtagtggtgtccccacatagtattattatttcttcaaaaagttaaagccctgcttggaaactggttttttattagttaaaaaagcatgttttacaaaattttaactgaagacagatttttgagaatttattctaaaacttggtggttttttagaacaaattggagtgttttgggttgttttggtagagtgttctaagaaacagttaaaaacatggagaataagtttggagcttttacatgatagataaatgtgcagtgtctttgcaaagaataatctgagaaaactgttattacatttgaattattaaatataattttattcttgaaaactggttttaagaactgttttcaaaaacttatttttgagaacaacttttgaaaacattgtcaaacaggcttcaagcttccttgactgcttttgggagtatgtttagcaaagttgtatgaaattctattcccaatagaaaaagaaaaaggtggggctaagaaataacaagagcagtatgccttttcttggtaaattgatgaatcctaaagcttgaatgccactggagattagaaaagcaaaagaaaacattttttggcatgattttcgagaattaattatagagaagcgaaaaggaaagagaaaatgtcttaactttttatttatttttgtcttttttttattctttcgttgtttggttttggtccaatagatactgcatttctgaattaacaggagcaattcggttttaactcttggttgtttgtaggatatacctgatattgaaggggacaggatattcgg

SEQ ID NO: 12772 - DNA, 3218 bp, Vitis vinifera
  Intron number 10 from transcript GSVIVT01025512001 (locus GSVIVG01025512001) derived from phytozome v7.0 (chr-ID chr 6; pos 129692 to 132909 reverse strand)
tgatcttatttcctgaccaagttcatctcttccaagtaatcctaattttaggatgacttcaatctaaatatgaaattgagtaaacaactaacatcttatccccacaagttattaaaaatattagttgaactcacagtttgttcttattgtattttcaacagggatatgtgatctcctcaaacagaaaatccggattttttatgccagtgctcttctaggattgggatttgagaacttgggatttgaacatgaattcttctatggtttaatgcagtgaagtagatccaagttgatgacaataggttattgagctttccaaagtaactttactgtctatttactgcatgtattatcaggaggtgatgttaaacctttacattaaggtgatattaaacatatacactgactcactgtagtgatccttctgtcttatttactaggaaacaggctccaaattaataaaaggaacatgcacatatgtgacagtttgtgagcccatcaagttatttccttgaagcactatgccaacatatacagctgggactctctgtttgatggacaaagagaatcaaaggtttctggatgagtgtaaaacaaactgagcagccacagagactgtataaatattaatttatttttttatctctatgcctgtatccagtaggctcctttagattaaagtacaatatataaaaatctgagggatattgagaacaatttcactttttgtttaaacaattgctaagtgcaatattagatgtcatgaagactgaagtctataaacaaatgcagtgccaaattcagccaccctacactacaagagactacaagatggggttgttaagcattctgtttttacaactgctttagaaagactttattagatacaaacataaatacacccttatttcagaaaaggcttcctaaaatttgacaatttagatctccatgcacaattcaaataacatttgatgacctgaaaactcccaaggcttgagaacttgtttacaagtttgttttaccaagcaagaaagaaacattatttcctcatctcaggagactccacataattcgatcagcctgctgccctatggatatagttttttgccaatactatatgttttcatgttttcagaatttgctgagaaaaatctgattcctccaagcgctttatgacatatataatgaaggccaacaaatacataatgccacacccctaatagaattgggttcctgaagatatggaagtgttatgataactgtcaattatcaaggaacatgtcatggatctcttcccgtgatgctatttcattctcaacaggctctttaattcaagaaagatggattttagtggcccaagcacctatctcgtcagagaaaaaactaatcaacatcaagaattttatcatagacaatattctaagtgaactttggccgaaagaacaaatatcaaaactgcagaatgaggaatcaggaaagggaagaaagcaatatctgcatataaagggtaagcagcagcttcttaagtaaaccaattttcaattaacatacctggtcaagacaaagtagcataaatgcagcaaatcttgacaaaacaccaagacatcaggtgaagcccatttctagatcttatcgtttgaactaaacaaacattgaatttgttcaactgtcctgtcaacagaccttagttcacttgaaagacacatcttcaacataaattggattcacttggctttcgacataaagtgcattttagttttttttttcttggggattgcagcagctccatcaattcatattgcattcttgtctgaatggttcttgagactgttctacacaagatcatgcacagatagaagtagaaatatatcctgattccttattggattcaagcatctcaacatgttccttttgtacatacatagctatcttcgactgcaagtttatcttgcatagaacttcaaatatcctctcagactgagggtgcaatttgtcacctgcaacaaattcatgaactctgttatttacttcaatgcaactcccacctggcatcttcttaacacctgtgtccctcatcactttcctcaccatcccagcttcattccacttactttgggtggcatatatattagataaaagtgtatagtttccactattatggggctccaccttgatcaaatgctgtaaagcttgtttcccaagttcagcatctccatggattcttgcagcagcaagaagggacccccatataggagcattggcttcaaatggcatccccctaactagttcctgtgcctcttggaggaaaccagcacgcccaagtaaatcaatcatacagccataatgttgaatttttggtttaatcccatactttgtgcccatgcatttgaaataccagcggcccatttctaccaatccaacatggcaacaagcagaaaggatggcaacaaaagtgatttcatttggcttaatcctattcctttccatgcaagagaacatttcaagggcttctcttccaagcccatgtaaagccagcccatcaatcatcgaagtccaagtaatgacgcttttatgctccatgttcttgaaaacttctagggccttctctattttaccacattttgcatacatgtctatgagggcattgttaagaggaacaattttagacaatccatgtttatcaatatagttatggatccactcccccaactcgagagcacccaaatgagcacaagctgagagtgcggccaacattgcaatttcatcgggctccacttcctcaagttgcatcctcctaaacattgtgattgcctcattgggtctgtccatctgagcataccctgcaattacagcagtccaagaaatgacattcctctcaggcatacgctcaaacaagtgtcgcgcattgtcaacatcacccaccttggcatagccagctaccattgcattccagaatgccacatctctaaaacacactccgtcaaacagctgccgagcctcagaaacgcatccacaggacgaatacatttgaatgagagcggtcaccacgtgaatgtcactgactagcccagtcccaatagcctgacagtgaatctgcctcccaacatggattgccaatagacgaacaacggccttcagcacaaagggtaaagagtaggtgtcgaatcgcaaatcggaggctagaattctgttgtagagaagaatagcctctgtggcaa

SEQ ID NO: 12773 - DNA, 1783 bp, Vitis vinifera
  Intron number 2 from transcript GSVIVT01008001001 (locus G SVIVG01008001001) derived from phytozome v7.0 (chr-ID chr1 7; pos 6790739 to 6792521 reverse strand)
tggaggtaccttgtgcttgcagtggcagtttgaaggtaatttcccctaataatattttgatttttgatactgaaattctagaatgcttgggtttttaatactgagatgttggaatgtgttggattatgtttctccttgcaggttgtatgcttactgcatttgttatttgtgtttcgaaaaatttagatgcttttgtttgtgttaggttagttatgtacggtgttggtgcattttataattcattgttgtcaatattgccaatcacccaacgttttattctatagtgttgttttttatcctgtttgggaccttgggttggctctaattttaactcagaaatagttttgtgggcatgaagaaatacatgacttgcatggtgggtttgtccttcttgcttataggaaaatcaaggaagatttctgcatgatgtatgtgtatgtgtatgtttctagtgtgttctgagtgtgttccctttttatggcaaaataaatgtagtaacagggggaaagaggtttgttattggtaagaatatgtgggaaagagtggtccatttctatgttgaaaggagtctgttgtaaattctttcttctgtggtgatttgtgatctcaaatggtcagcagtgcaatttcctgtggatatataagcaatggtgtacctttgttgttttccttctctttttggatttagccttgtatacaatgtgtgtactttggttgtgctccctttcttttttcggtttagtggattttattttatcagaatgtatgaaaatcaacatttcagtattatgacgttacatgattgatatatttggtggtggatgctatcaaggccgttacttatccgaagtactagtgggatgggtaatatattaactgtgttgcgtcatgtacatattgaattctcatatgtgttaggatgggtctatttctgctgttcctgttgcctattctcccaatagtgtggaactagatatcctgcttaaatggaatgggtaagcaaactacaaactgaaaataggaccaatatgttttttggttatatttacaaaaaattagcataatgcacttgtgattcatgatgcaatgaatttactgtttctgattagaaaagaaaaaaatagcttcttgtttttacacggaatgttctgcctggcacatagtgcctagcattttgtgtttataggtccttgcacctcaagggtgccatctgcctttatgtacactactaattgcttgtccactttttatttgtatagcaagtttgtttctatggttttctctataatttgactgtattaattttacttgacaagtgattctggggaaattttggtttgttcttcttcaggccagtcaccttatagctcacatgttagaattattgcttaaaaatcacaatttagaactttttcctacccacatgcattaatgattagctttttgtgttattagttactacaatcgatgaagtaggttgcttacagagttctcatctgtgtgtatctggtgaccgggaatgcctaagaggcatggtcaccctgttttaaagccctttacccacctaccccccgccctacattgaaaaaaatgagggaaaatattttaccatcatcactagtgtctccaattcattttatgtgcctcaactgcacacacccccatacccacacccacccactcacagacatgggaaaaatgtttaatgtgttggttctttggaattatttcctagactagtaccaaactgacacctctgtctcatccagtttgctcataggaa

SEQ ID NO: 12774 - DNA, 4756 bp, Vitis vinifera
  Intron number 1 from transcript GSVIVT01021841001 (locus G SVIVG01021841001) derived from phytozome v7.0 (chr-ID chr1 4; pos 6624829 to 6629584 reverse strand)
agggtgacctgtgctttatcttctacacctcacccactccttattgattatcttcttttttctcttttttgttttaacaaagtttcttcatgggattgtcggaggctatgccatttctcactacctttcccccttctccctttgcatccatccctcatctttgtgcttgaaaaaaaaatggtgatcatcgaagttatcttttatcctttgttgatcatctctcttacattaattcaaatggtcatccctttccaacaattgatactttctttatggctatgcaaaatcttttctttgttagcatattccttttttaaatattcctcatcaattcttctcacaacaacctctttttccatgattaaattatctcttttccaatttaaatgtttcattctagtagcccaaggattcttctaagtgagttttgatgataacaaataatggttagcatactaatgaattaaaatcgagatgagttttaggtagtaatcaagaaaatcaagtgagaaattaacttaatcatcaaaggattcaaggaaagcaagatcaagtgtgcatgaaaactaactcaatgtaagatgaatactttggtgtactaaggattttaacatatgcatgcatcattttttatactcggttcaaggtttaaagttcatattttatcaaactcgagtatatcttctaaaaccttaggcaaatttattttatcttgacctactaaggtaccttaaggtgacgactaggtgttagaagggttttagaatgaaatctataggtttttacttgaattttgttcaactggttgacaaaacgtttgattgccctttcttggtcgagcattagttagggggtgcacaaaattttctctttcttccaacagagttgcttcctggtcaagaaaaatgatttcccaagcaacgggtaccccattccaagtcgagatttggttgaaccctaacagtcacctatagagtattaaatgtccaatgactagttaatcactcgatcgagctcgatcaaaaaatgcctattggtgtattttttggtgtttgaggttccaaaactataaataaagaattcttatttatttattatgatgagaacacttgcacttaattttctacctacttgtttctctatttgaaatctttcatctctttttggcgcattaaaatatgttgcttgcaaatatttcctaacgcactcttgttgctcatcttagtttctttgtacttgttcattaattgtgctaagttaaatgacttaaactctcatttattgaagtaaggatgaagtgttaaagttttaagttaggaataaacttgaagagtggtttgtagctctcattggagttgatgaatccaattgtaagaacttgaaagctttgttggaagctttacattagtggaaccctcactctaaaggatcttggagagagtggataaaggtgagaattgtcaaaccactataaaccccatgtttgcaatctttctaattcttatctctttatatttattgttcttttatttattgattaagagtagctttggaaaaaagtttttaaacccaaatctcctctcctttcttaggtgttttagcataattaaattagcctttgtttcacgcattctctagtttagttcaacttttaaattatcggtttgtctagtttttgcttcaaatcttcatcgtcatcaatcccattttcagagccttttatactcattttttcccatagcatgggtgacccatgctttatcttctacaccttgtccactccttattgctcttcttccttctcatctttcctgctttgacaaattttcttcatgggattgtcagagcctatgtcatttattgttgccactccctcttctctctacattcaacccttgtctttgtgcttgaaaaatatcataattatcgaggttatctcttattcttggttgatcacctctcttgcattaatccaaattgtcatctctttccattgattgatactttctttgaggctatgcaaaatcttttctttattagcataatccatttttagatattcatcatcaattcttctcacaataatctcttttttcattattaaattctctttttctcgattgaaatattccattctctagttcagttcaacttctaaattactagtctgattggttttttttttttttttcaaatgttcattctcaatcaaatgttcagtttttttttttgtcaccatccaacctttcatattcaaatttccagtgtctaatgttttccacttttataaactttaccattaatctctattttattttcttttaggatcaatgcgatttcccaaaaaaaaaaaaaaaaaaaaaaaacgtcatagattcgctttatttacgtcgcattatcctttactaagactttcaacaatttttctttaagcaaaaagataagttaattttcatacatagatagttgtcataaggcctccatcttctcctctcttagacccaagactctctcatctttatctttcaccatcttctccaattcttcaaccctcttctcgagttgggtcatggccttcatcagatttgacttctcacctttcaattgcatgtattaggttattgtttgtccatttgaaccacttcctcaaatatgacagttcctttggagattttggaaatgcacttaagaaagatctcattgctcttgcataaccttttggccactaatatcactacaagaaatcatatgtttggacacaatttttttgtcataaacaaaatttcatcttaacttatgctaggaaaagctaatgtccggataaaaaacctcccattgttatagaaagagagcaaggtttatatagactaccttgagtacaaaaatatgataaagtgaattttaaaattttatatttttgacttattctttatattttttagaaaataaatatttttattcttaaataattttatcataaaattatcttcttttaaataaaaatatatcttttaaaacaaatgggataaatttttaatcaaataagtaaataaaaaaaatttaaataggtagtcaaagtgtttttttttcactacaaatagtaatatgtatataaaataatttttattattattttattattattatttttgtatatctttttttttcttttattattgataaaaattataggtttttaagtacatttagtaacatatttttaacattaaattacacccaaaaatagtaagtgaattttaaaattttatcttttttattccatgtttatcctttatataaaataaatatttttattttaaaatttctcttcttataaataaaaaagacacattttgaaacaaaaacagataaaatttttatctataatttatcaattgataaaaaattataaataggttgtcaattcactataaatggtaataaaaaaatacttaaattaatatcataatagttatatccaactttggacaagttttattttcaaaattatatgcatccaaaatatggtaataattttcatactttccaaacttatatttaaaaataaactaccaaacttcggtaatcttgtacatataaatatgatattaatttccaacaaggttttttgttttttttttttcggaataaaatactaccataatgcaaacactccaaatatgaaaaaaaaaacttctcatacatgaaaagtcttttttttttttttttcactagtaatggacatcttttttactaatacattttcaattctaagaaattatatcatgtttaattgaggaaaatacttacaattcaaaaagaagatattcaagaggatactacttctctcactaatttgaaaataatgcacaaagtattaggctatgtttggttcctaaaaaatttaagggaaaatgtaagagaaagaaaatgcaaaggaaaagtagaaaaaaagaaaaagtgaagaaaaataaaaaatagattaaaagtccataaattatttttatttggtatttttaactcattttatttattttaacttattgatataaaaattaaataatttaaaaatatataaatttttaaataattttaattatgtttgattttttttaatatttttcataagataaccaaatatgaaaaaataattttcttttacatttttttttctttagtattttccggaaccaaacacaacctcaggaaaatgatcaaactatataatgaaaatttgtatataaatgttcattaccatcatcaacgagaatgttatgcaatattttctgtatcttgccttttttctatattaatctctataaaataatcattttatttgataatagaagaaatccatggtaaccaataagaacccgtattgtccatagactttgcatgggtttgacgtaggcttattgatggataggtttgggttgttcttagcttgaaccccctaaacaagaagcctaggaggtgggtagagctagaatcgcaaatttaaagttgtggttttaatacatgttgaaaaaccgtgttttcaaattgcgatttctaatttgtatcataacgatatatatggtgtttagttgcaccataacattttccaaaagaatgtaggataagatcgatgacaaagattttccgaaacaaggtcactattttttgtttgcgagtgtgaaaacttttctgattgttttcaatcgtccgtgctaaatttggagggctaaagaagaagacaagagtggttgtggagaca

SEQ ID NO: 12775 - DNA, 14379 bp, Vitis vinifera
  Intron number 4 from transcript GSVIVT01026590001 (locus G SVIVG01026590001) derived from phytozome v7.0 (chr-ID chr4 ; pos 21285085 to 21299463)
acgtggtagaaaagcccagcacaacagatttagacgtgagtcttttcccttttacttcttttctttgcttttcttattcccatttatttatgtaatatttcttgttaaaggaagttagccacatggatagagatgtccaaggttgagggaagagtgagaggcgagaaggattaaagagattgagatttttttttttttaataggtatatttttgtcctcattgggacttgaacttggaacctcccacaaagcctctccaaccctttaccacttgagtcaggcctcaagggcaagggttaaagagattgatacaaggttgtttgaggtccttaggtgagaatttagagaggagcttctaaattagacaattttccaatgttttaaaaactggaccgaatcggccggtccaaccggttcaactgtcgaccggtcacatttttggtccggtttattccattaaatcgtttgggtattggaccggtcacgaaccgcctaaaccaacggtcggaccggtgccccagtggaaccagacggttctaaacgaaccgaacggttcaagttaccccctcattttgtaagtatggaagggttccattggatttaaatgtttttggctaaagcccatgctggccctatcttattatgacaaagcccacacccaacccaactattttgtgggctgagtcttgagcccacaagacgatgtgatacctttggcctcaatgaggatggcttttataggcatcctttgcatcttcattccttgcagaatctgatgtgggattgctaactaatatcaatgaaaaaaatataacaaatctccatcaagagggcttgaaccttggacctcaggttttgtaatcaacctaggacaccactcgactacatgcattttgttatctaatatgccaaacaaaacaatatatattagattttaaaatttttttaatattaaataaaaataatataatttttttaaaaattataaaattagtttaaattttcatttttaatatattcacatttaaatattatacatatttcatttaataaaatttaaaatattaatatgatttaatttgataatatcaatgatataaaataatattattgatttttaatttattcatatatattttaaattttttataattatttttaattttaataatatataaattacatatttatgacgtcaccggttcgaccgcggtttgaccaccggcctaaccaatgaaccgtgaaccggtaacttttccggtttgatgactgatccgattctgaaaacattacaattttttatcaaaagaaatctattccttgtatgctaacccccttaggcctatttatagagatttctagatgaaagctagcttagttaaaaagttgggagccaataagatagcaccacatgggcttgtggtggctgttttgaaaaaatgaaaaaagaaaaaagaaaaattgataacatggtgaaccatttcatgtagagctcccttccctctcaatatagcagaaataggctcaccaatattaggcattcctgtcttagcaaacctctaattcaaaccactaaaaaagactcaaatcatcccatatacaatcaatggtaggatggtcctatcccatcgctgatttgtctcaattccatgttggattcctagaaagctactcctaattttgataggtgtgaatcgttcacatttgaatattatgctactgggtatatttgagggaagtgtaggagattcgtttggtgtaaccaaaacatacttcaacaacattcctctttgagggatatagacattatcgttgatataccctcttaataggatgggaagggttgagcggaggcaataagtgaaggtatggcctcttgttgcctaacttggtatgttgaaggtgaccactatttcagccacattatgaagtagatgccttccattttgagataggtaggagagcttcattaggcaaccaaaggtgggtagacacatctcattaatatttgaagagttcaagcatctaagggcttggcaatggcactagtttgctaccatgtcatatcctaagaagggtaccaagagattgtggttgttggggccatgtggagatggaataatatatggtgctctattaataacattgcatagctttatgccattaataacatggcttctaggggtacatatacgtcaacacctagtgcacatttctaggcttatttcaataagattatatatcataccacttatgtagtggggttatgacctagtttggaatggtcacataccagaactgaactgatcttggtcaattcttgatatgctatcctagaaacaaaccaaactaagccaaactgagactaacttggttcagtcatcaagacaggagaggattttaaggaaacgtaaaaaaatgagagttctaccaactgaagtatagtggatgagttaacaacaatttgaggtgttgggtcaagtccagtcaactcatttaactctacctagtatgagttactgaaggaagaatgggaattcattacatgggaggttattaaagagggcttgcttcttggaatggatctgctaaacacaaatacttcttttgtgatctcacgaaacttaaacccatggggtttgactatctaggctgatttgagaggttactcaatagagcaagaaagctgtcaccttcacaacaggttggttgtttaatcaaaggccttaatgagaatattcacatcaatgtccaaacttctccactaaataatcttacagttccagtttggtttgccctccaccatgaagcaaagtatcaaactcaatctatcatactcgaaatcaaactctgttgccaaaaaaaaaaatggaacatggagattactaatatacttgataaacatcatgttccaaatggtaatcaaaatctattgccaattaataggttaaccaggatagattcagacagaaaaaataaaggattttgtttcaattgtaatgagaagtttagtcctgcttgcaggtgtaaaaagctatttataattgaaaattgttggttagatgaagaagaaaacgaatatgaatgtgatagaggctaggatgtggtaggtgtaagttgagatttcctaaaatagccattgaggacaagcacttctagagaggagagaggttatgactttatgagatgtagcttcatactaggatagaaatttaattcttacttagttattgacatgtttttgaagagatggaggtgatttagttttttatggaccagtttcttattttttaggtgggttaatttcttatttatttgggaacattatttgtttgttagctatgaccttacaaataaatcttcttaaatgaaataaagtgtatttatattagttttattttttagaggaaggttcctttagagcacctaacacatgcatgcacacatgcatacatattagttttattatttagaggaaggtttccataaagcacttaatacatacatacatacaactagaaaaaaagaccaaagcttagtggagagaccatacataggctagttccaaggccaaattatcaacacgggaaagaggcggtgtcgatggcaggttcaattatggagttatccctcccattttacatcatataaattatgattcatatagagtatgatttgctgagcttttcttatactaagtattcaacattgcattgatgaatatgttgaaccaagtcctatgacactgcttcaattcatgttgagaagttgggatgaaaggctacatgaataacacatgtaagtcaaagatagtatgatttgataaaatggcgcctaaccttgacaaggtccaaggggtgaactgctaagttgagatcagtaagtgggcttggaatttcacttgtctgattattccatgtttaggagtgggagtcttttctaaagagtgaagctcctcattcaaagaggatcgggttttccattaggaattgtggataagctaatcagatccagagtttttaacaaagcatgattataggtatcaagcctctattagtatccttttaccattctatataaatgggctattctatttgtacaaatatggtagaggggctcatttaatccttgtttgtccattagtttctaattcttctctttagcatgaggtagagtagctcattatattttttaatataacaaaataaggttaaggcatggagcggtaaacttgtccgagctgcatacaagaagaaaaaaaaatagtggttactttaagggaaccttcctctaaaaaagcctaaaggaaacaaacttctcattgcatttatagagtgaagactgtagctaacaaatagataatatctgttaatgaataagaaactaatccactaaaaatttggaaattaattgataaagaagtcaatattttctatctcttctaaaacacagcaataaccaaataagaattaaatctacccctagtatgaagtaacatgctataaagtcataacatctatcccttttgaaaattgttcttgtccttatgagctgtttcggggaatcttagcccataccttcttttgccacattctcatgtctaacgtgttcatattcaattttctttatctagccaacaacctctaatatgaaataagttgtcacatctgtgaatgggactgaacttcttattaccattgaagttgttaaagagaaacaggagagaacataacaaatttgaacaaaggctatatattgaacaaagcttttgactctagaatttaaacaaggaaacaatgaatttgacaaggaaacaaattaatccaaacaagattttaggatctacataatgttatacaaccatacaatacttacgtttggaatctatattacatgataaacaacctaatcccaattcttccaacactccccctcaagttggtgcaaagatgttttgcattcccaacttttcaatcatttgttgaaatgctaaatttgcgagtcctttagtgagaacattggctagctaattaatagtacatataacacttgaccattgtctagcttttcctttataaaatgtttgtcaacctccacatgcttagttcggtcgtgatggattgggttgtgaggaatgttgatggtagtttattgtcacagtacaatatcttgggttcttgaaatttgatcttaagatccctaaatatgatctcaatctaaagaagttcacaaataccttgttctatagctctaaattctatttctgtacttgaatggtctactattgattgtttcttacttcttcaattgataagattaactcctaagaaagtacaatatctagtatttgatcgtctatttataatagatttgacctagtctacattcgtgtaagcctttaacttcaactctttacccttctttaacaagacaccctcactaggaactgccttcaaatatctcaaaatccaatatacagcttctaagtggggtttaagtggagcaatacatgaattgatttaccacactcacgacatatgcaatgtttggtcttgtgtgtgacaagtgaagtagctttcacatcattcgttggtagttgccttgttcaatcagttggcctttagatttctctcctagtttataaatctattcaataggtgtcttgattggtttacacccacgcatacctatctccttaactaaatcttgtatatacttcctttgagaatcaataatccttggtttgatctagccacctcaattccaaggaaatattgaagcttgcccaagtccattatttcaaattccttagctaagcatgattccggccccataatcccttcttggttatctctagtgacaacaatatcatcaacatacacaattaaggttgcaattttccctagatgagagtgtttgataaatagtgtgttatctcaccttggctttgatgataacctctcctcaccatagttttcataaatcttccaaaccatgtctgaggagattgttttagaccatatggtgattttttgagtttacataccttatttgcccatgattccttttcatatcttggaggaatatccatgtataatccctcttctagatctccatggaggaaagcattttttccatcaaattgttataagagccaatcaaaatttgttgccaatgaaagtagaatcctaatggtgtttatcttggctattgaagcatagcaaccaatcttgctttgttcctctccaaggtgttatcaactttgtatataatatcaaggatccacttacaccccgctgttttttttttccctttcggtagctccactctctcccaagttttatttttatttttttcccaaggctctcatttcctcatccatggccttccgccatggctttaacctaatagcttcttggatggtataacgaacatcatgagaggatatttgagtgagaaaggcttgaaactaatgtgaaagatgataaaacgacacaaattgagagatagggtgatgggtgcaagacctaactcctttcctaatggcaataggcaaattcaaatcatcattagtatcaaaagcttgagtttcattttcattacctgtcacaaaggtcaaatattggaacatccaaggtgattgtagatttcttcctcctggaatgcacattggagataggagttttcggcctctcattcttggtcttcagagactctgtagtacttgagatctgagttggttcaatggactcaatggatggattttgactatgggaatcatgacttaaagattcattgggaccaaaatttgtacttttaccaaaagtggaaccaggagcaccagaattagaaccagaaccagtacctgaatgttgtacttgtaccagtactagtaccaggaatggaaccaggactagaaccagtaccagtgccagcaccaaaatgtatatttgtaccagtactagtaccagtagcagtactagaatgtgttcttgtactagactcggaatcaggatcagtatttctacctaaatcagaagtagcattggcatggggctataaaccacacttgatataggttaaggctaattagattcccactatttatcttctcctagtttgctctccccatgaagataggtgtcccaaaagtatgcttgattttccttaaaggtgacatacatagtgacatttttcctttcgttggaggatgacaacatttgtatcccttttgagtggatgaatagtccaaaaaacaaacacctcatagctctaggatcaaatttcccccgcaagtgactatgaatatgcacataacaaacacaagcaaataattttaaggtagagatccaaacccttggaaattaggaaacaaagttgagagtttactcatgggagattggtattcaagaacatgagatgacgttcggtttatcaaatatgcagctgaagaatagcttccccccaataaaacttttgggactttcatttggaaaaaaaagtgatctagcaacattaagaagatgttggtttttcctttctgcaacaatcccatgttgttaaggtgtgtcaacacaagatgaatgatgaagaatgcccaccttttgaagatagatgatgagatcttgattgaagtattctttgctgatcttagtgtatgtctttttgccccaaataaagtgttaatgaatttatggaaggtagggaaaatggatcaaacctcaaatttagatttcattagggatgtccaagtagtttgagtactatcatctataaaggtgacaaaccatctagaaccaaaagctttagtaactcaagagggaccccaaacatcggaatatatgaaactactgaatatatcaaactaattggtgataaaatgtttagattctttaaaggaaaatatacataattatgttaagccaactcacaaatttcacaatggaaattttatatatcaatgttttcaaacaaggaggaaaacaaatttttcagtatagaaaatagaggatgtcctaagcatctatgccatagccaaacttgatctttcctctctcgataggtagtagaaacaaagccttgagaccctagactcttttttcttttataagtaagcaaaggtgttgtattaataagaggcgctaaaatagcagcccaagatatacaagaacaagaaactcacccccttatagctgtaaccaaaaaagaaaactatctaaataagatgtacaaaaaacaaccccctccccctcatttggaacccacccaatcaatgaaatttattagcatcaaaggaccagtttttatagacaatttggtcttcgaccaaagtgaaaaaacaaaagaagctttcagcctttgcaaggatagcaccccatcttcaaaggcaactctgtttctagccttccaaactgaccaaaacaagcacagaaggcgcactttccacactattctaccctttttgcctacccaagctccatcccagcccaaaaaggtctctattactgaggaagggaagacccaacacacaccgaataggataaaaaatagtttccacacctccctcgtctttttataatggacgagaagatggttaatagactcacaaacttggcacaaaaagcatctatttgctaaagcccatccttttgtctgaatttggtctaaagttaagagcctttccccatgaagcttcccatgcaaagaaactaatttttgtctgcacccaagagttccaaatcatcttcattggaaagcacactgatgaatccagctcttagactttgtaaagggactttaccgaaaagttgccgtctttggacagtagccacctcaacctatcctcctcatccaacatcacttattccccacacaaacgccccaacaagttctccacctcatctagctcccaatcattgaaacgcctagtgaaacgagggttccaactccccccctcctttccccactggctgaaacagtccataaatcactcacccatgcctctttagctgcagctaacgcaaataaggaagggaaagaaacacacaacggtgaagttccacaccacttgcccttccaaaagctcaccctttgaccattactcaccacaaaataaattctagatctaacaaggtgccaagtttcctaattgctttccacaaccctacttcatgcccctctctaacctcatgggagcaccacccacttcgatcctccccatatttcccacttataacctagttccaaaaggcctctcttttatttgcaaaatgtcacgtccattttccaaggagagccttgttgagcgtagcaaggctcttaacccccagcccccctttacatttatctaaacacactgtcgaccacctcactaaatgaggtttttgctcaagagccccacctcccatagaaagtccctctgaatcttctccaatctcattctaaccactattggcagatgaaggatggacataaaataagtaggaaggctggataaggaactatgaatcaatgtaattctccctcccttagagatatattgctgcttccacatggccaaccttttgtggaatctttcctcaatgccatcccaaactgccaccaagttaaaagaagcccccaatggcatccccaagtaagtagacgacaaacaacccaccttgcagcccagctcacaagccaaatcatccacgttctctacccttctcattgggatcagctcacttttatccaaataaagcttcaaaccagagattgcctcaaaccacatcaacaaccagcacaaaaacatcatttgctcctcctgcacctcacaaaaatcagtgtcatcagcaaacagcagataagagacctcaaccctttccctacctctcccttgcacttgacaagccagtaaaaaaccaccacaaattgctctcttcaagagacagctgagggcctccattgctatcacaaaaaggtaaggtgagagcgggtctccctaccttagacccctagactcttatttaccagatatgcttccaagtagtagagcccatcttttaacttagcatgcccaatcatattcctagtaacaaagttagagaaaattgcaaatagtggaagtgaatacaacagaacaatttaagtctttagtgagttttcctatggaaaacaaattgtaagatagatttggagtatgaaggataaattttaaagataaaagtagtgatatttaaacacttccttttccaactataggagaaaaagatctatcagccactttgattttttgttttcctgaacaaggagactatgtagagaaaatttttgaggagctagtcatatggtctaaagcacctgaatcaatgatctatatagccatttttagaggcaactaacacctgatctcattgagtggggatgcacgtgaaaaatgcgggtccacactgaggtttggttctcaaactggtttaacaacttttttagcctctcaatgttgctttggcttaacattgtagccttttgagtatcctctacagcagctgtttagtgggcttctccagattttgttatgtggtgtcgtcctttgtttctaactcacttcaagttttgaggtttcccatgcaatttccagcacatctctatagtgtcttggtttgtggcaataatcacaccataatttattcctgtccaccatcttcttgccttcttccttgtattttccagcgatagaagggggggttagagactgccaaagctgaattttcagctataggatttttagaatttccaaccatgagtttcttacgactctcttcccctcaaatatgggcaaatggttcatccatagatggaaatggttctctacctaatactttaccactcgcctgatcaaactctggattaagaactaccaaaaattggaatattctctccctttccattatgtctttcaatttctttgtatcagtggctgatttcatctccaggttctggtataaatctagctccagaaacaatttgagggtgttgtagtactctgtaacgttacagttgaggacccttgcttggtgttaataatatgtcatttcaactcaaatatttgagaagaaacacctaccttggagtaggcttttgacattgcttctcaaatgtctttggcaataggtgagagcaaataggttttactgattgttgcattgagtggagcaaccatgacatcaccatggaattctctgtatccctaacttcatatttcaggtcatcctctgctagtggttttgcagtcccaatcacatactcatctttcccttgctcttcaaggatatctttgctgattgtgaccactctatgaagtttctctttcatcttgggagtggtgatttgaaaagttaggttttcattgtggatggaagcttggttgaaggatgacatattgattgaacggacttagatgtttcaaacgtaaaggataaaggtagatcaaattgcagtgtgaaataggttaaaaaaaaccttctcaaacagtgctgaaggtgacagcaataaaggctgttagggtgagatgtgatggcaatgaaggccaggccaccagaagaataatttttttttttaaaaaaaaaaacaaatctcccagaaacccttgatgggctctgatatcatgctgtagttagagagagaaataggagagaataattttgttcttatttcttctaaggtcttgatacaaggctatatatttaacaaaacttttgactctagaatctaaacaatgaaacaacgaatttaacaagattaatcctagcaaaattttacaagaatacaatacttaactatagaaactatattacatggtcaacgacctaatcccaaatcttccaacagaggcaaagtcccttattctctgtttcccttcactgaagagtcaacttttgaattgataacaatttttgactgctgctttgaacatgatctttattgggcaaatgagtcacctccatgtttgttgctttttgtaaaagaggttgattttgagtatgatactttgtttaatagaggttggccaactcaactgcagttgtaaggttatttggtcaagaagctcaggtgttggccactaataaaagaatcaaccttttgtgaaggtgagaatttcccttctctctattgagtaaccactcaaacaggccttaatagtcatgaatatatatatatatatatatatatttattcgctcttttcttcttggtttaacttcatgagatcacaaagaattcttctgattcaatgggttcatattgagtatgtcaactctccttaagaacttcccatgtaacaaatccccttttttcttttgggcatcaccttttaaatggtaggctgcttagtatacctgctcatcgataggcatgtgctgaaatttaaaaaactactcaacctgttagatcctacttgctgggtctttgtttttgttggaataaggaaaatctaacttggcaaaactaaggtggaattgagtgagttgagttgacttaacctgatccaaagttgctattaactcgacttgtcatatttcagttggtagaaattagggcctgccacaggatagttaaagccagagctcatggctgaggatatttctggcatttcccttagaatccttgcatgcctctactctaaggatcccacttcaacctctagttgagtaatatgttgatcttccatttctgactcaagctttgatactaagttgttatgtgcaacttggacaagttgaccgccttgtgctttttgggcatattttgttcaaattggaaaaaataaaattgaacagaaagaaagaggagttgcttaagggaaccttccttcaaataagactaatggaaataatcttctctaatgcttcatttcatttaggaagatttacttattagactgtagttaacaaacagataatatctacccctgggatgaagtaaaatcggataaagtcataacagatgataacacatttgaaaagggtgggtggagggggcacatgcattttttaactgccaatagtgggaggtacttccaaatggataatatggccatatgcatgcatgaaccagatttctgcaaggactactttgcatgtatattgaactccttgttagattcagttttccctcaccttgaaggaatccttgtccttttggttctttttctttttgctattagcaataaattgactcctgtttctcatcagaaaatgccaccatgcataactgttttaccacatggtggtagtcctgcttccatcagataggtcatgatagcaaatcacaaagtcaaaccttgcaaatgttgcttatcctgagtaatttgatgtattactcattgatggtgtggctaatgttgaattttgtcttataaatatatataatcctgtggttctgacctccataacccgattaccattttagttttaaattatttcattcaagtaatattctcctgctcaagtaatgtatccacaagtctgcaatttttttgtttaatttctcagctaattctgtgtatccacaagtctgccaatcatctcaagtcttatccacttttgtcgaagttatcttaattaatccttttctttcagtagtgccattcaataaattcctacttataaaaacaggagagaattactcgatacgagagtgccatcaaggtctgtctccaacacatcctactcgttcagtgacaaaactgagcatttggctttaagaaaaatatatattgggtttaaacaattaatttattctatgtatcttaataaatgtacttgtgacaagaataagacaatatataaacaagaaaataagagtaattgaaagataaaccttgaagtgagaggatcggaacatccgcttgtcattgattcatccttcaatcagtgtatcagtttgtgttctgagaaaatattattttggttgatctctcaagaaagggccgcaaattgtgattctcaatttcattatctcacttggaatctatgatctataaatacagtgctgagaaccctaaatgtcacaataactgtgtactccgtttatttaaagaagtcgcatatccagttgaacactgcctaagccatgaaatatcagctggggtttccaattccttaaatttaaaatctgctctgttaacattgtatacactgaaaaataaaagattccaaagatgaaacttgatcactacatgcacaatttatcttaatcatccaacctttaccctttttaaatttttaaatatttatattatttttcatttttatatgtttgccctacatgagtgtattgacaaatttgatgtttccctttactacatgttcaggtaagtttagaaaagattatttctctgaag

SEQ ID NO: 12776 - DNA, 12682 bp, Vitis vinifera
  Intron number 2 from transcript GSVIVT01008374001 (locus G SVIVG01008374001) derived from phytozome v7.0 (chr-ID chr1 7; pos 2707272 to 2719953 reverse strand)
ggctcagaaatttatcaacattccaatcatcagtgaaagaataccaacaaaggaagggctgataaactactttcagggagggcaaaacagcagacttactactggaaaatgatcagtgattctaccggttctgagtttgacctaagtttatattacaggaataaatggagggtaggtgtttatctgtatctgtcttttaaggaataaaatccaaaacaatcacagcctctgggaaaataaataaacactgatagcagcatcatagactactaacattctgcttcactgccacaggcttctatactagtctgtttgcttcaggggcaaaatagaatattttgagagtgaatctccataaatctcgtgtgtttctcaattaaaaccatttctttttctaatattgacaccttcaaactcttcttttaaaaatggattattgtttttattttatgcaagtggttcaccaaaaatagattattgggctccataatgtcaaggggccatccttttcatttcatgatgtccatttattatagtgtcgtatggtcgcacacggacccttcactttatagatttttgaagtgggtgtcattcaacctgaataaccaaagcaaaaaaaggaaacaaaaaaaaaagaaagatgtttagaaacacaaaaaaaacttggaaaaggtatgctaaagatggtgagaagtaaatgtgttatatttgctaataccaaagaagttggtgattgaatttaaagtaagaatgacaaaatttaataagtttcatcgatatgatttgaacccatcacatttttcatgagattggatttaaattaaatttattattgtaaaataaggacaaatacaatacaaatcaaagtagtaaaaatgaaatatatcttactttaatatctaatagggaagaagaaatcagataagagagttgtgagaatgaaagaaagagagagagaatgaggagaagaacttttctttctttttctcgggatgtctattacaggagacgggaagcccttttataggtttttcaaatggcttccattaatatccccattaatgaatattaatgaaactcataaataacattaatggtttccattaatgagtattaatgaaaatcataaataatacttaattaacattaatgtggtgacattcattactacaattataacactcccccttggatgtccaccacattgaaagaatatgtctcattaaaaccttgctagtaaaaaaccctgtaggaaaaacctagcgaaggaaaaagagtacaatattcttttcttggtatattaggactgtcttgttaaaaaccttgctagtaaaacccagtaggacaaaacctagacgaaggaaaaaagagtacagtacactaacacccttttacaagcatactctatcaaaaagttcttctttttctattcaatatttttcttattctgttaccacaaccctacgagtatatatcaaaatatattttctattctaagctatacagattttgctcctataattaagctaacctgtgaaggaaagaaatctcattttctataattactctaatttccttttactatacaactcatgccaacactccccctcaagttgatgcatacggatccttcatgcacaacttgatcagtgagttgtggaaatctttgcttgacacggctttggtgagtatatctgcaagctggtcctcagatttgacaaatggaaaccggattgtattagtctctaggttatatttgatgaagtgtcgatcaacctctacatgctttgttcgatcgtgttgaaccggattgtgtgaaatgtctatagttgctttattgtcacaaaagagattcatttcagacttgggagcaaaaccgatctcggttagtagtcttttcagccaaagaagctcacacaaacccttggccatcccacgaaattctacctctgcactagagagtgccaccaccttttgtttcttacttctccatgtcacaaggtttccacctacaaatgtgaaataccctgatgtcgacttcctatcagagatgttcccagcccaatctgcgtctgtatagccatcaactctcacatgatcattcttagaaaacatgagcccttttcctggagaagacttcaagtaccttagtatccgaattacagcctccatgtgttcttcacttggacaatgcataaattgacttactacactcacagcatacgcaatatctggacgagtatgagagagataaatgagtttgccaactaactgttgatatcttcctttgccagttggtttctaatttggatatatcccaagtttatgattttggacaattgaggtatccactagtttgcactccaacaatccaacttcagataataaatctagaacatattttctttgggataaaaatatgccttgggttgatctggcaacctctatcccaaggaaatacttgagcccacctagattcttcatttcgaattcactagccaattgcccttagagccatgagatttcttcaatatcatctcctgtaatgaccatatcatcgacatagacaataagagctgtgacttttccttgctgtttttttagaaacaaagtgtggtctgcattgctctgttggaaaccatatttcttcattgccaggctgaatcgcccgaaccatgctcatggcgattgttttaacccatacaaggctcgttgcaacttacacacctcattagttcccgtggtcactaagtagcctggagggatgtccatataaacttcttcttcaagcccgccatgaaggaaagcatttttcacatcaaactgatgcagtggccaatttaaatttgctgcaagagatatcaacactctaacagtatttaatttagctactggtgagaaagtatcttgatagtctataccatatgtttgagtatacccttttgccacgagtcttgccttgtatctttctatagatccgtcagctttgtgtttaatggaaaacacccacttgcaccccactgttttttttccttccggtaatggcactagattccatgtcttgttcttcattagtgcctccatttcatctttgattgcctgagtccacttcgggtctcccaaggcttcctccacccttgttggaacgtgacacccggaaatgttatgcacaaatgtcttgagaggttcattcaacttctttgtggacacataattggcgataggatatcttgatcttcttccttcaatgtctggtgagtagcggcttggaggcttgccacgattgtgcctgttaggtaacacataaccaataggaggtgccaagatatttgtgttaaaagagcttacctcaggatcattctcaggagttgggttttcgggtactgtagagggggaagtaacatgtgcttcgtgatcatcttcatgatgttcagtagctagagaaatgtgttctggttgcctcggttccacatgtatttcagatacgctcggccaatttaattttgtccaattctgctcttcctgtctagtctcaccctgaagaggagaattgggtggaaaaaatgtttcgatttccacgaaggtgacatccatagtaatatacatgcgaccagaagtgagatcatagcatctatatcctttttggtgaaaagcatagcccaaaaataagcagcaacgtgcacaggggtctaacttagtctgctggtttttatggagatggacatatgctacgcacccaaatacacgtggaggaagcatcaagattgcaggcacagctgtatagcccgagagggcttgtaagggagtttggaagtccaacaccttagaaggcagtcaattgagcaaatgaactgcagtggtaacggcgtcagcccaaaatcgagtaggagcatgggcaccaactaagagagcacgagcggtttcaagaacatgtctgttttttctctcaacaatgccattttgttgaggcgtttgggggcatgaagtctcatgaataataccatgttgttgaaagtattcacgaaattggtgattgacatattcaccaccattatccgatcgaagaacctgaaccttagcagaaaattgtgtttgcaccatagcatgaaatgatttaaaaactcctaatacttcatctttatgtttgagcaaataaagccaagtcatgcgggtacaatcatcaacaaacaacataaaccatttgaagtcgttgacagtagtaattggggaaagtccccacacatccgagtggatcaaagcaaatggagtatcctttttattcaaatgtaatggaaaagaagccctatgacttttggccaatatgcaagtttcacattgaaaatcaaaatttttcaactgagaaaacaaatccggaaacaaatgtttcatataggtgaaggacgaatgtcctaaccgacggtgccaaagccaaagttcattttctttgacatcaagagtatgttgcgtgtgatgtgttcggcccacactcaggtcttccatatagtagagtccccccctcttagtaccacgcccaataatctccttcgttagaatgtcctagagaagacagaaagtaggatatattagcacaatgcagttcagatcagaggtcacttggctcacggagagaagcttatgagataaggatggaacaaacaaagtattatgcagctgcaacttaggggataaggtcacagtgcccgcgccagtgacagaggagataacaccattagcattggcgatattggtacgtcgtggtagggaagtcatggtgaaatccatagcagtaaacgtcatatggtcagttgcgccagaatccaatagccatgcaccacggtaaccatcattagtcgaagtataacaagcataaccacagttacctgagttcggcattgtcatctgtggtatgaatgagagttaaggttcggcagtagccataactgctgtagcagagtcttcatccttagtgcccgcgtcacgacccttcttagcccgaagatcattccaccaatctggatacccatgcagtttaaaacaggtgtcacgagtgtgcttcgaattgccacaatgagagcacttcaagccctctgaagatgtacgagacttaggcatgccattgtgcatagtaggaggttggatagaggaaccaagtttgagtcctttggttgcgagaacagcaccataaaccgcatctgcattgccagtgatcataacagattgacggagagcttcgcggcggacatgggcatacgcttgctccacagtagggaatggacgaagctgcaacacgtcgccccgaatcttatctagtcgatcatccaggccatccaagaaaacatacactctgtcttcttgaagaagaagattatagttgtgaatatcaactgcacactccataggattagggcggcggaagtcaatctcatgccacaacccttggaggtcattgtagtatttctcaagggagcctccagtctgtttaagctgcgtcacacgacgtcgaagatcatagacctgagacgagtcactaccatcaaagtaagtggtagcaatggaatcccacaccaacttagctgtaggaaaccgaatgaaattccctatcaaagagggatccatggagttgatcaaccaacctttgacaatggcgttgtcagtgcgccattttcgaaatgttggatccgtcgaaggtggttgtggtatatcaccattgatatatcccaacttgtctttgccagagatatacatctcgacaacttgggaccagagagcatagttggttccatccaatttgatgccaatcagagcagtagagggttcggtggtcagagttggtggttggactttggtaagagcttcaatcatcttagccgtgatttcagagaagagggaatcggattgagacacagcaagctggggttctgcatcggacgacatggtgggcgaggtaagagatgcaatgtttaagataggtgggtaccagggttaggctctgataccatgtcaaaaagttcttctttttctattcaatatttttcttattctattaccacaaccctacgagtatatatcagaatatattttctattctaagctatacagattttgctcctataattaagctaacctgtgaaggaaagaaatctcattttctataattactctaatttccttttactatacaactcacgccaacatactccccctcatgtcgatatccttgagttaacgcattccaattctgtgtattaacttcttgaatgttgaggttggcaatgattttgtgaataaatctgctagattattacttgagtgtatttgttgcacatcaatttcaccactcttctggagttcatgtgtataaaataattttggtgaaatgtgtttatttctatctcttttaatataaccccctgttatttgtgcaatgcatgcagtattatcttcaaataatattatcgggttacctttgataaaggagagtccacatgattcccgaatatgctggatcataaatcttaaccatatacattcacgacttgcttcatgaattgccagtatttctaaatgatttgatgatgtggtcaccattatttgtttgacagattcccatgaaatagcagtaccattgtaattaaacacataccctgtttgtgacctgcctttatgtggatctgaaagatatcctgcatctgcatatccaagcaattgttgctttaattcccttgagtaaaataaacccatatcagtagttccacgaagataacgcaatatatgtttgacaccattccaatgtcttcgagttggagtggaactatatcttgccaataaattaacagaaaaagcgatgtatggacatgtacaattggcaagatacataagtgcaccaataacactaagatatggtacttcaggaccaagtaactcttcatccttttcgcaaggacgaaataaatcctttttcacatcaagtgatcggacaaccactggagaacttaaaggatgtgttttatccatataaaaacgcttcaaaactttcttaatgtatgttgattgatgtactaaaactccatttggaaaatgctctatctgcgagccgagacaaaattttgtttttccaagatctttcatctcaaattcctttttcaagtaatttgttgttcttgtgagcttttcaggagttccaacaagattgaagtcatcaacatacactgcaataattgcaaatccggtttctgatttcttaatgaagatgcatgggcatatagggttattcatatacccttcttttagcaagtattcgctaagacgattgtaccacatgcgtccagattgttttaatccatacaatgatcgttgtaacttgattgagtacatgctataaggcgttgtattatttgcttcagacaatttaaatcctttagtgattttcatgtatatatcattatccatggatccgtataaatatgttgtaataatatccatgagacgcatatccagtccttctgagactgtcaaactaattaagaaacgaaatgtgattgcgtccatgacgggagaatatgtttcctcataatcaataccaggtctctgcaagaaaccttgtgctactaatcgcgttttatatcttatgatctcattattttcattgcgttttcgtacaaatacccatttgtacccaacaggctttacatcttcaagtgtttggactacaagtccaaaaacttctcgttttgttaactctgcctgtatagcttctttccattttggccaatcatttctatgtcgacattcttccacatttcgtggttcgggatcttcatcatttcttatgacttcagaggccacttggaaagcaaaaatattgttaataataatattatttcaatctcatttttctcccgtatgtacataacttactgagatctcacaattttcaggtacctgtgcctctttaggggtttcttgttcaatatgtgcctcttcgggggtttcttgttcaatatgtgcctcttcaggggctttctgcattatttgtgcctcttctagggctatagatttatcaattttaaactgatcagtcattttaatggtctcttctagagtgctaagtttttcttgggttctcctcttccgaggagttacatcctttgagctgacaggtttaccacgcttcaggcgtatcttagattcatttgttaactgtcctacagggacatcaatccgtgatggagtatttgcagccgggatatgtgactttgtcactttctttatatcaatgaatgcatctggtaattgatttgcaagattttgcaaatgaatgatcctttgaacttctagttcacattgatttgtacgaggatcaagatgggtcatagtagatgtcttccaactaatttcttgtcgttcttcaggaatcgacttttttccccctaatgatgggaaaacactctcattaaaatgataatccgcaaagcgagctgtaaaaacatcgtctgtcaaatgttcaagatatcttatgatagatggagaatcaaaacctacataaaccccaagtcttcgttggggacccattttagtgcgttgtgtaggtgcaattggtacatatactgcacaaccaaagattcgtaagtgagagatatttggttgttttccaagcacaagttgtgaatgggagtattcatggtaagttgtaggtcgaatacagactaaagctgcagcatgcataatagcatgtccccaggcgaaagtaggtaatttggttttcattagtaatggtcgagctattaattggagacgtttgatgaaggattttgctaaaccattttgggtatgagtatgagcaacaggatgctcaatatttatccctactgacatgcaatagtcaatgaatgtttgagaagtaaattcgccagcattatcaagacgtattgtctcaattggataatctggaaattgtgctcgtaatctgattatttgtgcaaggagtctagcaaaggctatgttacgtgtagaaaggagacaaatatgtgaccacctagtagaagcatctattaagatcataaaataacggaatggaccacatggtggatggacaggcccacatatgtccccatgtattctttctaaaaagattggtgactcatttatgactttagtaaaagatggtctgattatcaatttaccttgtgagcaggcagcacatgagtattcattgggcgaaagaatcttctggttctttagtggatgcccatgtgagtgttcaattattcgacgcatcattgaagaccctgggtgacctagcctatcatgccaaaggacaaaaaattttgggtcgttgaacttctggttcacgacaacatatgattcaataggctttatagttgtatgatacaacccagaggagaaagctgagagtttttccattataagcttctggccagatataatggaagtaatgtaaatatattctacattatcttcattcatagtttcaatatgatatccatttctgcggatatctttaaaactgagcaaatttcttctggatttgctagaatataacgcgtcatttatatggaatctagttccatttggcaacgttatgtttgctcttccagagccttcaactaagtttgtaataccaaatatggtacttacattagcttttattaatgtcaattcgaggaaatatattttatctcgaagaattgtgtgtgtggtcgcacagtctgcgagacatacatcatcctcattcatcttgagaccaaataacacatggatttcagatataacaaaaaaaaacaaggcatgatgtaaataacaaagtaaatcagatgtaaatataagacataataatatattatttcatatataaagtaacatcaatcaatgttaattttctcatcgtttatcaaatggtctattttttcattgagacctccaaagaaatcaatgtcatagtaggttaggtccaatccatcaccatcggtaaagttcatctctatctcttttcctttagcttttattgatgcttggtaaaggtcgaccaaatgtttgggtgtacaacaggtacgcgaccaatgccccttcataccacacctataacaattattctcatggttcttaggaggtttatcttataaacgcttcccattttcttgtattgtctcagtattgttccacttctggtggtgcaatgagactttcattttttgagaattattactataagaaccatggtatcgggaatttcttccacgaccacgtcctcatcctcgtccacgtccacgagtttgggacgatattgcattcacttcagggaatggttcagatccagttggacgagactggtgatttctcatcaaaagctcattattttgttcagcaacaagaagacatgatattaattcagaatattttgtaaatctacgctctcgatattgctgctgcaggagcacattcgaggcatcaaacgtagtaaaagttttctctaacatgtcttcctctgtgatttttttctccacacggctttaattgagagctgattttgaaaagtgtagagttgtattcactaacagttttaaaatcttgcaaccttaggtgcatccaatcatatcgagcttttgggagaatcacagttttctggtggtcatatctttccttcaaattactccatagagtaaaagggtcatttactgtaagatactcattttttaaaccttcatagaggtgatggcgaaagaaaatcaatgcttttgcgcgatcctacagggatgcttgatttccttatttgatcgtagctccaaggttcattgcatcaagatgtaattcagcatcaaggatccaagatagatagttctttcccgaaatgtcaagtgccacaaattcgagttttgtgatattcgacattatcaaataacttcatatatataacaaaacaatattattagaattagttataataacttgatagcattggtttaactttgattataaacaaaatcaaataatttgtttataacttttaataatatgtaacaaaacaaatcaacaataatataaatatgtaaaattttattctatataaataacttcaagtttaagatacgagaattaccttcagagcaatttgtgctgataacgtgttgtaaaataaggacaaatacaatgcaaatcaaagtaatagaaatgaaatatatcttactttgatatataatagggaagaagaaatcatagaagaaagttgagagaatgaaagaaagagagagagaatgaggggaagaacttttctttctttttctcgggatgtctattacaagagacggaaagccctttttataggtttttcaaatggcttctgattactactcgaaaaccacatattttagatactaactttcatgagtttcacaccttttgagtagtaattatgcctaatatgcccaagttatacattgctacccttgcaagagatactaatggttctttgttgagttttggagatattttaaggtgatttttgaagcatggagtgacaaatggaaaatggaatggaggaagatacataatgtagatgaagaggaagaggaaatgcacttggaccaagctttggagcttaattgaaggtggtggagatggattaaacatgaagaaatgagagaaattgtaaagaggagccggaatagcatgattttcgatttcgcatgaccatgtgaaattttcgcacagtcatgcgaaatgaaacagagagggtgtggctgcagcacataaggaaattgtgaagaagtgatttcgcatgaccatgcgaaattttctcacagtcatgcgaaacgctccataagaacgaaattgaagctgatggattctccgcttcgcaccatcatgcgagattgctaggggctcgtgcgaaaatgcattctctccagattccttgatgaagaagcatccggaagacctctaaaatgttgccaagtgtcctttttaccttggcctataaatagaaacgggatttactcatttgaaaacttttgattcattttctaattgtaagacttttcatacttcttctctctataaaattcttcacgttccttcagtttctcttattttctcggtagccaaacatgtcttgtgagatcaaatctccaagcatgagtggctaaatctcgtttttctcgaaggagggaggatctagaggcaagatctatggtgaattagagaattaagcttgaattgcaaaggtaatttgattcaattgattgattaattgaaatttagggatttttctcttcaaattgtcttggatgattactacaatgcaaattaggtagattcatcaaattcttaatgctagatttgatgagattgaatagttgcattgtgtgaatcattggaagataatttaagataaattgaatttatgattcaaattgatctcttggattagattacctaatttgaagagaaattagatctagacctaaagctaaatcaaaaatcggtttagatgaaaatttaggttttcaatctaacttgatgaaaattagatcttaacacctattcaccatggtaattgctctctagaaaatcctaactccgagaatctcacatcttattaattttcttctctttttcacttcattttcaattcaatttgaatacattgctatcttgagattttatc

SEQ ID NO: 12777 - DNA, 8277 bp, Vitis vinifera
  Intron number 12 from transcript GSVIVT01023271001 (locus GSVIVG01023271001) derived from phytozome v7.0 (chr-ID chr 12; pos 20298383 to 20306659)
cacgcaaccaaggagaatagcggtcagtatgatattttctacacaaatctccaaagtataagcgacctcatagtttcaattgtgttgtctacaacactgagttcatttgttaaaatttatggttgactactatgactcacaggataacatattatgttttccattagtttatgcaattccttttgagctcctgtcttattgtttattgttttgaaaggatatatagctaatggatgtgttcataatcatataatagagttggtaaagtctctgatgtggagaatgattgcaagaaacgggaaaattgggtttgtttgggatatttttgtattgaagttattttaaggatattttactaattaattagtcactaatagttagaatggtaatatgtttcttttgataaggaattagaaatatattgattaaacggaacaaaatttataagctgaagaggcatgagagttctttccctaagaggaaaaaaaaaagtataaaaagcaggcttagggggtttaacttttaagtgctgaatatacagaagcaaaaagcacattggtattatatgaaatttgagtgctgaattcagttaatctttttgataattaaaagaagaaagtctacgattttatgttgtacaaattttccttatatctatatcatgcattcttttaacatgctttatgtatatatcagtaagtaccagtggactctttatggattgggctcctcagcatgacattacatgcactaggttctgatatttactgggtttgccacataagcatttaaaaacaatctagacatagtatttgcacagaggttgaatctgtactgttcagtttcattgattatgttttagatactatttgacaaagtatatatttctcttcccatctgcatgtaagaattagaaaatgataacaaagatagtttaattgttctcataattgaaaaaaaggttgatttagaaatcttagatttatagtaagagatcagttgcttttcttggacattgaggtacaccaattaggtagtggattggctggctaagaaaggagctttgttgcacttgactctttctagggtcttgtggatttgctactttgaggattacaaaggcctttgtttctgctctagtatatttggtgtttgaggttcatttcattatgggtttgttggaactgttttgtttttttgtgataattttctattattttcctggaagaatagctaatccttgttccatcctttaatttcttatataattcagtgaaatgtttatctttttattaacaaaaagtttgattaggaatcagaatacccaaataagcaaactcaaaattaaacacatatttgtatgaggctattggaggattagaaattgacatgaggagaactcaatttattatacttatgtgcaaatagtgcacatgcttttaaagtttcatttaatatgggctctagagcatacagtaaattgagtattgtatataatcctttttccattttttttatttttttatatcagaaacaaacttcatttgccaatcaattgataaatacaagagggtaagcaatctttcaaaaaagtacaaaggttggtaaaaagtaaccaagtaaccacaactctaaaaaactagcctaacgtcacaaaaaaaccatcatatatatatttgagaagaaaatattggacactaaaggggtaggagatctccaacaaaggaggccccacgctttgaaccttgttcgactaactgatttgtgacttggttagttgagcaaggaatccaagagaaagagcaacccaattcatttgtaatatctatgattttgcggatccaattgtcaaacttcatgaacctctttcctcatgagtcatctaagatattacagtggtagaatctccctctacaattagattggatagggataaagcttttgcctacgtcaaaccctccaatacctatttgtctaggatcacccaatgaacatctgtcaaagtttaacttaacccctactggaagggtaaccggtcaatcattgccttcttaacttgtttgattaagaaacactcttccaatctagcattgaaaaataaaaaggaatatctacaaaaagcttgtttactaaggcccatagggaagacaaaagaaaattgagtcccaaatggtgttcactgaactccatttatcctcgaaaatccttacattcctcttcaaccaaatcaaagataagacaatcacctaccaaagaatcttcccttttggcatgcttccaaagcccttgaaaggaaatacccaacatctgtgctatgcctctaagaggaacccaatcaagattgacaatgaagaaataaatggttgattgattcattattcttcaagcacataacacaatggtccgtacttttttttttgataagttacacaatggtccgtacttagcactttgttgggactcctcaaatgaggccaatcattggtattaaccttattttccacaagtcaagcaaaaggcttaacctttgatggagcttttgagttctagattaacttagtaggagcaaaaaaggtaataataggagaatgaggaaagactaagagagctttatagaaggaactcatagagaaacatcctgaaagggttaatgaccagattctttcatctaaaaaggaaggtgatatgtatacatgaactaaggatgaaagaaggctagttagttgctcaatctctagatcaaaaaggtttcgatgaaaattgaaattccaagatggactaatagagggccaatctacaacttaggaaacaagcatatttgaagtccttgtagctcagaggatttagaaattgaaaacagagtagacaattgcctaatcaaatatcttcattgttgaactatcaattttcctaaaagcttaagcttgtaggattttagttaacaatttatatcatgctctttaacaccctttctcacatgcaaggatgaaaatatcggttttgatggatatatcgataacccgattttatggatatgtcaggaaatattggtgagaccaaaattgattaaaactcattaaaatattggaaaacctctaaaaacatatataagaagtatatatatatatatatatattaaaattgatttatgaagaaattgataaattgatatatgaatgatataatttatagcattttataattataggtggtatttgaaaatgcatttaatattaaaatgataagttatatattttataatatatatatatatatatatatatatatatacatacacacacacacacactttttataatatatgtgtaattattatgtttgtatttaattcatgatttttgtgctttcaataataaattaaatcaatatatttattaaaactttatttcaattttttatttttgaaatatatattaaatttaagtgtaaatataaaatatattaaatgtagaccaatctattaatgaaaagcaggtttaccgtcgtggtgtgggtgttgattttgaaacatagagaaacaagttcgagtccccatgttgcaaaataagaattttgctaacattgaccgttgggtgagtcgtggattgacctagtgataaattgagtaagtcctaatatttcgttgaaatgtcgatagaatcatgataaatgtggaataatcccgaaatattggggcttggatatagctctccacattttgtatcaggatccatcaatactcgatatatcgaggatatgttgacgatatatcctaacttttttaaccttactcacatgcgactccatacacacacatggacacatgcctgttggcaaacaactataattagcctctttgggcttacacaataaatatgggaaataaatattgggtgagactcgaacacatgacctcctgtcaaacgaggttttgatgccaggttgaaccaccgttttttgttaaagcttaagcttgttggaaaattggtagtcctacaatgtatatcatgctctttaacatcctcaaatatgactttttatgccatctgtgaccaagcattgagtgaaattagaaaattcgttggagacttgagaaatgactttccaaagataacaatgcgaccacttaatcatggtgttggcatcctagccattggagtgtaatccataaatacatagaatgaccccatgttaaaaagtgttgctctctcgagggaaacctccacaaccacttatctagaagggctttattccttaaggagatcttcctttaccctaatccttctctttttagtttgtatacaagatcccacttaattaggtgatctcttttcctttacctaaagcctgacaagagaaagtctctctgtaatttcttaagcttggaagtcaccttcattgacaccttaaaaatcaaaaggaaataaggggttataagtgataagcaagattgcataagggttattctacttcccaaggacaagaaagttttcttccaaccatctaactcacaagaaatcctatgcaacattgaatcccaaaaagcaactttaaaatttccctttaaagggaggcctaaataggaaatgcgctaataagagactttacatgaagctaagtcatgatcttacattaatccctgctaaagagcttttttttaggttaatcttaaagcttgaaatgcatcctaataccaataagataagcataaagttttgcaactcctcacagttagcctttaagaaaaaaaactgaatcatttgcaaactgaaggagtgaggcccttgtcgcatccttccctaccaaaatgcctttccaaaaaaccattctcttcagctttgacaataatcctactcaaaacatctacaacaatggtgaagagaaaggggaaaatgggtcctcttgttttaaatctctagttgctttaacccattctttggcacacttgttcactagaatggcaaaattagcttaaaataaacactcatgaatccacaacctccactttggactaaagccttttctctctttagcatgatccaagaaattccaattcaagtggtcataagccttttcaaaagttatcttgaagataactcatgattttttctaaacgtcttctttcatttgcctcttcatttgccactaagattgcatttagcatttgcttgcccttaacaaaagcaccttgagatgggttttcttagggaaattttttataatagctccttcaaaagaagctttaatgccacccttttgttctgatcctaagaaaggtggagtagaggatatgaaggattttagacccattggtttagtatcaaggttatgtaagcttttggcaaaggtctttgaaaacaaacttaaagaggtagtgaaaaaagtggtgtctaactacgaacatgcgcttatggcggatagacaaactttggatgcagttctcatggaaaatgaggctattgactcgaggatgaagagcaacctcaacaatataatttgtaaaatggatattgagaagacatataatcatattaattaagacttttttatggtggttttggaaagatgggttttgggtagagatggaataaacggtgtatttctacaacaaaattctcagtgcttgtaaatggaactttagtcaatttcttccaaagttcccgagggatgcggtaaggagatcattgtctccttatatattcattttgaccatggaagggctaagtcaaattgtgtggagggcaagggaagggggtttcatcttgggatataatgtgggtggaaaagatggcaaaagacaagaaatgagtcacttgttgcatgttgatggcactcttgttatctatgacactagtaaaacaattgtaatatttgagttggtcagtcatatggtttgaggcaatatcaagctcaaaaattaatttagagaagaataagctcatttgttaagggtaatggcaatgcagaaatgttagttacttttttgggctatagggtggaacatctaccttctgcttatttaggctttttttttgggagccttgtttaaatcaacaaggctttgggacttgatggaggagagatttcaaaagaggctcacttcttgaaagaagcaatatttgttcagagggatagtcactttgattagaagtactctttctaatctcctaatttatttcacgtctctgtttgttatctcaaaaaaggtgagttgaaggttggagcagatttaaagagacttcctttggggcaggctagagcttgcaaaaaaactccatcttgttaagtgacctatagtttgcctggataaaaagagtggcaatcttggtattagaaatctctctactttgaacaaggcttttcttggcaagttgtgttggagattctcaattgagagaaaatctctatgaaagtgagttattactaaaaaatttggagaagaagaaagaggatggtgctcaaggggagtgagatggttatgagggtgggtttatggaaaacgattagaaaagagtggtactttatcaggggcagagttcgcttctctattagaaatgaaagaggggtcaaatttggaaagatagattgagtggtgattcatctttggaagaatcttttttgtctttgttctctttagccatagacaaagatgcatgaatagtggatgtgtgggagcagtatggggaaagtggttggtgaagccttctcttttctaggtcatgtttgagagcttgaaggagtgataaaccttttccaaaaaatctaagcttgcttagttaggaggatgatagtttggagtggaaggaatttaagggtggcaagttctccatcaaatctttctacatttcattggtctaagaaagaaatgagtctttctctgaagattcttgtgaacgtgggttttgttgtgtggaaagcattgtgggttggaattttgatgattgatcaacttaaaaggaagggatggagtatgtcgaacaagttatatatatgtgaaaaggaggaggaattggctaatcattttctccttcactgccctatagcaagtgtcccatagtagttgattttctctctatttgctgtgatttgggtgatgcattaatagtaagaggaattctatgagctgacatgattccttcatgggcaaaaagaggaaaaaagcttagaggtggctgctcttttgtttctgtttttgatgctgtggatggaaagaaatagaagggcctttgaagattcaaaacaaatagaacaagcaattaaactctcctttatgaatggtttttttttggaataggttagattgtatataaatgattgttccttttctctttcttgcgcttacttgttttttgatggcaaagatatacattgtgtttattttgttgcacctttggtttagttgcacctttggaaaggctctttcgttgtcggggaaggctcttttgtcgttggagacccacttcttcttcaaaactcttgttgatgcaccagctgtgaaccaaaattagggacggaatcccaaaattgtagcctgtaaaaagatctttcttcactggcacacttcttcgaaaccctagtctgtgtccagaggaagagagactggaactcgtccttcgccaatgcaagccaaaattgggatcaaaatcccttaactgagaagaggagaccttcgtgacctgcatctcttgtgaaacagacaaaatagggcctgatctatggattaggccctttctagctttgggtatttcgccagcccacttttggcccaatactggatatgggcttcctttcaagtttttatccttaccagccgaaccccctttttcagcagggttactcttgttctaactcctgtctgcaatgatacttattatttcttattttagccaattttttgttctcctattatttttttaaaaggaaacaacaatgaattatattgaagaaggaattaagaagtacaaaagaaggatgaggaatcctccgacaaaagctattttgttctcctattattgtagtcagtgattcctttttgagtttattatctttgtccaacctgttcccttttcaccctgaaaagcctttgagctgatgcaatatggtagcactgttgtggtgtgggttacaaggttcaatctttatttgtggtcattattatattactcactagttatttactgagaaattgtaatgaatccttctttacctacttggtaattggaactgggatcttgctgcattatatgcaggctatttctgtggctgaaagggttgctg

SEQ ID NO: 12778 - DNA, 7070 bp, Vitis vinifera
  Intron number 5 from transcript GSVIVT01023655001 (locus G SVIVG01023655001) derived from phytozome v7.0 (chr-ID chr1 1; pos 8603177 to 8610246)
aaaattctttgttagttctctcagattttgtgaaggtattatcacatatccatttaccagagccagtaacttcatattgaaaatttcatactaggtataggttattataactggacatgattaagtaaattttgaagtggtatcatgttttgtgcctcagtttctgagttttcatcaccctaggtgtttttagctctatttctccctctatttaaggggcttgggtctgcttaatctagcccaacctgggataaatactgggagggcaattttctctatgaataagggtcctttccaaagaatttggggacaggaatgttcacaccagtctctctctctctctctcactctcgtttcaagtggtattatgttgtaggcatgtagagttttcaccactctaggtgtatttagctctctctctctctaaatggcttatgtctgcttagtctacccaactaggtgaggaagggaagggaagggagtaaatgtcctttcccaacaattgaggggatcaagaatgttcacaccaattactcttctctctctctaaagggctctatggataaggccccttttcaaaaaaaattagggggccaagaatattcacctagttaagtgtaaatatgaatctctctctctctctctctctcaaggctttagtttggcttaattggggtaaggacaacgagggagattttctctgtattgttcaaacagcatcaggagccaagaatgtttcacaccaattaagtgtgaataggaatccctattttgatgaaaattcaaatgattgaagtagcatgcataagaacagatattgaaggataaggtgtaaaaccttcaattcaataattatgtattattggctctaagcatgaggaatgagggtaccttatattgctagttggttgcatagttaaaaatttatgatacatgatacgatacaacgatatgatatattttttaaggaaatcaatatatatcgtaatccgtatcttattttagagtgtatcttacgatatatatgcaataaacgatacgatacgtgatattacaatacaacaatacatacatctttaacttttttctctctatatattttttaaaatcaaattattattattttttttttgttaaaagaatttatcatgttaattgtttaaaatatactaaaagattaaaaattgatcataaaaaggagaaataggtcaaataatcctatatgaaaagttgcattcttcttgtcaaatgttatattagaagtcaaataagtttatttttgcaatgaatattagaaaattttcatttgaattgtttgaatgtttacaatggtgcggtaaagctattgtaagggaatcatttcctactttatttttttgttttcttgttaaggaacttctaagactagaagttggctattgtggaggcttttctttagtaaattcaagtagtggtgatgattaggggctatgaggataggttggtgtggaaagactcaaaggatgggaatttctatgtacacactttttaactctttggaaactagtctagagttttttttccccacaaaagaaatgtggagctcaagctcccctacaaaagtgtgttttctcatggaaggcagcttaggagaggatcttaacactggataatttaagaagaagaggaaggcatatatcaagctagtgttacatttgtagaaacaagaaagaaacagtcaaccatattctctattttagcatagcttgaaatttatgatagttgggttgtgcattttttgggccacttgggtgttgtgaaggtcagttagagagctgttgttggggtggcaagggaggttttttggaaatagaagaagtatagagaattacccctctttgtttgttttgcctatgatttatatcataaccgagttctatttttggtattggattacaactcgagaggagtcacctgcttcctcaggtggaactccaggttgagaagttactcagaatgcagccaagatattagtaggtttggtctcatattcagaagtataataagtcaatttgtaatctttgccacgattcaactttgatcgttatggacgctttaccaaggttgagtcctagacaagcagacctaattttcataaatctattttcttccctatgagttatagtctcaataagaatgatagttcttatcgtccatatgttatgaatatcctgtacaagcttctttcaaagcatatgggtttttggatgtagatgatgatatctataccttcaaggttatgaagcaattagtgcaagctttgaaatatatttttatccattccttgtttatgtagtctagaagttgcttagtagttgattgttcctctttgttttacttcatttattatatagggtcctggtaatgtttttgtctctcttttttgagccttttggcaccctttttatactcctgctatagcatgggtgtggcctgtttttgattgacgcatgttgatatatacttattttttgcttgcatctttacgtctgattaaaattgttataatgttctagtcctaagtgttaatatgttttttacactaagaatgatagaggtacttggaggttatgagttttcaagcaagctttgtgatgtttagatgacaatgaacgtatgaaaccaactgaacgaattggttaaggtaccccaatgtaagactgctgagaaaagtaatcatatatctttctccagtgttacaaggattgaatctggctagtgttgatacttcactgatttacaagcttgtggtctgactccaaatatttgggattttgagttaagttgttgagagaaggtttagatgatagaaggttgaaatgaggattgctcaaaatgttcgaatcagaaagtttccaggagaaattgatgaccatacaggcctccaactagatgtgatgaacttggggtggcataagatatttgtttgtgagatacaaaaagacaacatacaagatgtcactatgctgcaattataaatgcctgtatgatggggatgagcaccagttcactataaaacatcctatgtactaaagcttattccatttccaaggagtaattttattatacgttgtgcgaggtttaagtgggttcaaatgattggatgttcatgtcaaaaaggagcatggaataaaaggtgtttttctgtgtgccaacaaccattttggatcgaattcttgtcattgatcatcttgtgagactagggaagatcccactaggtggtgttgcatgtgtgaaagagcagaagagatcattctgactcatttgattatgtgatgcagattgtcactttggtccttcataaccttgacagcatccatttcagtctgtgagattagcatcagatgccattgtcatgtttggacacatctcaaatgttgactttagcaaaataagaaggaaaatattgtgtagttagtaaccatataaggtgtatgtttttgtggactcaaatttactcttagtctgcctcattaaaccttcctcttaagttgcccagttgagaaaaaggacttctgtgtcaatctcaccagcatgaagccaaactaagtttcgaaggccttattatttgccttggtttttgctcattcactgccaaagtttctagatatagcctataaatttgatgtttttattactagtatgactccgaaggtttgaagatattgctgagatttttctttgttcatttggaattctcttaatatttactatcttgttgaataacttagaccatggttggtaactgttttcgaaaacaatttttcattttttaggaaaaaaaaaacacgtttgattactagaaaacaaaaaactgttttttattcttaaaaataaaaaacagctttcacataatatcttttacttgttttcacttattttctaagaattgttttaaaaaataattatataaatatgaagaataattaaaaataaaacactatatataaaagttatttttaaaacaattaaaaaaacatagaaaacaatttaaaaacattttaaattttaaacgcacttttgttttttcaaaaatcgataaatagttttcaaaaattattctcaaaaactatttttcaaagctgtttttgaaaacgcttcctaaacggagtcttataatgtgttagacagtgatgctaaaaggtgtttttaaatttctaatacttgaaaatctttatctttcagatattaaaaatgttaaaaacacttcgtaaaatcactaccaagtatactcttagagtccatttggcagtgattctagaaaacgtttttaatctttctaaggttttaaattttttatcatttaagtgttagaaattttagaaacgttttctaaaatcattgtaaaatgcactcttggttattaagtagtagaccatctcttgtaactttgagatcttcaattgggatgccaccaaataccaaaaccttcttattctgttgttaagaaacgcctaccatttataactcctaaacattaatctcttatgggtgtcctaaaaacatcttgtgaaacaaagtcaactgcctttcatttactctcaccaaggtcctctacccaagcccaactcctcccaaccaccaccaccatagcccaaatccataaaaaaaaaaaaataaggtgtcatttgtttggtacttgctctttcctttttgttttttgtttttttttctctcaggccttaatttaacttaaacctagttatatttaatagtgtcatggattaatttgtttttttttaatattttatttctattaagtattaagttgtttgttttttatgttaaaaattagcatcttaaatgcattaaaaaaatattttttatattagacttattagttcttacatgaccaaaaatataatttcgaaaaatcttaaaataatagaattattataattataaaattataaaataaataattttcattatcatcctctcaaaaataaaaaataaaaatatcatgatgtttttgttggagaagttttagatggacattgcttgttaattttgttaagatactgatacaaagatgattccatagagcaaaaacctaaggtcctatttgttagctcttctcaaaaatagaaacctttttggagaaaaaaaaaatgtttgacaactaggaaaacagtacacaaagtttttttatttttaatatattttagttattttcatttattttattagaattgttttaaaaaataatgaaacaaatataaagaataattgaaaacgaaggattgcatataaaatttattttaaaaaaatatatatttagaaacataaaaaggaagttgaaaatatgtcaagtttttttaaaaaatattaaataattatttttttaaatgttttcaaaaactattttttcgagaattgttttagaaaacgttatcaggccagggcagtcaacaatacggtgagaatttttttttgtttaaaaaggggaaaaaagaagcaccccttccttctgcaaacaaacccaaaagcaaatctgatttcttcaccactctccgttttctcctcccccaaacgctctcttttctctcagaatctgtcctttttccctattgttctgtgagttttctctcaccccaagcatctctttactttctacagaaacctccagaaaaaccaaagacagaagacccctatcgtccgctttatctctctgaaaaaataagcctcagctacctacctcacagctgcccaaaaagatctgcattcttaatatttcttttgcaaaaaaaccttctcggatgctaaagaagaaccctaaaaggcagagagagagctgtcacagcattttctaaaaaaatcccacaactgcctagatcttttcttgtaaacacctccactgttttctctgaaaaaaacctcacagttgcccaagtccaagctcctcatttgaattttctctcaccaaacactcttacagttactctaaagagtggactgctctctgactgatttcctttttacccaaacccccctctttattccctctcttattttagcttttgttctccccaaacaccaccccttcatgacagcgtgcggcaatggcaatagtggaaaaaatggccagtgagcaaggagcagtgtgagggatggtcaagcgatccagaaatattaggtctagcgactttttttgaattttttgctttcaaacaaaaagtcacatattttggcttgcattcagttaaaagttatttgaaaataagttataagtcaaaaagaaaataaaaaagattaagatatgaattttgaaaataaattgcttttaacaataagttaaaaaagcaaaggataaaaactttctaaccaatgatggcttttataactttcattttggtatagcaaataccatttggaactttcaatgttgtaccattaccaaacgttgttaattataatcctttcacattgtatgatatgttaaacttcatttcaaaacaagtttcttttggtgatggattgttctttttaaggtatgtttggttcataggaataggtatggaaataggatgagaatggaggtgaatcacattaccatgtggaagagaaattaaaatctcaatgagagtgagattttgttttcattctaatgaatttttattcctattcccattttatgaaacacatgaatgagagcggaattgatttttcattttcattttctattctaacattcggaacaaaccttacggtgcattggaatatgaaaataggaaaggggatggagataaatctaataccataataatagattttttatttgtgttactattcttaataagtaatccaaactcatcatatgaatgagaaatgaaatgaaacttctattcacattccctgttctaatcttccaaacacgcccttagattcttggggttgcttccacttcttttatatgttgtgagtatcttggccttatgcttcctatgttatatatatacatatatttgtacaagttgtatataaaattttgtccacgttccttgcagatcctcggcaaccctgatttgaaa

SEQ ID NO: 12779 - DNA, 7534 bp, Vitis vinifera
  Intron number 3 from transcript GSVIVT01022990001 (locus G SVIVG01022990001) derived from phytozome v7.0 (chr-ID chr1 2; pos 17242599 to 17250132)
gacggctttatactccttgaaagagttgaatttaagtgactgcaacctactggaaggagcactacccagtgatcttagttccttatcttggttggagcgtttagatctgagtataaacagtttcatcaccgtgcctagcctcagtcgacttcctcaactcgaaaggctcatactggaacactgcaagagtcttcaatcattgccagagcttccatcaagtattatagaattattggccaacgattgcacatccctggaaaacatttcatatctatcaagtggatttgtattgaggaagttctgtgatttcaacttcgaattttgtaattgcttccgactaatggagaatgagcagagtgacactttggaagctatcctactcgcaattcggcgttttgcatcagtaacgaaatttatggatccaatggattattcttcgcttcgcacagtatgttattatttgtttgcgtatgctaagaattcttagaacataatttaatgtcgtgttaaataattgagacaatcccacaaataatcttggaatactaatcctagaatattatttctctacatgcatgccgctaactttttcatgattcagtttgcttcaaggattccgtatgatgctgttgttcctgggagtagcattccagagtggttcaccgatcagagcgtggggtgttcagtaactgtagagctgcctccgcattggtatactaccaggttgataggattggctgtttgtgctgttttccacccaaacatcagcaagggtaagttcggccgttctgcatactttagtatgaatgaatctgtcggcttctctatcgacaacacggcttccatgcatttttcaaaagctgagcacatctggtttgggtatcgatccctttttggagtggttttcagccggagcatcgatcacctggaggtttcattttctgaatccattcgtgccggcgaagtggtgaaaaagtgtggggttcgtctgatctttgagcaagatcttccatttggccgggaggagatgaaccatgtgagcttgaggaaatctggtccaaattttttcattccttaatttattaaaataaacatattaaagcaataatttttgtaattgctgaaatgttatgctacatatttttaaccattaaatatcttggtaaagttgttttaagtgaatacgtacctttttcataatcaatgattctaatgaataaaaacttattaatttattttataaactactcttaaatgttatattttaattatttttagttaaatacatacaaattctaataaaaacatgttttttcattttttttaaaatgtagaaaaaataatactttcttttgatttactttattgaagagtccaccaaaagtctttagtgaaacataaaaagaattcattttaagttgaatcatttcattcaatttaatgaaaaatacgttaatttcttcagatatctcaacatgaagaaagtgaaggaagttattataggtggagactcagatatccgaggtaatcacttgcttttaatatgtttttaggtctttttactactccattagattaagatatgaacaaaattttgatttcctctttcatttaaactgttttgaactatttctttttcttctttagtgtgaacattgtccatgatcatttcttgaagtatattcaagatttgatgctcacctactccatctatgttctattcatagatgtcatcaccatcatactttgattagatgatttgattcctttcttcatattaaagatcaggaggtgttggtctagggtaataatttctagttttgttttgttgtttgaattgatggtttattctatttatttgagggtcttgatccttaaatatggatttcaacctatcaatatttaaatttgaagtttctgttataacatttacaacttttgtatttgtagaggaaggtttgaaggagaggtctagttgttctaaccgatttgttaatctattgattaattcattgttcgattttgaaaatttgattggttcacttcctacttccgcaagtttgaaaatcatacgatttttgtctaatttttgtttggaaattggggaagagtgattaaaggattatttggaagttctaagttgttttctattctatctaattgagaagagagagtacctaacatttgattagtaaatttatttttttgttgaaggtttttacagtattttaaggttactgttcttccttcattatcctttaatcctattattttgaaaggtgaagcgatgatttcaatatttcgagtttttatggttatttcctctaaaggaggatgattcgaaataacaattttgcatgacgtagttttccaaggttggttatctagaaaatatataatattagtgaattgaattttttaattttcatttttaaaaccaaattttaattgactccattctaatttatttatagttttctttatttcaataatgattttgaattcaataaataacatatcattttatttcattttgatgatcattgtggactaatattttttcaattattttatgtgattaaattcatatttgtattaattgaacatattttgtgtgctaagttgtgcctttttgtcttaactaaataaaaaacttgaaagaaattaaagaattatctagaggttgacgagagtttagttttaatagatatattatgctagagtaacagagttggacacacaagaaccaataaaaaaaactagaaaaaaaatgagaaaattaggaagagatgtaataaaatgaatatatatatatagggattaaaatggattaaaatattattttgtatattaaaagattaaaatatattttattttgtatagggagactatttaccattttttttagtataataaccaaaatagtcgtgtgagtgctgttagacgcagttggtctgttgatttaaagccccgcacgagtagtcgccaaacatggtggtttagctacgcccaaaattctaccgcgtgcaaagaattggatggaggcaaaagttagtgggaaagttggcattaaggtatgtagtggcagtctataaataatattatggacacggtggtattttttagaaacgagtagggcccaaccgccactacaaggaaaaaggtatatggtgacatttataacgagtcaccataaacatagggtgtcactacaacataatgtcaccttctccactgacaccatagagggtaccaattggtgacgtacttggaagtgacaccaaagtagataaatggtgacccattcggaagtgacaccatatatttctagtgatgatagggtgtcacattaaatacatcatctttgagttatgatgtcacattaaatgcatcacctttgagttatggtatcacatcattgtaaattattgtggaagatatgattggttttagttgttgatttttgtaatgcttatgaattaataagattaatctgtttatattttgtccataaatataacaatcatattatatttaactcatttttctgtaatgtttctggaataactcataatacattaatcatctaatgatatttgtatatcaaatgttcacaaaaggatagtacgtccaacatatcaaacccattaaaactaaaaaagaagggtgaatacataccaaaacatgattcagaaatgttaaagatcccaagattcatgtatacctccatttcataagcataaaaccggctaaccataaaatgacataaaagtcccatctaaaaatctaaacttctcagttgcaattaaagtaacgtttatgtcctataacgtatgacataagagttgcatttaaaaacccaaaatcttgttgccttcttcttcttttttattctccatttcaccctcccaagagtgtatacctgcatttcaaaatttaatgagttttagagatttttattgaagaaaataaacatggatcgatgttatcataaatgaacaaatctaagaactatttttttttttcaaatagaaacattatccaaagaataagcattactatacaatacctatggaaaaattcatgtagtagctaagggactcaccatgcatggtgatcatgatgcatcaacatgattcatgattagttgtagcacaaaagtagcccattctcctctaatttcatcgaattctacttgagaatatgtttttttttatcaccaaactgaaatcaaataagaaaataacattaaaatgcataacatttgaaggcctaaaactatgtacaattcattaaataagtaatacctttgaagcaataattgtaggataaaaaaattatctttttagtgaatctcataacaaagtagtcacattcgaaccctccttcttctcttggacactaatcgatcaattataaaataacattagtactcacatatataaatggtgcaaatgcataagctaatgtgtaaagaaaattttttggatgtcacctgcactagttgctaagatggctccctcttagatgttttctttgcaaatattcgaagagccctatgtaaataagttcaatgggtacatttttaaaataggtaaatgttatatgttttaatatatatatataaataataaaaaaaatgtgtttgaggtgaatgtatttttttatttaaaaataatactatgaaaaataataggaagaacttacatgtttacgatgtcatttaagtcctcacatggtttgtgatgcatagggtcaagataatggactatcattttccttggctcaagcactacctaaatataaaccctctaagtcctcatatctatttctattaacaaaatataaaaactttccaaaactcaactacttaaatataaaaacaaaatcaaataaaatatctagctaattggattttagaaactaaataaactataaataaactaaatataaaaactaaataaaatatctatgcccatgaattaattgaataggatagaaagacatagagagaacatggttatggttatgatttccatcttatcatctcccgtcaataccacacatgcccattttaaggttggacactacttttgttgctagacttggaaagggaacttcaaaattgaaaacataaataaacccttatgtaaaaaaaaataacattaaaatataattgagcattaaaatatttactctctttcatcactttcatttgaatattaataatctcttattgagatagatacttacaatttaacaaaatagaatttcctaataataaaaaatataaaaatttctatttctattaacaaaatataaaaactttccaaaactcaactacttaaatataaaaacaaaatcaaataaaatatctagctaattggattttagaaactaaataaactataaataaattaaatataaaaactaaataaaatatctatgcccatgaattaattgaagaggatagaaagacacagagagaacatggctatggttatgatttccatcttatcatctcccgtcaataccacacatgccttcccggattggtccttttggggttggatactctcaacgaaattctatatctcattcccacttagatacaaacagaaaaatcattcttttttttttcctctctcgttttttagaaaggatgaagattatgtgataataaatctaaaaaaaattatgtacctgtcattctcacacaaatacatattaaaaatcattcattttttcctgtttttcactttttttaaggacttgatcatgtgtttggtttagatgaaaaaatcaattaatctacagttttttcttctatgctagaagattaaacctaaattttttttccctacaactcaagaaaacacaatccacaaaaaccataatacaaagatgttgaaacaattaatataatgacattaataaaagaaaaaaaaaatgacagatccaagagattttgggttacttgggagtccacaaagtgaagaatgtccgttgtgagcgtgttgactatggatgggtgagaaaaaaggttgaagaagatcatgattttatatataggatttatatattgagattttttggattgtgggtgagatatggaaacaatgggatttttatatagtatccatcattattaattctaaaagtgggctcattaagttataatacctaaaaaaatttattttatatgatgtcacttcccaaaaaatgacactataaatataaaattaatatcatctaactacctcaattgaagattttttatatgatgtgtcacctttattaattataaaccctatggtgtcattattttaaaagtgacaccgtaaatagtgacaccataaactatttttgtagtagtgcgctctcatacatatctcataaataattattatgttcatcttcttacacccttcctttactcctagcctcagattctctgctttcgcaccaagtccatcttctctctcccatttcactcccttgaagtcgatttctctatcatttttcactgtgtgaagaagtggtttctctttgtaagatgcattttctcttgccttttgatttctctaacaatttcaagaactaatctcactctggaaactttctatgggcataacttctctcggtgcatgaagattactgatgttggagcgctacacaaatactccagtcataaatcttcatactcttatttcatggaagcaccgataagtctgtctttttaagcacaagatctctaataactaaaagtttgatagatgttgttcgattgctctatgttcaggggcttgcaaatgcttttgtttctacttggatcagaaatcactgatgcatctgttgctgcaaatgcgtcaagctattcaaattgagaattgcttggatttgagcaggtatgctttagtccctagtcttgattgttgctgaggatttatgagacaatcaattattcttgaaagctacttgcttgggtaacttgctaaggttctgttagtcttcagattaaggcagtgtgaatgcttctcacctaattatgttatcacccttcttgattctagatgatttgcagctacctcaacattttattcattgagtgaggtagttggcaaagctctttttaagagaaaaagattattcatactctggtaacatctattaaaacagaaaaaggtctgtgagggtaggttttctaatggaaacatttgtaagctgacgactcttcactcttatactctctctagttgctcagaactgaagaaatggccagatgacatggggagcccacaatgattagtaaaggtcgaagcaaatggaagtggtatacaagaggtacccacctctattactcttttgacaaagtttcaagtatcagcattagcaggatgcaaggcaggggaatccgtgtcaaggaatctggttttatctttgcgctcatcaccaacagagggattgggtctatgctacttgaaaatgctgaatttaagtgactgcaacctattggaaggagcctacccagtga

SEQ ID NO: 12780 - DNA, 7843 bp, Vitis vinifera
  Intron number 1 from transcript GSVIVT01010797001 (locus G SVIVG01010797001) derived from phytozome v7.0 (chr-ID chr5 ; pos 22671673 to 22679515 reverse strand)
ttctatctcattcacgctgactcggagaaaagcgggtacgttttgtttgccctagattggtttcaatttttaatctcaatttcgtacaagaatttcgcttcgggttgatcatcttggttatcccatatgaaacctaatgagtttaaggctgttgttatttaaaattgcggaattttgaatgagttttggctgttggttgaggtttgtttggttgccgagaaagtcgtttctttgtagttgctgtaatgtaatgtaattgtgttggcgcttatttggtctggaaggttgttaggtttaagggtcttctttttttctttttggttgttaagatgaatgtttgggttggactatttagagcatttatttgccttaataggctctaatttaatttcaatttcatctaaattcgcttttatttgatcactttggttaagccatatgaacgctcatgagttcaaggttattgtcattattgtaatttgcggaactttgtacgaccttgagtgttgagctgaactcggtttaattgaggaaaccatttctatgtgttttgtataatttgatgtaactgtgctagtgtttatttggttgggaaggttattgggtttaagggttcccttttgtctttttttttccttgtgctaatatgaatatatgggttggattatctaggccatttttcccctaatttaattttaattagtccaaatttccttccattttttatcttattggttattccatctgggggtaggattgcctagccatctgtggccctaatttaattttaatttagtccaaatttcctttcattttttttatcttattggttatcccatctgggggtagggttatctaggccatctttgtccctaatttaatcttagtatagtccaaatttgactttattttttatcttattagttatcccatctggatattcatgatttcaaacttattgttattattattataacttgtggaattttgaataggtttgggcgttggattaaaatgtttttggtcactgaggaagctatttgtgtaggtggcgttatgtaattgtctcagtgcttgtttggttggaagggcattgggtttaagttctcagtacacgtatggagctgttagccattttttttccttgaatttcaatttcatccaaggatttgattttatttacttttagtggttgacccagctgaatatccatgacttgattcttatttttatcgttatttgtgaaatttgaatcagtttgggtattttttgagctctggttgatttctgagaaagtgatatcaaaatttgcttttatttgaccatattggttaacccatgtgagttttaatgagattaatattatttttcttattatttttggaacttggaatgagtttgggtgttgggttgaactctgtttggtttctgaggaagttacctctgtggttggtgtaatttggctgtattagcagtgcttgtttgtctgggaaaggtattgggcttttagttgctgctatggaagttaaatgttttcttttgccgctgagatgaatatatgggtggggtaatcaggtcattttttgctctagattgactataatttaacttcaattccaccaaaaaaattcttttatttgatcatattgtttactgcatttgcatactgtttagtttcatcttatctttattgttatttgtggagttttgaattagtttggggatcagtcgaactttcttgggttgctgagagagaattagtcctatgcttgttgtaacttagatgtgtaaatgcttgtaatattgtgtttaaggttttcttttcttttttctgtttaaatgctaagatgtctatattggtagggttgtttaagccttttttgttcttttgttttttgattagaaacaagagatgtatatatttatattaatgaaaacgtgagaaagatgaggagtcctccccacaattataaaaaactgatcataatatgattgacctcctatactatacaaggagtttatataaaaggtttagactacaaacacaacacctctcaaggatgtccaaaccctttttatttacataccgaaagccagttgagttggataactctgagaagttcaacaagctatttgccaaaggatcttgcctctactagagctccccaaacccccatatgaaatgatcatcatatagcatatactctttggtggaatccaatcaatcctgacttatctgaatagaccatgccaaaggcccaaagttatgggacaatgcggtaagagatgatcaatagaccctccactccccttacataaaacgcaccaatcgagcctaaggttttccctaacatgtttctaatttaacctcaatttcacccaaagttttgcttttattttattatattggttatgcaatccaaatatccatgtccttgatctttttcttaatggaattttgaatgagtgtgggtactgtttggttttttcgagggagttatttggctatatgggttaagccattttaatatcaatgaatttaagtttcatttttattatcatttgtggaattgtgaatatgggtgttgggtcgagctttgtttggttgctgagaaagtgttctgtttatttggtccaaaaaggtattggatttaagggcttctgttttttctttgctaagatgaacatatcagcccatgttttagggctggtggtgaggagatgtgaataatgtattggtgtttatggcctagcattgaggagttttggtggtatgtaatttgcagttataaggaaaatgtggcatgaggtataagaagagttcctttagtataatattagtgtagctaagataatttcttttgattttcagggaccgtggctaacattgttatcatttgtgtctatagaacatgaattgagcaaattttagctctcttttttagcaataatatttacctcttaatcatgaatttattgcttcttttgattttccacaccaagaaaaatttaatgttaggggtttaaattgtttttggtgggagggaaaatgaaatattagaattttctggatattattttaaggagtggaacgcaaaaaatagtgaagtgattagtttccttggtaagcttcacaaggtggatatttgaaaggagcttggatgcaaatttaagtgttggaacaaaggtgaagctaaggacatactttgaacctataagcttggcaaagggcttgtatgacctataattaagattttggtcagcaaattaaaaaggtgattgatgatgagtcatagattttctctaaatgagatgaatatccttgatgcagctctcattgctagtaaggcacttggttctagattggggagttctaagatgaatatagttcataaattggaattatcaacattatatggaatccttgtgtgcctactaaagtgggtttctttgcttgggaagctttttggggtaaggtgttaactttggatcaactcaaaaagaggggccggtgtttagccaacagatgctttctttgctgtgaggaagaagaatctattgatcatattcttattcagtgctccaaggctagagtgttatgggaattattatttgctctttttggtgtttcttgggtcctgccttattcggttagagatacccttagtgggtggagtggctttaatatgggcaagaagcgcagaaaggtgtggaaggcagccccttcgtgtatcttttgggcggtgtggaaggaaagaaataggattgcctttgacaatgaggagctatcgatgaataggttgaaaaattcttttgtttgtaatctttgggtgtggtctaaaccagttgtaaatgaaggtcctctctctttacttggttttttttattggctaggtgctaggtgagggctggtattgtatttcttcttctttttgtgccctagggcgtctcttgtatactccctgtatgcttttgagcctatttttggggctccttgctattatatgcttctttgtgtgtttgccaatcaaaaaaaaaaaaaaaaatagttcataaattggaaattgagaaagcatatgatcatattaactacctaattggggcttcttgttaccagtatggggaaaatgggttttaagcataaatgaatcaagtggatcacatcgttgtccttggaaggctattgcataagtttcctaagagttttccaagtttactcggtttgtggtaggagatggggatagaattcggttctgggaagacttgtggtggggggaccaagctttgggggtctaatatccaagactacttagagtagtcacagataaaaatactcctatttcttcaattcttggatctactcgcccattctcttggaactttaactttcgccaaaacctttccgattctaagatagaagatttagaaggcctcatgcggtctcttgatcgtctacatatatcaccttcggttccaaatatgaaatcgtgatctttatctcattcaagactttttacaataaaatctttctttcttgccttatctcaattctttgattcgcctccagttttccctactaagttcgtctggaattctcaagtccccttcaaagtcaagtcctttgtctggttggtggctcacaagaaggttaatactaatgacttgctacaggttgagaagaccctacaaagcacttagtcccgacatttgtaagttgtgcatgaagcatggagaaatagtagatcatctttttctccattgctctttgacaatggggttgtggcacagattatttcaattagcaaagacggattgggtccccccaaggagcatctttgacatgttatctactaattttaatggttttggatcttctaagagagagattgttttatggcaagccgcgtgcatcgctttaatttgggtggtgtggcgggaaagaaatgcaacgatttttgaggataaagcaaggaattcagagaatctttgagattctattcttttccttgcttctctttgggctttttgttctaaggttattaaggggattcctcttaccgtgttacaacttgattggttagcggtgtgtaatcccaatgggttggtctaactagagtgattgcttgtttttactttgtattttcttatttttgattccttgtggttttgtttttctttggtgggaggattccttgtccttctcttgtacttcctttttatcaatatattcctttatcatttcctataaaaaaaaatcaagtggatcaagttttgtatctatataatcagattctctgtgttgatcaatggatctccatccagttgttttttatttactttattttatgtatgatctactctttttggatctctcatggcttgaggcaggtaacctttcttttctcttatctgtttgtgttagttatgaaagctttaggttattgttatagaactgcaaattgtggtttcaatagaggagatttcttagtggggaagtggatcaagttttttcagttgtttaacaacttcctccttttttatgatgtgaatgatgactagttgttccttaggtggatcattattactttgaggccttggtctgggaattaaagaactagatcccatcagttttcattccaggttgtagaatgggaaggttgtcttttaagttatttaggtttacctttgggtgctcctttcaagttggtgtcaatttgagatttcattgaagaaagattctgcaaaagtttggtttgttggaagagttcaagtggcaattcttatgaacgatggatggtttgacttacatatattagaaggtacaccttgtagtgttcttagattggaggggatttagtggggttctctctatgtttgctgggtgagggtgcagggttaacatgtagttttagccgtccgaattttttcaggtagggttagtcttcttgagaacataccttgtctggattatctaccatagagaaaggatggagtggggttggaattatgagtctcactgtatataggctttactcaggaggtggttttggaggctcacgacaaagtggtatttcttataaagaagagtcatccaggatcaaattggaagttggaaatcggaaggaggttgggcctgaaagggagagggagatgtatgatattagtctttggaaactgatcagaaaagatcggattgccttctaggcttgtatgatcatatctatggcagatgctaggtgcacaaagttttgattcaatgtatggtatggtgctgtttggtattgcttctcttagaaatgcctgggtggcggacctttgagatggggcaggcgactaaagtaattggtctccttgttttacaaggtttttccatgacagggaattaggatggtgcatgcttttcttcagtacatgcaatctatgttggtgacggtaggatgctcagataagtcagtgtgaaggttagtgaaaaatgatagcttatttgtcaaatcatattgaagtttcttgggtctgagagtttatggttctttctctgctaaggacgtttgataccttttggcaccaagctgaagttatcttctgtttttcagagataatttaggggaaaattcttataatggatcaacttataaaaaggctttagttttttctcaagttgttgcattcgtaagtaggatatgtaattggcaaactatcctcttctcatttttggcttgcagtttgtagactttggtgttctttatattcaatattcgggtttttctttttgatctctgttagactttattgattgtctaggaagtggatggagtgttttctttttttccttcctttcttttctctctctcagctttcagtggtatctgtatatatctggcatacttgggttacttctctttctttctagttgcatttttaataaattctccttgtctgcctattaaataaagtcattatcttgccatgctaatagacacactttatttcctcgagtgcaaaatcttggccttctttctgtgtctattcctatcttcaacatgattgtttgcaatcaatcaactttgaagagtagttacacattcggaaacaagaggaccagcttgcgctacatataaattgaagtaagctgctgaaaaataggttgttaatgaaagtaaacacaactcaagaaagtggtttgtctctttaaacttatttttcccaatagatcattgattttgacaaattggatctcatggagaagccatcatcttagtaatctttcctttctgtgtaatctttgggcttggtccaagttatttttagtttctggtcgcccctttgttgtacattttgtggactggttgtgctcgtattaagaaggacgttgttttttgttgcccctcctttttggaggcgtcttgaggtgttcattgtatatgtccagtatactatgggatgctttgaaggcgtcttctatttataatattctcttgctttactcatcaaaaaattatctcgagtaagctgtactttctggaaaaaacagttctctagtgtgtgaacttccttcttgtgaagtatacatttctagcattgcctgaccattagctcattagtggtttataaagtgatcaatttattttgcttgtggacactaaccttgtaagaggtgcccttgttatagattgttaaaaacatcaaaaagctgtggaataaacttcaaaatactagaagggattcaatagtcacatttttacatccttttcctttcatattcactccacgattatttgacaacatgtgtgggtacagtgtttgataatgttttattgccaaacaggtgcctttcttttgcata

SEQ ID NO: 12781 - DNA, 12857 bp, Vitis vinifera
  Intron number 9 from transcript GSVIVT01036119001 (locus G SVIVG01036119001) derived from phytozome v7.0 (chr-ID chr6 ; pos 20432717 to 20445573 reverse strand)
gcacagcaggctttgcacaggtgagatggctgcatgtatttatctgtttaaatttgttgatcattttctatcttttaattgataatcaggtggatggtaattccttcttacaattagcttcataaacctaggcccaatgaaatattgagatatttctttactggtaacaacatgaaaggttgaaacaattataataacagttcagtgaattgtctctgctctattttctttattttttctgcatcttctttgaaatcttcattctctttatgaagcccaggaatacacagagaattggctacacattaagttaacatttacagcacattctaatgggcagttatgaactaacaaacatgaaatttttggcattaggttcataagctatcttctaaaagtatgactttctatgtcatagtctggaccaaattatgagttaaggtgatttgatgaatctaagtattcctctggtgagccaatttttttttcctctattttttgagggcttttttgtgtgtgtgtgtgtgtgttttgttttttgtttgtttgttttttttttttcttttcttttgtggggtgtttttttaggcagtgggttgttgccctagcaagccataggagtggttttattaccggaggacttataggctaacaagtcaattgagcaagattcagggaacatattaccctgcctttttctttaaaagtaatccataattttggttatctggaaccattttgttaggaaatttgctagtccatgcaggttttgagacattctacttgttggttggcagtagagtaactaatctattgatagttctgtctatcgcatacctacacttgatatgccaacctagattgttcaagaatttcaagacactccctgggtctaattaatctgtcagacattgctgctttccatccttatatgcatcaaacttgggttctcaaatgaaaatttggattaactttagtgaggttaacacttctttctatcttgttttcctgaatccatccaaggaagctagtggtatcaaggtttgcatttcttcctgcagcaatctttcttggaatctcagtttcaggagaaaatcctatactctaagaagtggaactggctgctttctttcatcttttgaacaatgtgtatctttctcttttcttcaaaaagtaccaaatatatatatttttttccggtaaatccatttgttgtttttaaaagacatccagggaccattggcaataccagttaaagtggcattgttgaaccaaccagccatctaaaagtttaatgtattattgtgaataagcatgcacctgaatgagttcaacataagggaaactgtatgatccatagcacaatccttgaacatgccatcctagtaaggtagcagtaagatttccaggacattaatgacacctagcatcatcaaacattaaagaggagcacaaactgcaagcaaaataggaaagatcatctttttacagcatctctgcacaatgttgcttagttaccatgttgacaacattgcatgatttcatgaacatgctgattcaagcttaattgccctgtcaaattcataaaatactgtttttttgtcacaatagctcaatctgtcgtggaatttctgaatgagttttaaaattataggctagatagatatggaatatccaattcctctgcttgacaggtacatgtattgctaccatgaccttgtggagaccgagaacaaatctttggatgcctaaagcacacctgtaagttgttgcgtggttgactttgtgccacaggtatggtactagggttgaccaaggtccaccatgcttccccttataataggattgctggcctttaatctgtttacactagcaaatattgtccgtcctttagaaatcatactagtattagaaaacttaattcgcattcaggtgatgtgctatcacttttcatggacttctgccctaagtaactttcagaagatatttattcccttctgattattgtagattaattatgtaggaagcactgtgcaatagtacaagaacagtagcattccttaaactcaaagttgtccactgcattgtgtgatctttgaattgactgattcacttcacttttagatgtaataaaatgctggtgggttttctaaaagaaaattcctggacaagtacatgtttttgctcaaaatacccatttacaaacttcatccaatattgctgtaaagtttatgaaaaagagtacagcatgctatcttgatgtcctatgtgtactgtatgctgcaaaaggtgtagatttgaaaataaatccaggttcatacatcagaacataaaggaagcacatgttaaacacgagaaacatcaataatgaatataacatagtgttttggtgagcattgatgttggagagaacaattgtctatcaattgaccaaattatctttcttagtagctaaaatttatctcaatagatctctttcaatctactcaagcctgtaagtaacttgattgggagcacaaatgagaacaaataaggattttcagtatgcaattctgaatcaaactaattttgcctcctagtatatataggctttcttcagcatatccaaatgcttcagacctatccacctccatatctgacactcttttctcctagttctccccaagagaaccaacctagattcttgcaaggctacccacaggcttgtagaataggttggatgtgaagctggtggttaggaagaatcattgtgcccttggaaattaatatctcaattttaacaaaattttcggatattgtttaaagggaaaaaaaaaaagaggatatctttctcaaaataaggcaaaaacaagctaaaaacagagggaaaaaaatttccctgagtactgccaaaaccataggaacacaaaacaccagcagtaaatgcaataatcatggatctttctgtattaaaggaaaagggatatcatgcaaactatagtcattagaggcattcctaggcctcggtataatggctccctagctatagcatcttgtttgtgaagtcacaccttgtcctttttttttttttcctttttttctttttttttgtccttttgcaatttgcaattttattcttgaaatttgtggctgtatattggaattttatttaatctcattgatttttattttttttattggatgcttatttaaatgcttggaatctttttttttttttttttattgcttggattggactttttagattatatttggtgattatgagagtataataaatgttcgcatgtccacagttacactgatttataaaattgacatgcacccataagttacaacttgcttggcttaggtacatacattaggttgtgctttagtgcatgttgctcctttaagaacaatgttgccaattcctctaaagccctagctctcttataacttaggccttcaaaaaaaggaggctatcatgtcccttgatgaatcaattgtcatgggcttctactgcctaatgatgcccagctgatcgaggactgctcttcaataatgagattattcctaattcctatgtctgacgccattttcaaattttctaacaactctaagtgctcaactttattggtccatatcatattgatttggagtagatgcatggtgtatctcatttgtactatttaaatgttttcaaaaacaaatttgcttgggtggcacaataagcttcaatggtaattcaacctgaatttcctggttaccaatcagcttcctaattcattctctctctctaaaaattttaatcatttttgtttctattgacaagaaaattttattagaagcacttataaaaaaagggcacaatccaggtactccaaaagtatgtaaaaagcgccaaatggggccaatttaccaagatcaatagtaatgaaaaagggcaaagacataggactcgcatccaaagacttcttagaccacaagaaaagagaacaaagaaatcttttaaaatttgaaccaattgcttcgaatctttggacatcctctggcttcactccctttatgtagtccaaaacaagcaaaagaggctactcttttatatgcttattcccaacaaagctgcaatgccatcctaaataaacctttctgactgcccaagggagggcccaggagaggacaatcaaagatagtaagaaaggtcgcggggcatgagctagactactatagatcaggagctggaaaatccaagcaagctgcctccaaatccttagcaatgagacatggtgatctcttggttacaaacatccatagagaagccaagaagcaaactctatgccatgtggcccatactcctctactacccctgcttgtcctcaaaaggtcattgcaaccagatcacttaaacaattaataaatctcattattaaagcacactatttcacacccttaagccaaaatccttaaaggaaataactattattttgggatttttttttaattttttttttatagataaaaagaataatattaaacgaaaagaggaaacaccaaaaagtgtcctctaagtatacagggagtatacaaaagcagcccaaaggcttgaaaccaaaggaggaggatataaacaacaacccctactcttacttagagcctagccactcaaaaaagctaataagagaagaagggctcaaaactataaacaccctaactcaagaccaaagattacatacaaaagaatatttcaacctttaaagcgaaagctcctcattcccaaaagttagcaaatttctttcattccagactgaccaaaatatatataagggggccatttgccaagcctttttacgggtcttccctacaaacgcaccatgccacctaaggagagtttccttaactaaaccagagagaaccaaagccacaccaaaaagggagaaaaggagattccacaaaacctgcgtctttacacaatgaagtaaaaggtgatccaccgtttctacttcagaaaggcatagaaaacacctatttgccaaagagtaccccctcctctggagttgctccaaagttaagattttacttcaggaagcctcccaagcaaagaaagttaccttaagaggcacgctcgccctccaaatactaccacaagggaacaaagaagaaattccgggctctaaaatagaataaagcgacttgactgagaaagctccactcttagatgctatccacaccactttatcatcgtcctccctatgcaccttaaaggcttggattttaagcataaaactctccaccatcccaatctcccaatcattaaacgaccttgagaaaagaagggttcaaccatctcctacaccatctgggttccaaacattcgatacccaatcttctttaaccaaggagatggcaaataatgaagggaaagactcgcaaagaggcatatctccacaccacttgttcttccagaaactcactctcctaccacaacccacgcggtaggttaaactgctattcatacacaaccactcctttctaattgttttccaaagctcgacaccatacctcccgcttacagcccgagtacaccatcctccctcctctataccatattttttactgataacctgcttccacaaagcctcactttcactggcaaagcaccaattccacttactcaagagagctttattcatcaaggctaaatttctcacacccagaccacctttctttctttccaaacaaaccaagttccacctaacaagatgtggcttctgcaccagagctcttccaccccacagaaaatccctctgaatcttctccaacctcgaccttacttttccgcgcaaataaagagagacatgaagtaaatagacatgctagagagagtgctccgaattagggtgagtcttcctccttttgatatatactgtctcttccacattgcaagcctttttcgaaacctctcttcaactccatcccaaaccacctctgatttgaagggtgcccccaaaggcaaacccaaataacaagaaggcagaccacccactttacaacccaactccaagactaaatcctctatatcatgcaccctccccattgggataagctcgctcttttccaaataaactctcaaccctgagcaagcctcaaaccacatgagaagccagcttagatatgtcaactgatcatgagactcctcacaaaacaccaaagtgtcatccgcaaatagcacgcgtgagatcagaatcccctcaccttccttgcctctcacccttcaccctaataaaaagcccccactaatagcccttcttaataagcaactaaacgcctccatagctatcacaaacagataaggggagagagggtctccttgtctcaaacccctcaaactttgaaaaaaaccggagagagagccatttataagaacagagaatctcatagtaaaggtgcatcactctatccacttaatccatctctccccaaaacccatttttttaagcactgccaacaagaacttccaattgacatgatcatatgccttctctatatccaacttgcacaacacacccccttgattgcttttcaacctagaatccacaacctcatttgcaatcaaagctgcatctagaatttgtctaccctccacaaaggcattttgaggtttggaaatcactttccccataaccttcttgatactatttgccaacaccttggccaacaagttgtaaaggcttcccacaaggctaatcggcttgaaatctttcaaatcttctgcacctcccttctttgggactaaaaccaagaaggtggcatttagagactttacaaatctgcccatttcatgaaattctctaaaaaaactcataatctctaccttcatcacatcccaacaaaaaagccaaaaagccatggtaaatccatccagcctgggggctttgtccttgaccagatctgatagagttgcaaacacctcttcttccgtaaaaggaatctccaacccctcagcctcactgctaactaaccccataaaggacagcccgtcgatacaaggacgtcaccccttttcttctgaatacaacttttgaaatgccctaccacactgttttttaaattattatcctccaagtgccaacaaccattcactttcaacttggacagccagtttcttctattgagaacattcgccatcctatgaaaaaatctggtattattgtcctcctccttcagccataactccctagacttctgtctccaggagatctcttccctcaacaccccaagacttataagactccctcgccttttttctagcttcacactcttccagatttaaagctgaatatttctccttttcatcccaatactcaacctgcctaagagcttcaccctttttagtctcaatgagcccaaactcttcttgattccaaatctttagaatatttgttaaggccctcaatttagcatctaagataaagctggatgtccctgtaaaatttaaactccctcaccacattttcagcttatctttgaaaccctcttcctccaaccacatattctcaaatctgaaaggggaaggtcccatcttcaaacctcctccttctaggaggacggggaagtgattagagactagtttgggaagaattccctgcacatctccattgaaaaagctatcccagtttttgtccctaaaaaccggtcaaacctagactgggcttggttattcaagccgcctctccaagtaaacaggcccctcaccaaaggaaaatcgctcaactccaaatcctctatcacttttgagaatctcctcattgaagctgtaagccctccttccctactacgctcctctggaaaccttaacaaattgaaatcccctcctacacaccaagggtcactccataaaccttttattgacccaagttcctcccagaaattctctctatctctgctacagactgacccatacacaccagtgaacacccacactatatcgtccacacaatttttgaacgacatgaaattgagaaaaccccttctactagatcaaccaactccaccaatttgttatcccaaaacaccagaataccaccagctgcacccctagaattgactgctccccagtctagatgtcttcccacccttagactacgaacaagccccatagtcatttctttaattttagtttcctgtaaataaaccacatccactctttgggatttgatgactaacttaatgatcttccttttatctctatcattaacccctctaacattccacgataaaatttttatcttcatttacaccctgatccagaagcccctccaaaaatacccacgctagaacccattttagctttcttatagcttatagtttatagtccactccagcttcttgagttccctactggattttgaggatttcaaaatcgtcttcttggttgccccgtcctgcctcttctgatcaatccttcccttcattctcctctagaggtacaacatttcctcttcatacccttttgtcgacattccaaggcaccaactgaactttgcaagacagttggagctccacccttcatcctgccccccttcttcttgaaaaaaatctctcttttcctccaaatgactcgcataatccaaaccaaccaagacaagtgctaactcagcctcactatcactgcctctcgaaccccaaagtggctatttctagccactaagagccgacaagtcttcaatccgtactactcgcaacggaatccggtccatcgccccttccactaacccttccgctccacttgaaaccccctccataagcttcgtcgggccccaaggaaagagagtttgggatcagcgggatacctggatgcttcctctaacaacgccgtgtcggtgagcttcagacaactagaaagcaactccctgtcggcggcaagaagctcatgctccaaccccccgtgccccacaccccccccccccccccccccccggggttttgtaagagccttagaagaaaaagaaagcctctccgatatgctcaaggagggcttaataaaattgggcccatgaggcctcaaagagatgtcgcccaggctcacctctggatttgggcttctatcccattcccctgcaccacttgagcccatgcgaccattttctttaaaagcctcccatctagctgttctgggcctaggcccactcacagttgagaccggctcaactgctctagcctgcctacctcttgcagccgctgctactctataccttttgccacactcaacctgcacttctgacccccaagactgatcaccaatttgaaaatcccactcactaccacaagcgcatgcatcctccctctcccttcatccctatcctatagcccctctttcttatgctaggctgccctcgacactacctgagaaacccaaggggggatttcccaccacagattaaccacccaacaaaaattcctggccaccacctgcaatgaacttggcatattctttccagaagctctaactaagatacgggcccactgcaactgtaagttgtttcgtcatcaacagctaagaaccccccatagctctctccaattctcttgaacacatctctactccaaaggtgaagtggcagtcctactaccttcacccaaacttccttggcatggctcccgctccaaaaacaccccatttcaggtccttatttctgcaggagaaactctctctcctcaaaatgtctgctaccccttaaaagcaccaaatcagcttcgcatttattttcaaatttgaacaacacaagggcctcacccaacctggaaatttttaaaccacccttaagagaccacctttctaatgcccactccttcaaagagaacaggggaggaacagactcaaaactgcccccaaaacaaccaaccaagcaacgacttagctactcttccctacaaagcagatcatggtcccctacatgcacccataaagaatcccttggttcccctatcttcactctcgcgacttctgcaaccgcaccttttccttcctcattccctttgatactacatccatccttttcagggttgggagtacccagattaccttggctcagagctggagtggaaactccaagggcccttaacttctgagccaacagcaaacacccccctactaagccttttccttctggaaaaacaagacaatacttcttagcttccacatctcttaccgagcaaagtaaaaacctaccagtttcattagaacgacactccgatctaaactttcttcctccttcttctcaaactttcagacacctcgagttagactctcctctacaccaagattccacaccttctaacagatagcttaagattttttctccaaatcttattcaagaggaaaaaactttgctcctttccacaatagtccctctctgtttaccttggacctcttcaatggagatttcgaatgtcttagattccactgcaaaccaacactttctaccttccaaaactcctctccccaccttccgaaactcctctgttccaggtgatttcatttcgaatattttgggaattttttaatgagctaccaaagaatatcccaactaaggagcttgtagctcatgaacgatgatattccttgttctccaaacacaatatgtttttgctgatggctttattaggcctttggtttccaaccatgtgacctgtgggttattaaccatgcaaaacctttgcctttatggggaaaaaattaatttggctggaagttagccacattatggcccatggagatgaactgtaagagggatgtaggagagaatcctgttgtatccaaaactaatgtctctagtagattttttcatgcaggagaggattattttattgtcttcattgttaactcagtcatcactcactttatccatctctttgatgcttatagtagtagtatgggttttttatattcccattgtcatattcttgagtttctagtcattgtaatattgaacttcaacagaaactctgatgtaggataaccctaggatggttgcctattctcaaaagtaggtgggctagagttttatttttagggtgtaaggagaggaacaaggaagaaattttatggtaaagaaaacatataatatgagaaatagagagaaagaagaaacaatgaagaaaagatcgaaaaccttagagtctcattaaggccttctaggagtttcacccataagaaaatcaatggagtctcaccattgaggattgcaacacttgcaatgatagaaaatataatattattaatattaattcatccctttgatttacattgattagtctatttataggcttctctaagaaatccaaaatctactaggactttaataacctattatgactctaattcttattataacattcaaagaatactaggactctaatggttatcatgactcaaattctaattatattataactaaactagctaatcctaattagagtccaacaaataccatcctaattaatattaatcctacttaaagtttacttaggtcttccctttcctccttgaatgaactttaaaaggttttcccctgtcaaactccccttggaatttgggcctgatcggtgttggccttttctatctcatcttgagagtgaatgtgtaatatcaggctctttcctggctcatcttctgataaaaggggggctgttctgtgattatttaatgccagcatggacttttccaacacatcaggttgcagtgtgactggatctctattatgtacaatagttaaaatagggctgacattcttgtgcaatttgtaacttccttgccagttgccactaaattgctttgttgcctctttttgctttcttctaatgccttggtggttcttttgccccgtcttctgcgttacgacactccacttttatttcagttgtgattaatgaatttatttgaaaacccttgggtgatgttaggagaatgaggatggcgccactgaggacaagaaagatggtgatgatatagcctagcaagttgcaaagtagttggtttctcttgtgggagaccttttacctccttgagtgtgtagagagtttttttttttttgggtacatttttccaccttaagctgtgcaacttgatttgttttttttttttttgaacagcataggcatacctctttttccttgacatatatttggatctcttatcctttgtacatacctttttaaaacaatgaatttgttgtctccaattaaaagaaagagaagaaattaaaaaaagaaaaagaaaaaggaaaacaaacaaacaaggagatgattatgttgataagaaggatgctaggtgatagtggaggagaagcttgcgtcgatcactacactagcaaatatatgttcttttagtacttagatatgtgttctataaaatgtttgttctattcaatcaagtgttcaaagttgtttctaatttgatattctttccgcttgtctggatgttttaatgatcggggattttaagcttctcctccctattcatggaatcatcttgtcatactggttccttcttcaaaagaatgccagagttgatcaaaacctgctgatgacataagattaaccccaaccttagacccaataaacaccaactgaactccagtttttcctgttctacataccaaaccttgtgtatttcttaaagtaggaaacatctactgttaatgttttgatgaattatatgatacattagtggaacttgaattctaggctgcaatcaagaggttataaaatgagtgtcaatcatggctgtttgcttctttattattcactgtccattgaagttctataacttctagatttctgctgattctgaaatgcatttgtcttgcagcccctgatct

SEQ ID NO: 12782 - DNA, 6119 bp, Vitis vinifera
  Intron number 2 from transcript GSVIVT01022017001 (locus G SVIVG01022017001) derived from phytozome v7.0 (chr-ID chr1 4; pos 4270600 to 4276718 reverse strand)
tgggtggttatcttccaattattgatcaggtgcgtctaacatgtttttttttttgctcaaactttatttagattaaagtgaaaaaagaaaagaaaagaaaagaaaaaacaaaaacaaaaacaaaagcaaagtgcatatctaggagagaattaaactttgtttggtatctatttttttaagacaattttgaaaaataatttttgagaattgttgtttgatgttttgtaaaacaaatatttgtttgaaatttgaaatatttttaacctattttctatatttttaaatacattttaaaaataacttttatttgtattgttttatttttaatcattctccatatttatctaattatttttttaaaacaactcttaaaaaataagtgaaaatagttgcaaataattaaaagatatgatttgaaaacaccatattttatattttttgattgctatacgtggtttcctttttttttttttttaattctagagaacaaaaaattgtttttaaaaataattatcaaatagaaccttaatcctgatagcggactcttttaactttaggagtaatttatttatttcattctataatctatatatctgttgtatggagtcttgcacatatttaaaagatttgaatgtccactaatgatacatattttttcaccattcaacttctttacctctttatgatataagagcctctatagctctcttccatttttttttttataaatctccctcaccctatgtttcatcatggttaataaaagcttgaacaacttcatcacaactgacaatctcattactataaatgcaattgaccaatttccactcaagcttacccccacaaattattactcatgaaaaacacgatttgatgtacttatctttgggtatgactaggttatattgattgaacaaaaccctatccattatcagaaatcacaatcaattgcaagaaactatatcttacggatgagataagataaaattcttctcttaggcctcattggttccttcaaccatgaagttgtacctatagtttgtttatgtaaaacatctattgaagtttgggcttgttttgcaatgctttatgtcaatcccttatcctctagaacaatggggttaacataacaattcgctcttctcaatcatgctcttaatcaatagctgattaccttaccacatttaatgatattgttgatgaacatgatcttattggagcgcccattctaaactgatacctaattactcatacactacctcattacttacacactaaataacgttggccttgaatttaaagaaatcgtcattgatgcatgagcatgggatactgtgattacttttggtgaatttcacaacaaattagttgaatatgaagccttcctcaaataggaaaagctttgttctattggaaatcttggtaacattgccatcaacaatacacaatttccattctctaatagtgaaaaacacttggcaaaaaatatttcctcaacaagaaaggaaaccaaggccaaggtttgcctcattctatgaatcaccatcctagcaagaattctactatgatatgctaattttgtgagaagaaagatcagactgctagccaatatcacattgctaagaacttgtttttttttttcatcatctagacctatttcaaacctagctatcgccaccaacaactccttaataaattggctatttatattggtgcctcaaatcatgttacatttgaacttaataacttgttttttcaccaaccatatgaagtcttagatgacattatcatgagtaatgacagaggttttgagaaaataaaggttaatcttaataaagaaactaccaagaaaggagtggagggtgaattggagttttaaaaaaatcttttttcaaacgcaataaatttaatcacaagaagcataaatataaagagataaggttagggaaagtaaactcagattttatagtggttcggcacttccttacctacatccactctcctcaaactcctaactgagtgagggttccactatatttgaaacttcaaccaagcttttaatcacttttacacttgggttccgacttcaatgggctcttacacaatatctttaagtctctactcacttgaagctataaacattcaaataataagtttgaatttctcaacctagctcaacaatgactcaaatacaacttaaggttaggatgaatcacaaaggtgcactaaagaatatgcaaatagagatttaatgcaccaagaagagaatgagagcttttaaggccagaataagtaggtaaacaaataaatgcaagtgttctcttatttataaatgaagtggaactattaatttataggtttctaacattgagagccaaaataccaaaaagtagcatcgatcggttgagctgggggttgaccggttcactagccgtcggagcatttaatgcttggcaagtgaccattacccttgatcagactttgaccagaaaagcatatccctcaagcgagaatgaaaggctattggaagagagaaggttttttgcatctcttgattggacctcgatcgagaaggagtaaccggtcgattggtatcctagccagttggacagtgtcttgactagttcaccatttttggcctgaaaacctatctttttctggtctttttgcttttaacacttaggcaaggtctttaggtaaattaatatgctaattttgaaatgttttgcctaaggttcatttgatagaactcagatttagatgaaaatgttactttaatgcataaaccgagtttttaaagatatatgaaagatatgaaaatcctaagtgcacccatgcattcatcttacgtatgtttcctatgattaaaagtcttccaattatcttcatggtgcattcattgggtcttttgatgatttccaaattaacacttgaaattctttataattcaaaccaattagtaacttaaccatgttttgttataatcaaaacacgatcaggagaacccttgggctaacatgtttgaatatcactcaagttggaaagaccactctctcaattccatctcactcattttctttctctaatgtcttgtgtacccatgaagtaaaacctaaattctatctcaaaattttgtaagacaacaatttactttgatgtgaagaatctaaccattgaggttcttcttgctcgtggatgaagcaagaatatgtttataagtagtcaactagagatgcttccacttcatgaataaaatgaacctacatgggtgtctaagcctcctttaacaactggcatgatgtacttggtcactcgtcatctaaaataatgtactaaattgtttcttagaatagtcttatggttttcattaatttatctttgtcatcttgtgattctcgttagtgttataaaagtcacaggttgcctttggcaagtccaatttgcaaagttgttatctacttgatcttgttaatacaaacgtatgaaaaccttccccctatgtgttctattgatggaattttttattgtgtcatttttattgatcattttttcaaatattcatgtttgttccttttatcctacatccacttccatacttcctatttggtttcacttgcatctaaccactcttctttttcgttgccataacaaaccagtaccatatctttattcataccacatgatattcccattttgaatactccattctctcactcaatgttgcctactatggatactactatctctaatccatatttttacgctagttaatcttattttccttatttgttcctccaattagtcctacacacaagttgtacatccattctagtcaagtttacatcttggaattcttatgatcactatcaacaatcaagctcccccatcttttcattcattttgtcttatgcttacctattgaacccacctcttcattcatcatctccttcttgtggattactttatttattactgcaatccttatcttcttcgcccattcttctattcacattccttttattatgccattcatgacttcatacaaccttcgattattccctttgtggttgacctctcattcccaacatccatcaatcaaactttaccaagttttatcttgagcagtgaccctatagtaattctcccctctctatcactaacccacttccttaccatcccatgtagacttggtctaaaaataacatcttcaaacttgagagagtttttacttccacctccaccaagcatccctttctttagcccttgagctcagtactataacacaagctttaaaacacaaagaatagatagatgccatgagtgaagaacttcagactcttgcctcaaatggtacttaagatttgataactcatgagccttgacacaatattgttgcagtaaatgggtcttttggataaaatgtaatccttgtggtagtatttctcaatacaaggcttgcctacttaaccttgattatcatgagacattcaatcttgtgatcaagcttacaaccattcaaattgttccctctattactctatctcatagatgggaagtacatcaactagatatcaacaatacattcctccttgagtatccctatgaagaagtgttcatatctaactacctagcttcatttgttagtttggatcctatcacatttgttgtttacgcaaatctatttatagcttgaagacacacctcaggcttggttcattgagtttaagaccttcattctatctttaagctttgtgaactctcgctttgattcttctctagttatttattcttataactctctttttgtttactttctagtctatgtggatgacttgataactacatggtactcttaacaatttattcatcatgttagtgtcactctctctaattgcttcttaatcaaagactttagacaccttcattttttttttcgtggtgtagaggtcattctcttagcaaatgaaatattcttttctcaataaaatttttttcaagacctccttgaaagatttcaaatagaatgtatcaaatcctttatcacttcactcaattgcaatactcattcaaaatgatggatctccacatgttgatgcctctaagtattgtaatctaattggaagcctgtagtacctcccaatatccaaacttgatgtggcttatgccacccaaaaattggctcaataaatgcatgctctgaatcaaactcattggactacgaccaaatatctcctatggtaccttgaacacactatggaatatggtctctttctccaccattctcaaccattacacttaattgcctactcggatgcttattaggaaaacaattgtgaaggttgtacttccattttgtggcatacctcctcttcctcgaaggcaatttatttctttgtactctaaaaaacaacagacagttgctagctctttcattgaagttgagtattggttttttgcctcagtggcaactaagaaaacctgggtcattaatcttcttctccttgagctagttatatatttaaaaggtccgagtgtgatactttttcaccattcaacttctttaccttcttaattttcgggtgtttcctaaaataaaagtcggtttgggaacttaaaatgttttcaacattttttttctcaagttttcaaatgttaatttaaaatgaacttttatttacaatgctttatttttaatcatttttcataaatatgtaactctttttttttcaaaaaaatctccaaaaaataattaaaatacggtattaaaaaataccatctctcataaacctatttgatgataacccgacaatcaaatatgttattattttttattttaagatttgaccttcaattatgacacaaggtttacgaaaaattaaagtttcaaaatttcaattggctattcaattaatattagtaattatagaattttttttttttgaaaaatttaaaagtcaatactcaaaattatattattaaaattcgttcgatcaaattaatcccagctgggattttgaattttggagggaacagaacaaacaagaacagacgacgtcgttttgtaacatgtaaagtggtttgcagggcacttccactgcaggtggttgcagatacagaca

SEQ ID NO: 12783 - DNA, 6645 bp, Vitis vinifera
  Intron number 1 from transcript GSVIVT01001251001 (locus G SVIVG01001251001) derived from phytozome v7.0 (chr-ID chrU n; pos 4712595 to 4719239 reverse strand)
ttcttattgagaaaaccaaccttgaactagggactgttagagcataaactaaaccaaaaagagacgatcaatttacaaagaacttctcttaggaataaaatcaaatagcttgtacacaatcaaccaagatcaagaacagaagagaattatcatggatcgatcaacttgatttacatccacattgatttcctaatgcctttattaaactgtaccaaccagagtttacataagaataaaaaacaatgaaattacagtttttccccaagaatcctcctcacctctgtttctttctttctatacaggaaaaccgaaacagacttatagttatggatttcaaagctcacttcttttcttgctttctattctgtacaattgactgccctgatcaagttttctcgagtctacacctttttttatgacagtcaaaagctctaactaactaacaatactcccaagattgttgttatttcctacccaggttagcaagctttattgtttgttagttgagctttgtcagtggcctttccacttgtcacttgatagttggcaaactctacaaaactccaccttgacaacctattaagttgacaagtgtctaaactaccttaaagtctcagtaccttccctaatgggaagtcttcagcagtctccaatgttgactaaattcaaacagtggttgaacttagtcacatttagagacttagtcaacatgtcggatggattgtcttcaatatgaatttttccaactccaatctttcctgcaataatgatatctctaacaaagtgcagtcttacatcaatatgtttgaacctttcatggaatgattgattcttggctaaatgtattgcactttggttatcacaatatacaacaactttacctttgtacatggctaattcttttgtaatacccttcaaccaaattgcctccttcacagcctctatcaatgccatgtattcaacttcagtggttgagagagctaccactgattactactcaaaaagtactcttttatagcttgaaactaactgttctaaatacttttgagtagtagttaataccttttaactcaattggcacattaaggaacctagcaagggttactaatcaaattttggcaagttttggtgttttggtagctatttgatcattgaaacaagccaagaatgagggagaatttggtgaaatccatggcaatgcaagttaaagctcaaatacatgaagaatccaagctttggagcacttcataaccctttgccaagccaatcagagatgcaaggaagaaatccagaggaagaaatccaacaaccagcattttcgcatggctatgtgaaatttcgcacaccatgcgaaaccacttgaggcgtccaaaggatttcacacaccatgccaaatttcgcatggtatacgaaatcttcctgtccgactccattagatttttatcttcagatattttgtgtaatttcctagtttctccttgtaaccaacctagatattttcttttatatctttttatatatcttttagatagcttatatataacgagagagacatatgtgagattatggatgtttttcattgaacacttgtaaatttccaagagtaagaaatatatagagcttttgctctgcctttctttctcattttgttttcactcttcttcctagccaaacaacctttgaggatgatttctcaggggatgagtggctaggttttacatttcttggagtgatggaatctaggtgaaagacccgaatgcaaagatgggagttgtccttgctttaaatgaaagtagttgttaaccattaatggtttttattttaaggtttagttttgaatcccttaaaatcaccttgaatggccaatacttggtaagctttttggattccatggatgcttattgctagatccatggatgtctattagttatcatttacgagccattggaaggtggttcaaggtgagagtctttagtgtttaaagccattaatgggaagcaactatcattttccatgaaccctttggatcaattcttaattgctaaatataaaaccggttcgggagataaccatcctttatgttattgtccccaacgcgaggagaagattcgaaatctccccatttgtctaaggaacccgatcctagtgacctaaagctctaagagaccttttctttatagttaacttcacttattatttttgcttaacttaaaatcaatctttgcaaccacaattccattttctttaaaagctaattttcataagaaaaagcactattttatttccttcatttaagtcaactgtacgatgaaaacccatccctatggacgatcttagagccactatactatgttagctatgctaccctagtgtaaggtgatttaggttttataaattttgttgataacactcgtctaggccaaaatcaaatggcatgactgcaacaggggacaaatcaaccactgactgaagattggccatccagctcattgctcctccaaacactatgaatacatacctagtaagagattttctagcgtcaatgttcccagcataattaacatctacaaacccttgtaactgagttcccaactgactattacctccataaatcagccccaagcttttagtaccagctaagtattgaaaaagccactttactgcttaccaatgtggctttccaaggcagctcatgtatctacttatcatgctaaccgcatatgcaagatcaggccgagaacacaccacagtgtacatcacacttcccaccatgctagcataaggtatcctttacataaaccttttctcttcatgagtctcgagtgctagtgttatggaaagtctaaaatgttgtcctagaggagtactcactgtctttacattattcatctcaaatctgcttagtgcctttgagatgtatgaatttgagataacctaagtaccctcttgctcctatctctttctatctccattcccaaaatcctcttggctgaaccaagatatttcatttcaaattcagccttaagcatctctttgacctgctccaagtgtcttatctccttacatgccaccagcatgtcatccacatatagtaaaagatataccatgctgccttcaattagcttaaaatatacacatccatcatggctgctctgattgaaaccaatatctagcatgtacttatcaaatcttgcataccattgcctaggtgattgctttaggccataaagagatttcttaagtaaacatacttgaccttgattccttccccaaagcctttgggtggttgcatataaatcaactcatcaagttctccatgcaagaatgttgtcttcacatccagttgatctaacttcaagtcttcatgacctataaaagccaccagcaatcggattgaactattttttactacaggagaaaatatctcattatagacaacaccttccttttgtgaaaatcccttagccaccaaccttgccttgtaccttggagcctcctcccctagtgtcccttgctttcttttgaaaacccacttggagcctgctagctttcgatccttgggtttagtgaccaattcccaagtctcatttttcctcaaggaatccatcttctcttgtatagattttacccactgatcagcctcattactgttgatggcttcttggtacgtttttggctccatatccactatttcttcagctacactcaaggcaaatgttgtcatcttagcttgaccataccttttaggaggtttaacttgtcttttctgcatgtcttttgccaaactataggactccagtcattgagttggttcatctagtctttcttgtactacttcttcttgaattgtctctgtagacttttcaggttgcaaagtctcatgctccacttcaaattgcaattgatttgacccttccacatctttggctggagtttgttttggcatatcttgctcattaaaagttacatctctgctgattatacacttccctttgccttgtgtttctatccacaacttgtaacctttaactccttttggataccccaagaaaatacactttacaacccatggttctaacttatctgttttggtgtgtacataagctgtgcttctaaaaactttgagatattgataatctacaactttcccagtccacttttcttgaggggttttgaattgtaatgctgatgatgggctcctgttgatcaaatggacaactgtttttgcaacctcaacctcagtctaaaaacctttgacaaccctaaacttgacagcatacatctcacccctctccaaagtggtcctattcatactctcagcaaagccattttgttgaggtgtatatctgacagttttatgtgtagctatgccttccttttgaaaaaatgaattaaaatcatttgataggaactcaagtccattatttgttctcaacttcttcacttttctacctacttgagtttcaacaagaattttccactctttgaactttaagaaggtctcacttttattttcaagaaaataaatccacactttcctaaagtaatcatcaataagagttaagaagtaccttgctgcacctaacgacggtacccgtgatggtcctcacaagtcagagtgtatatagtccagctggttttgtgtttcatgtactgttttggcaaacttcacccttgtaaccttgccaaacacgtagtgttcataaaaaggcaaatctattagcttgtagtttcccagcaccccttgcttctgcagctcttgtagtcccctgtggttgatatgaccaagcctctgatgccatagcttgattatccccacatcctcattcagcacagtagaaaccttgcatgtcatagtctggcctataagggtatacaacccatttttaattgtccctttcatgatagtaagtgagcctctagccactctcaaatagttaggttctgacttgaatgtatatcttgacttgtccaacattccaagtgagataaggttcctttttaactcgggtatatacctaacatcttcaagaactctttcaatgccatcatagtgcttgatcctgacagtactagtgccaagaatcttgcaatatttattattgcccagcaggacatgatctccatcaacttctttaaagtcttgaaatcaagctttgataggacacatgtgaaaagagcaccatgaatcaagtatccactcctagaccgagtccacctctaccacatttagcacctcaacactgtcatatccatccaaaatcatagcagcatcaccatcattcacggttttcttgactatgttttgtctcctatccgggcaatccttcttgaagtgcccttccttatgacagataaaacacttgaacttcttgttctagattttgatttaacccttgaattcttgcccttcttttctcctttgtcagatctgtctctaatgtttaaaccctcactcgactcatccttggattcttcttgtttttgtaattctctagcatgcaaaatggattgcacctcatcaaaggtcaggctgtctctcccatacattatgacctctttcaagttagtgtatgatgcatctaaagaagtcagtagcataattgctttatcttcatctcatactatgatatcaatattttctaaatccaagattatcttattgaagtgatcaagatgctctttaattgacatacccagggtcatcttgaatgtgtataacttgattttcttatgtaatcggattgctaatgacttggtcatgtataggctctcaagcttaagccacaactcagctacaaactttgctttggccacctctctcagcacagtatcacctaaagaaagaatgatggcaccatgagctttctccagcaattctattttctccttttcttgcatggaactaggcgggtttttctctccaagtaaggaatcttggagcccctgttgaaccagtattgccctcatctttagtctccataacctgaaatcttttatgcttgtaaacttttctacatcgaactttgtagtccccgttataacccaaatgactctgataccaattgttgagaaaaccagccttgaactagggattgttagagtagaaactaaacaaaaaagagacgaccatttaacaaagaacttctctaaggaataaaatcaaatagcttgtacacaatcaatgaagatcaagaacacaagagaattatcgtagttcgatcaacttgatctacatccacattgatttcctgaagcctttattaaactgtaccaactagagtttacacaagaatcaaaaacaaagaaattacagtttttccctaagaaccctcctcacctctatttctttctttctatacaagaaaaccgaaacaaccgtatggttatggatttcaaagatctcttcttttcttgctttctattctatacaattggatgccctaatcaagttttcccgagtctgcacatttttttataacaatcaaaacttctaactaactaacaatactcccaagatagccattatttcctaccctggtcaataagctttactgtttgttagttgagcttagtcaacaaccttgccacttgtcacttgatagttggcaaactctacacttctaaatgagaatttctgtccaa

SEQ ID NO: 12784 - DNA, 3275 bp, Vitis vinifera
  Intron number 1 from transcript GSVIVT01038507001 (locus G SVIVG01038507001) derived from phytozome v7.0 (chr-ID chr3 ; pos 10690177 to 10693451 reverse strand)
taccaatctttgattggttggcattgcatcagaatcctttaaaaatctaccattttttcctttcaacatccttttcattgaggagtttaatattgtgtcaacaagtcctccaaggtactccatgtgtgtcttattgggacgttgctactaatttagtagagtgttttcatcatcaatttaggcaactttgagtacagggaagaaatgatctatgctcatggaattgggaacatggaaggtttggatacccaactcaatatctaattcactagagatcaaccttccattgctcattgtaaagttgggtaattagctatatttattttcatatgattttgcatgcatatctttgtaagtttaattcaaatgtcctgttttttattttataggaacacattctcaatcattgagaatgcatgaaagattcaaaaatagaagatactcatttcgggaattgttgcaagctatgaaggaatgagagtgataattatgcattatggtagatttatgaatgatgataaaaatttctcattatttggtgcttgttaatttgatgaaataacattctcattaaaggactgcatcagatcattatagtgaaggacaactcttgacagtagagttggaatctttatatttattaagtgaatatgttcctaattgttgacatggtttgaaaggactggtaattggccttgcacatcctgcattgttgtagtcttagtggtgtttgtttttttacttaattctaaatagaaccttaatacttaatagtattaaatattaggttgtttgtttttgtagtattttatttctattaagtattaaaaagtaaaaaaaaaatcattctatttagtaaaaagtttataataagtcatgaaaaagtaaaaaaataaacaacctaaattctaaaactaaatggttttcagcaaaaagccaaaaaaacaaaaactaccttagttattcttcagagaaatgtatatatacttttgcattcttaaaatttatttatttgttatttaagtagaccattcttaaactagtggcttctttttatactagtcatatagggttgcacgatggatttgagttcctagaagttatatcaaagtggttgttcttttgttggttatcttttattttgtctattgtctatgggttgtttcctttttcatagcttaatttttttatttctcatgttggagcattttcttgttgatctctttctattttatttataagttgcagaatcatttgttatctatgttggtttatttataatgtcatttttaaatatagtagtcaatactgagttcttttgattgggtgctaatgtttatttccgtttctggtgcttcatatcggagattgaaaagtcaaaacttgtcattttgactggtgatctaatctatgctcaacaagagcgagatatttatagtcctgttgtaagtgaccaacattctgatattgtgaataattcttgtatattctcttacagttttcccatctaaggcttcgttttgtaaatttcttggaatttattttcatatttgagtttgtgttttcctttttcaccttgatattttcatactctctaaattgttcatccatccgcagggaatagaagtcattctggatttacggatgaggagagataatcatttgagatgaacttcttctctaagggttttgtagataactttcaaaagcaacaccctagtgttgttggctatactgatgaagagagataatcatttgagatgaacttttttaagggttttgtggatacctttagaaagcaacaccctagtgttgttggctatagtacttatggggatataagaataatggcggcaaatctaataaaggtattctacaatttgtgttcctcgattttcgcctttaatgcttttcttgtattatttaataaaatggagggaatgggaatagaaaaccttgggttgtgaattcacgcgggcgcattcattattttacattgttaagtggccatgttgacgggaggaaatggaaaggtgaacaagacacatttgttaaagaaagtcatgaaattaaagtcaagaaaatccaaattcacgaaggtagaacttgaataacgtgctattaaggtttcagagtttcataaatcttatgaggtttgtattctgcgcttccaaatcaatgacactatgctaccacttatattgtcattttatgtaaacatgatcttatgtccacattgaaatctttcttggacaataaagccattagtatctcgttttatattctcaatggtgctttattatgctttatctactttcagagatggtagaactccaaagttagaactctaaagttccaattttatttttattttttctattccttcatcctctcagcaaccaaaagaagtgtccatgtaagtattaatttgcattatttaagagtttcttgtatgtatgtgaaagttctcaagtagtagaactggtattttgcattgaaaatatatcatcaagaggaaggctaataatttattagttgaagagtatgctcaaaatgtcaacagtgtttcagatgcttttgggttaagacaagtaagagaatggcaaagcaatatccaattgaagctaaaattgttgaagtcaataatgaaattgtcactgacaaagagaagttatcaatcaaaactgagaaggtcaggtaatttgcaacatatgtatctttttattccaatgattcttatgtgtcatttatatttgtttctacaattgttgaactttttcaagtagagacacatactcactcaatgagttcaccataaaaatgcgtttttgttattaacttgagttcaattgatttaactaagaggatgtcactgtcttgtggttatcactactaggcaacaaactctattaggggaagtgaaaaacatcctcgaggattagtattgaacaaattggagttgttgaaagaatgttatatctatgaatgaacttgaacggtggactattcttgcccattagaagcctcaaaaactttggattccatataactccaagaccatgagacctcctcttcttactgggaatacaatgtcgtttgtgaacaaatgtttaatttaggtttcaaatacttcataatagctttagaatgaaattggattgaaagtggaaaagataaattttccataattgaagtgaaaactaatttggagttattttagggaatgatgcaggttatgaaggaatgagagtgacaattacatgttgtagtagatt

SEQ ID NO: 12785 - DNA, 3760 bp, Vitis vinifera
  Intron number 3 from transcript GSVIVT01025347001 (locus G SVIVG01025347001) derived from phytozome v7.0 (chr-ID chr6 ; pos 1656317 to 1660076)
aaccttcctatttggaaattcaaggccagattggtgtaaaagaacacggatcatcctaggaactgcaagagggctcttgtacttgcatgaggagtgcagcacccagatcatacactgtgacatcaagcctcaaaacatacttttagatgactttttaacagcaaggatttcagattttgggctagccaagcttttgaagacggatcagacgcgaaccatgactggaatcaggggaaccaaagggtatgttgcgcctgaatggttcaagacagtgcctgttacagccaaggttgatgtttacagctttgggattgtgttgctagagatcattttctgcaggaagaacttcgaacccgatgtaagggatgaaagtcagatgatcctggctgattgggtgcaagactgctacaaagagaagagattggatttgctggtaggaaatgatgaagaggtatttggtgatatggagaaactggagaagtttgtgatgatagcaatatggtgtacgcaggaggatccatctcgaagacccaccatgaagaaagttgtgcaaatgctagaaggagctgctgaagtttctattcctccagactcatctttctcatctgccagtagttcaatctaatgctaatttccatttgggtatgtattttcggttactgttcagtgacaaacaaaggagacagttatgttgtgctcctagcatatgaataatccatatggttttggatcattttttacatcaacctctgctcatctctcaattcaaattattattccctttgaagaagttaaattttggctatttttatccaatcaatagttatttacgaactagcaacaaaaataacagtcactaagagttcatttgatagtgtttttaaaaattacttttagcctaaaaagggtttttgacaaaatttatgaaactcttaaaaattttaaaaattatttaaggtattaaaaaatcacttgtagtgttttttttagaaatacttagaacccgtttagtagtaatactagaaagcgcttttaatatttttaatacctgaaaattttcatcattcaaatgatagaaatactagaaacgttttctaaaatcactcccaaatgcattcttagattaaaaagtatataatttgattaaataaataccatggttaagaaaagaaacaacttaactcttactacatcatgcaatatttggcataaccaatttttttgacttccattaacctctttgtatatgctcaataagatggcatcacttgaatcaccttctacctataggttaaagataagaaaatgttagtgtactaattgatacctatcgaacttatcatcccaaccatccaaactgtatgatgaaatctaagttaatgaatatagatgcaaataatgggattaaagtacaaaagaatggaattgcatataaacaatgagatcaatattatataaaagaatgtgaccaaaatacaaagcaatgtttggacttggacataaaacaatgaaacccagttgtgcacatggcacattataattggttttgtttttcggtacataccaattcgatattgtagtgagacccttaaatatatccatgacctttgccttataattttatgtgtgatatctaagaaatgtgtaatttgatttgataagaagggaaagttttctatgccttatgggagtagcatatggattagccttatcacaaaattatgtggtatataagatgtgttttatagacttgaaattgcaggaaaaggtaacccacaaggagttctttagtgaaagtaccatggcaacctcatggagtggaaaaagctatattatagttatcctaggcttttcataggtttactcttataaattagaaggagaagttctttttttttgcttgcagggaaggggatgtaatacttggttattaaaaaatgttaatttttatgcttaatgttaattagattgaatttagatattaaaactagtttaaggttgataattttaattataagttagacccaatttaatgctaattataattaattgatggcttaagtttgtgtgttaaggatgtggggcctaattacaattatgagaactttaaaaggatggaccatttaagaaatcttaaaaagtaaaaagtaggggacttcaatgtaaaaaataagttggtttgtattagctctagggcattgctccaaaagtatttaagaaactaacaactataataagaagtcttacttagaagaagtcttgctaaatttaaagataaaaatttttagaaaagtaattgtaattagattggttaaataaattccacgccatctatgtcatgtcaaattttgtatgttgacccattttcttgtgtgcaaatattattattttgaatttaatgtttgtataactttaaaacatgtttacatagttaaaatgagtccgttatatataaaatataaaagacttctcttcctagttgatatggtatctcatcaatcaccctctctctcgtgcatatatgactttcttgttacattccatggtacaaaattcatacattaagaagttgatcattgtaggtggtatcgtgcaatggcatgggacatgatgaggtcatcatttaggctataagaactcatttagatatgggatgattatgagaacttatttaggttataaggaaaagttcttgacaatttatatacaatgtgttcctctaaactatataaacatattttaaaacaactaggttatttaaggtttgaacttgaagaagacgatatttgtacaaaaggaagagtgtcattacaaattgaatacctcattaaatttggaaatttaaaatctatttgtcctcattttgtccacataggacaagacaagaacattttgtccatatatgtgaatgattatgagatccaatgtcatgtgcgacacatgaccaaaagtttctaatattccatatatagtgagatctccttatttgtgttgatgtgttttaaaacttcgagatccatagacattaagtccgagacacaaatcaaagcaatccttcatcaaatgtgggagtgtataaaagctaatcctccacatatggaagtttgtccaatcctacaattccataggatatgagagtttgtttgggagggttagaggaaatagttgtgagatcttatattggttatttagggagatataatattttatatatggtagacttttttttagccatatagacgtattttaaattcacacagaccttaagcttagagcagatgatatttaaatataaaggatatattcattacaaatggtattatagttagatataaaagtcttttttattggtcttgtgggatcccatattagttaggaagagaagttcttgacacttcatatgtagagaactccttttgatcatatatagatgtgttttcaagccatgcaagccttaagttgataacagtcaatatctaccaagagcatattattacaaattgttttttagtgaatttttagacaagttgaatctaaccttagaaagaattagatcggcagaattatttgacatttaaatttgatttaagtttatggtaaatggagttaatcaagagcaagaatgagcaaactccacttgttattacatcattgttggacaaccctacctcagatgcccatacaccccctatgctctgttcccattgtttgagatctgagagcagggaagcttggccatattgcaaggggcctgtaccat

SEQ ID NO: 12786 - DNA, 23216 bp, Vitis vinifera
  Intron number 10 from transcript GSVIVT01019009001 (locus GSVIVG01019009001) derived from phytozome v7.0 (chr-ID chr 4; pos 17839846 to 17863061)
gggagtcagctaggaggtcgagattacggaagcaggtattaatgtactttgtgttcttttgtttgagctagctgtttctttactaaattctgaatgaataaagattcatatttcccactaattttggtatacatacactggcggagcaagtatatggggggtaattggacaccttgaagtctaaaaatccatatattttctctaaacatcacttactcaaaacttaattgctaatttttagttgtttgaaaagataaaagtatagcaatgaatattctattatttaaaaaagtgtcttgcaatcaaataactttaaatgcaattaatattcaattatttaaaaaaagtcctactagaaaataacttgaaattaaaattatccaaattctttttaattaatatatatttggttaactaagttcttccaaatccacttatattcatttattttttttaaaaaaagatgaaattcaaaacttcacgatcaattattaattttttgacacttatttatatcactttttgaattgtttaattaatttatatttggttaactaatttttttacacttatttatatcatcagttggaatactagaggtcttggttctagaaagaagagaagggtagtaaaggattttcttggccatgaaaatccggatgttgttctgttgcaagaaataaagagggagtcatgcgacaggaggtttatgagtagtgtgtggaaggccaggaacaaagaatgagttgttctcccaactattcgggcttcaggaggtatgacaatcctttgggatgctttgaagtttaagtgcttagaggttgtcctagggtctttcttagcaacagtaaagttggaatcaaaggaagaaagatttttttggctcactttagtttctagtactttccactttagaaaggacttttaggcggagcttcaagatatttctgtcttagcttgtccgaaatggtgtgttgctggggattttaacgttataagaagaattttagaaaagttaggaggttccaagttaaccctaagtatgagggattttgatgattttatagggaaagtgagttaattgatcctccttttaagaatacttctttcacttggtcaaatttgtaagaaaaccccgtttgcaagaggttggatggatttttattttcaagtgagtgggagcagggattccctcaaagcatccaagaagcactctctagattgagacatcgaatcattgtccaattgttttagacatcaattcttttaattagggaccaataccttttagatttgataacatgtggttgttttatcaaatttcaaggaaaatttcgattgttggtggaatgagtgttggtttgaatgatgggaaggtcacaaattcatgaaaaagttatagtttgtcaagtcaaaggaaaaggtgttctggaagcaaaaaacaagggttaaatggataaaagagaaggggattgtaattttaaattttttcatagggtggctaatggtaggcataataggaagtttatcaggtccttgattgtaattctaaattttttcataaggtagccaatggtaagcggaataagaagttcatcaagtccttggtgttagaggatgaggtagttttagattgcattgaaagcatttcggaggagatcaaacttcattttgggaagttattctccaaacctttaggtggctcatggataatagaaggcttggattggtctcccatttcaacaaagaatgttaattggctggatcgccctttttcaaaataagagattcaaaatgtcgtgttgcatttaaataagaaaaaggcccttggcccagatggcttcaccattgtgtcatatcaagagtgttaagagacaattaaggacaatcttttaagggtgttcttagagtttcacaataatgggataattaatcaaagcactaatgcaaccttcattgctctagtgccaaaaaagagtcaaaccaatagaatctcagattttatagacctatcagtttggttactagtttgtacaagatcatagctaaggtacttttagggcagctgtatttgagaaaataaagggttaatctagaaggataaaaacacccaagaaaggggggggggggggggggtttgaattggagtttaaaaaaaatctttttaaacacaataaaattaagcacaagaatcacaaatataaagagatgaggatatagaaagcaaacttagatttatagtggttcggcacttccttgtctacatccactctcctcaagctcctaatcgagtgagggttctatttatacttgaagcttcaaccaagcttctaatcaatttttacacttggatttcggctccaatgggctcttacacaatctcttcaagtctctactctcttgaaggctttaacactcaattaacaaatatgaatctctcaacctagctcaataatgactcaaatacaactcaaaggttaagatgaatcacaagggtacactaaagaatatgcaaatgaagatttgatgcaccaagaaaagaatgagagcttttatggtaaaaacaagtaggtaacaaataaatgcaggtgttctcttgctcataaatgaagtggagctctctatttataggtttctaacctcgggagccaaaaaaccaaaaagtagccccgaccggtcgagctggggtccgattggttcactagccattggagcatttaatacttgacaggtgacctttactctcgaccgggaaagaaaggctactggaaaagagagagtgttttttgcatctctcgccggaccttgacagagaaggagtaaccggttgaccgataccttagccgattgagccggtttggccagtgccttgaccggttcaccatttttggcccgaaaacatattttttttttgtctttttgcttctaacacttaggcaaggttttcaggtaaaataatatgtcaattttaaaatgttttgcctaaggttcatttgatagatctcggattttgatggaaatgtaattttaaagcataaaccgagttttcaaagatgcatgaaatgatatgtaaatcctaagtgcactcatgcattcatcttacatatgttttttatgattaaaggtctttcaaaagtcttgatcttgcatccattaggtcctttgatgaatttccaaactaacacctgaagttctttataatttaaaccaattagtaacttaaccatggtttgttatcatcaaaacatgattaggagaacccttgggttaacaatctcccccttttttatgatgacaaaccttgattatctaggagaagaagaatctccccctcaaaccaatcatggatcaacaatcaaaatttaagaacttaaaaacaagatgattaagacatattagatagaagttgtaacaagaaacaatgtaagtcatcaaatatataggcatatcatatatcataagtcaactgtatcaatgtccaatatgtacgatccaaacaaaaagatatgcatgtgtgagtctcttatatctagtcttcaagatcctaaaatatcttccccttttggcaacatcaaaaaggaaaaaaggggggtctctaatgaatcaaagttgaggaggtggaaacatagaacgcagataagccatcatctcctcatgctaatgctccaagtgatcctcaatacgctcaatcctctactggagatactcaaactgtgaagtgaaactagcctgatattgatccatacgatcctccatggagtagaaacgtgtatcactaaccacaacaagctcctccatgcgagtgccaagagagttgatttgaacagataaatccacctatagagcatggtcaggagcaagaggtgcctgaggatgtggtatctcaatatgagtaggctcagtgaatgcaggtctagagcaggaaggctcagtgtatgatggttgagtagatggaccctctgtaaaagtcagctcaatcatcatcggcttagagaaggtagcctcaaactgaacaccctctgtctggagtggaggaatgtactccaccctccatctctcgaatatttgtctcctcttcaactccaagatgtgcctgtccctgttcccaggcctgtgctagtgctctctctgcttttctcaatgattttgacttttcaattttgcacactttttcattttgtaatcctctccttgcccttttcagttgaaatccccaattttttatgcccaatgccaagggaattttttatttttgatcgaaatttgaccattatctaagaatatgtctatatgatgcatatgacatggaatttatgcaatcagaaggtatattcatcaagaattcattaagcaaacatttgattataaagaaatcacccctaattgtcttctaatatcaacaaattgttcttcacttataggttttataaagatatcaacaagttgatctttagtgcttataaattcaagtgttatgtcacctttttgtacatgatctctaagaaagtgatgtctaatctctatatgcttagtcgtggagtgttgtacgagattttttgatatacttatggcattggtattatcacatttaatgggaacatgctcaaaagataaatcaaaatcactaagtgtttgtttcatccaaaggacttgtgcacaacataaaccggctgctatgtattcaacttccgttgttgacaaagctactgaattttgcttcttactatggcatgaaacaagtgagtgtcctaagaaatgacaagtatcactagtgttttttctttcaaccttacaaccgacaaaatcagcatctgaaaaaccaattaattcaaagttattactcttaggataccataagcctatgtccattgtccctttcaaatatttgaggattctttttacgacacttaagtgagattctttaggacaagattgaaatctagtacacaaatatacactatacataatgtcgagtctactagtggtcatgtatagcaaagaacctatcatgcttctatacatagtagagtcaatggatttacctttctcatcgttatcaaacttgatggttcagctcattggagtcttcattgtttttggcttcctccatgttgaaccttttgagaagtttgcttgatttgaagtccaaggaagaagttgagttctcccatcatgctcatttcaaactcactatgcatgcacttagcaaattctttataaagagagacattagtagcacaaaaaatgatatcatcaacatatatttgaactaagagcatatcattttctttggtttttatgaaaagagttgtgtcaatttttcccattttaaaaccattttccaaaagaaatttactcatctttcatacgatgctctaggtgcttgtttcaaatcataaagtgcctttttaagtttaaaaacatggttaggaaagttgaaactttgaaagccgggtggttgttcaacatatacttcttcatttataaaaccatttaaaaaagcatttttcacatccattttatataaaacaaagtttttaaaacatgcaaagacaagtagcatcctaatggcttccaacctaactacgggggcaaaggtttcttcataatctatcccttcttcttgattaaaaccttgggctatcaaccttgttttgtttataacaattatgccattttcatccattttatttctaaaaacccatctagttccaataatactttgatttgaaggtcttggtactaattctcatacttcacttctttcaaattgatttaactcttcttgcatagcaatcatccaattttcatcatctaaagcatcatttatatttttaggctcaatttgagagataaaagctagattattgcaaatgtttctaagagaggatctagttcttaccccactagatggattacctatgatttgatcttgtgagtgattgatgacaaactttcattctttaggaaggtcttgacttgattcatcttgcacttgttgaggaaggggtagtgccaatggtgattcttctttcttgagattctcttcattttcttcttattgtcttctatcttcaatttgcaatcttcccatgtaggtctccaaacctaaaccatcatcaacactttctctttcttggagagaattattagatttataaaaaataacatggatggactcctctacaaccatggttcttttgttgaaaactctaaaggctttacttgaagatgagtaaccaagaaaaattccaacatccgattttgaatcaaattttccaaggttgtctttagtgtttaatataaaacatttgcatccaaagactttgaaatagttaatgttgggttccttattttccaaagctcatagggagttttcttaagtatgggcctcaataatactttatttcaaacataacaagatgtgttaactgctttaacctaaaaatattttggtaagttgttttcatttagcatggctctcgccatctcttgaagggttctattttttctttcaactaccccattttgttgaggagttctaggaaccgaaaaattgtggtcaattccatgctcattgcaataatctttaaaatcgatattttcaaattctctcccatgattacttcttatataagtaattgcaaaacttttttcattttgaaccttattgcaaaactttgaaaactcataaaaaatttcattcttttgacttaaaagcaagacccatgtgtatctagagaagtcgtccacaataacatatgtataagactttcctctaagacttggtatcttagagggaccaaataaatccatatgcaataactcaagtggcctagatgtggaaatgaagtttttgtttttgaaagagttttttatttgctttcctactcaacaagctttacaaattttatctttttgaaaatttattttgggaaggcctctaacaagttcatctttgttgagttgggaaatgaggcccatgttagcatgtcccaacctcctctgccacaaccaactttgatcatgcatgcttgaaaagcatctatcatggccattatattttgaaatatttatagcctaaacattatcacatctatgatccataaagatgattttatcattttgaatatccttgataatgcaatgagatgcttcaaaaatcactttaaaaccttcgtcacaaagttgactaatgcttaaaaggttatgttttaaaccatctactaataaaacactttcaattagagaggatgtgtcattaccaatgttgccttgactaatgatctttccttttgcattgtctctaaaggtaatatatcctccatttttctttgtaagaaaagcaaactttgattcatctccggtcatgtgtcttgagcatccactatctaagaaccacttatccttttttgaaccctacagcataaaactcaagttgatttagttatcttggatttttcaatccaaatttttttagtttttacatttgaattcttttgagaaccatttcttagagggcatgtactactaatgcgtcttcctcttccactaaagttgcaagtagtggaaggacttgcaattgtggattcctttacaaaatagtttttaaaatacttttgattttttgaagatatgaatcctagctcttgtttgtcaaaaacacatttttggttagctagaatcatttcaaaagatttttgtccacaagaaaatattgaaagagaggaggtcaatcattcattttctttcttagaatctcattctttttttcaagatgagttttagaaacttcaacatttgaaaatttttcttttacttttctaagtttttcttcaagttgttgaactttctttttgagagaaatatttttcaaatcaagtttttcaaaatcctcatacaattcttcaaaagcatcatgtatatcttcatcactaagattagagtttacttcatcaagttcatctattgccatgaagcacatgtttgccacttctttctcattttcttcttcagaggattcatcttcactttcactccaagtggccattattgtcttcttctttctcttcttggcttcacttttgtaaagaggacaatcatatttagtatgtttcggtttcttgcacttgaaacacaccaagtctcttttctcttcccatctctccttgtcaccattagatgaagattccttttcaaaaaagtctcttctagaagtgaaccttcttcctctaaaccttttaccctttatgaatttgttgaactttcttgtgatgagggctaagtcttcatcttcttcaacttcttcttcttccttagttgtagctttgagagctatgctcttcttccttttgtcttccccttcttgttgcttctttgccaaattgatctcatatgtcatcaatgaccttatgagctcctccaaaggtagcttggtcaagtctttggcttcttgaattgcggtgacctttgtatgtcactttgatggaagtgacctcaagatcttcatcacttttttggattccttgtaggtctttcccaaggcttcaagaccattgacaatgttggtgaacctagtgatcatctcaacaatagtttcattatctttcataaaaaacaattcatgcctatgaacaagtaaattgatttctgactctttaacttgatttgttccttcatgagttatttcaagtaatctccaaatctctttagtcgatttgcattgacatattctattatattcatttctatccatagagcattgcaaagtataaatgaccttaacatttaattgaaaatttcttctatcatgctcatctcattcttgcttgggttttggaaccatgacttcatcaactagttttgaaggaaaagttgggtcatcttcaataacgtctcatacgtctaaatcggttgattgtaaaaatcaagtcattttagttttccaataggaataatcggttcccacaaaaaatggaggtctattggttacaaaactttcaatgtgagatgagcttgatggattagtcatttcctcttaggcaattaagtcttaaacaagaggcctagccctgataccaattgagagaataaagggctaatttaaatggataaaaacacccaagaggggggtgaattggagtttaaaaaaaatatttttaaacacaataaaattaagcacaagaaacacaaatataaagagatgaggatatagaaagcaaacttagatttatagtggtttgacacttccttgcctacatccactctcctcaagctcctaatcgagtgagggttccgcttatatttgaagttttaaccaagcttctaatcactttttacacttggattccgactccaatgggctctttcacaatctcttcaagtctctactctcttgaaggttttaacactcaattaacaaatatgaatctctcaacctagctcaacaatgactcaaatacaattcaaaggttaggatgaatcacaaaggtgcactaaaaaatatgcaaatgaatatttgatgcaccaagaaaagaatgagagcttttatagtaaaaacaagtaggtaacaaataaatgcaggtgttctcttgttcataaatgaagtggagctctctatttataggtttctaacctcaagagccaaaaaaaccaaaaaacagcttcgaccaatcgagctggggggtcgactggctcactagccgttggagtatttaatgtttgacaggtgaccgttactctcgatcgggaaggcaaatccctcgaccgggaaagaaaggctactggaagagagatagtattttttgcatctcttgaccgaacctcgatcgggaaggagtaaccagtcgaccggtaccttagctggttaagccagtttggctagtgcctcgactggttcacaatttttggcccgaaaacctatcttgttctgctctttttgcttttagcacttaggcaaggtctttaggtaaaataatatgtcaattttgaaatgttttgcctaaggttcattttatagatctcaaattttgatggaaatgtaactttaaagcataaaccgagtttttaaagatgcataaaatgatatataaatcctaagtgcacccatgcattcatcttacatatgtttcctatgattaaaggtctttcaaaagtcttgatcttgcatccattaggtcatttgatgaatttccaaactaacacctgaaattctttataattcaaaccaattggtaacttaactatggtttgttatcatcaaaacataattagaagaacaatattaagtcctccaggacaccattttcatgtcttaggtgcttttgttgaggagagacaaattttggatgttgttttgattgctaatgagttggtggatgagaaaaggagatcaaaagaggaaggggtagtctttaaaatcaatattgaaaaggtctatgaccatgttgattggggttttttggaccacgaacttgaaagaaaaaggtttagtttaagatggaggtcctagatgaggggatgtttgtctacatcaactttggcagtcttagtgaatggacatgtcaaaggttggattaaggcacaaagaggcttaatacaaggagatcctctttccccttttcttttcaccaatgtggttcatgttttaagtaggtcaatggtgaaagcaaatgagataggtttatttggggggtttctagtgggtggaaataggattgaagtgtctcatttacaatttgcttatgacactatctttttttgtagagcttccttggaagagctacattctcttaagctgattttgttggtttttgggcaactttcaaggctaaggatcaatttaaataagagctctctttcttaaatcaacttttagttgagaacaaactgccaagattgtttcaatgcgtgattgtgtagtctctgattgacctttaacatatttgtgtcttcctttaggggggaattcgaaatcaatctcattttaggatccaatgattgatagagtctctaggaggttggataggttgaaaaatgtttttctatccctaggaggtagaattaccctaatctagtcttgtttgatgcacatctcgagctatttttttcatctcttttcaagattccaacatcaatagtttcaaagattgaaaagatgcaaagagattttttatggtttggttttggggagggtaaaagggatcatttggttaattgagatctagtgtgtaggcctaaggattttagtgggttaaggtttgggaaaattgctatgagaaatcaagttttttattagggaagtggctttggaggtgttctaaggaaagtttcgctcttggaagagtcttgtcgtggaatgttagaggggctaatgatagtgagaaaagaaaggtgattaaggcgttgatcaagagtcaaaaggtggatgtagtgtgtttacaagagaccaaaatgcaggaaatgtcaaagatgatagttagaagcctcggagtgggaagatgtctggattggaaggtgttaaattcgaggggttcttctggcggtgtgctagtgttctgggataagaggggaacttttctgtgtcttgcagattcaaaaattgtgaggacgaattttgttggttattctctggagtttatgggcctttgttgatgaaagagagggaagatttttgggcggaattaggagcggttaggggtctatggagtgatccttggtgtgtggcaggggatttcaatgttgtgagattccctgtggaaagcagtaggggaggcagattatctgcttcaatgaggagattttcggagattatagatgatttagagttgagggacctgcctttgcaaggaggctctttcacctggaagggaggattgaataatcaatcccattcaaggcttgatcggtttctgatttcgaatgaatgggaggatcatttctctgggtctgtgcagtatgtccttcctaagccaacttcggatcattttccaattctcctagacgggggaggagtaaggagtggtccgatgccgtttaggtttgagaatatgtggttgaaggaagaggggttcaaagaaaaaatgcaggggtggtgggtggggctcaattttagtgggtctgcgagctatgtgttggtttctaaattgaaagctttgaagtctctgttgagagattggaataagctggagtttgggaaagtggaggtcaataaggctttggctttgagtcaggtggatttctgggacaaaatggagttatctcggactctctctgttcaggaggtggacccaaggagaggagctaaagagggttttaagaagtgggctttgatggaagagatatcttggagacaaaaatcaagggaagtctggttgagagagggggacaggaatactaagttcttccacaagatggctaacgctcacaggagggggaacatgttatcccgggtcaaaataaatggtgtttggttaacaaaggagaatgagattaaagagggggtggtgaatgagtttaaagctatgctgtcttctgctagaggttggagacccagcttaaggggattgtcttttaagagattggaggcggtggatgcagccagtttggaggagccgctttcggagcaagaggtgatggaggcgcttaaaagtttttgtggggataaagctcccgggcctgatggtttttctatggccttttggcaatcttcttgggagtttgtgaaagaggaggtcttggggttttttagggagttccataaccatggcaggtttgttaaaagtcttaatgccacctttattgttttgattccaaagaaaggaggggcagaagatttaagggacttcaggcctatcagcttggtgggaggtctgtataagtggttggctaaagttttagctaatagattaaagagggtggtggggaaggtggtttccaaggctcaaaatgctttcatgcaaggaaggcaaattctagatgctgttctggtggctaatgaggttttagactcagttttaaaaaacaaggaagaggtagtgatgtgtaagctggacattgagaaagcgtatgaccatgtggaatggtcctttttgttttcagtcataaggaagatggggtttggggaaaaatggattagatggatgaagtggtgtatctccactgttagcttctccgttttggtgaatgggtcttcctcaggtttttttcaaagctctagaggtttaaggcaaggggatcctctctctccgtatctttttgtgttggtgatggaagcttttagtagtctcctaaggaagacagtagctgggggctttgtgtctgcttgtaaggcaaggagtaggggtggtgagggagttaatgtgtcacaccttttgtttgctgatgacactttggttttctgtggagcttccaaggttcaattattgcatttaaattggattttaatgtggtttgaagtcatgtcgggcttgagaattaatcttgacaaaagtgagcttattccggtgggttgtgtgaataatgtagaggagttggctgcagctattggttgtaaggttggaagtctcccaacctcttatctgggcttgcctttaggtgcgcagtacaggtcacgggctgtttgggacggtgtggaggagagaatgaggaaaaaattggctagatggaagagccaatacatatccaaaggaggcaggattactttgatccggagtactctagctaatatgcccatttactttatgtccatgctctctatgcctagaaaagtcagactgaggttagagcggattcagagggagttcttatggggaggtggggcccttgagaggaagatccatcttgttaggtgggagctggtttgtcttgagaaggataatggggggttgggggtcaagagtctttctatcctcaataaggctcttttatgtaaatggagttggagatttgctatggagagagaggctttttggaaccaagtgattaggggaaaatatggggaggagcaagggggttggagttcaaaggaagcaaggggggaggggcatggtgtgggattgtggaaaactcttaggaaagaatgggaagtcgtgaaaagtaggcttgttttcgttgtggggaatgggaaaaggataaaattctggaaagacatttggtgtggggatgaacccctttgtgtttcttttccttctttatttgcattggctgtttccaaggatgcttgggttaaggatgtttggaggtgcaatgagggtgggggaagttggagcccgttgttttctagaccgtttaatgattgggagttggaagaggtgtgcagtttttttgtggccttaaataggaagcaaattcagcaaggggtggatgatagggtgatttggagagagactaattgtgggaagttttcggttaagtctctctacaaatcattagtatcaggccatccaatctccttcccatcgtcggctatttggaaagtttcggtgcagcctagagtgagtttttttgggtgggaagcaacgtggggaaaggctctcaccttggatcagcttcaaaggagaggttgggctctagcgaacagatgttacctttgtcaaagacatgaagaatcaattgatcacattcttcttcattgtgataaggttagaactctttgggtgttgctctactcaatgttcggggtgcagtgggtgctgcctgccacggttaaggagacgctttcggggtggaatgggtcttttgtggggaagaagaggaagggtgtttggaaagcaagttctttgtgccttttttggacggtttggaagacaaggaacaaagttgcttttgaggaagaggagttgtcaatccaaagactcaaggcttcttttgtttattttctttggtcggagacgaagaggtctataaaagatggtccctcgaccttagttgattttgttgggtgggtggcttcccgttaagggtgtggatagggtggctcttcgtttcttggcaggctgctagggagcgtggggtgtttttctttctttttcttttctctttcttgtacttttagccactgcttcggtggtttttaatacaatctctttatttatctaaaaaaaatgtaccctttgtaagaggagtggaaagacaattgaccatctcttcctacattgtacgattactttaaggttatggcatagatattctcataggctaggatggtgtgggttgagccaggtagtattcacgatatgatggttatctccttcatgtgttttgggaactctactagagacaaaactctttggaagattgtttgtctcattttgttgtggatcgtgtggagaaagaggaatgttaggatttttttaggatatttagaagacgcctaagatgatgtgggacttgcttcattttcattttttttattatttttgagcctacttatattgacgtttttaaaccatttccattgagcataattcagcttaatcggctttcaatatgtacaccctagggttgggctacacagtgaggtcccaagatgagcttcaagagatgttatacttgtgtagactttttttggttccttttgtattgtccttctcgtaaagcagaggcttctttgggttttttgatcaggtttgtatttcatggggaggatttctcatccttctcatgtttttttattcactttaattaatacatcttttgtttctaatcaaaaacaaaaaaaaaaattgtttgacaaatttttcttgctagtttttaaattatcaagattattgatacatgtatttatgacttttctcatgaaattagttttattaaaaaaattattgtttataaaatatcaaaaacttttttttgctaaaatattagttttattaaaaaaaaaaaattattctttataaaatatcaaaaacttatttttactaaaatatctagatattttggttgtttggaatttcaaatgattatgtgtttaatttgacaactctgattttttttaaaacaatttctttacaacatttaccgatattacacagtatgatacaacagtgcatgaggagatacacaagcttttcaaaatacaaaactatatctctaaatttttgctctgcagctgtctatatatatatgatcttcttaatacaataaatagaattttcagttttttaacctttggtggagttcacattttacatattttgctagtagaggatatttctttaagctaatacctagcaagacatattgaggtgaggaacatgcacttcatgatatggatctgatacacttaaactctgtagacgggaatttgtcatcaaaaccgcactccatgtctcctgtccttatggatttaaaactatagttcatattcttgttggcaatagcaccagaggtttaggaagataagtcctgaggaaatcactctgcatttggtgggttcatatggttgaagcttttaaaagagtctgttttcatgacttctaaggcatggttctccatggttttctggtgttggggttatgtggaaggagctgaacatagctgatgataggattgaatgatgagtttttgggtcagcatgggttccagttagcagaccagcaacatttcctgtttctactcagctagggatgacttgactcttgcctctcttctgtactaggtttcattgatagaggcatcccagatggatgcaatctataggaccaaggatcaacacgatgttaccctgagtctgctaccaggagttatatcaggctagtctaaaccagtaggatcaagttagaaagacttgttatgcagctccttcaaggtagtttaggtctttctatccaaccctttaaacccacttccatgtcagctggctaatcagggaccattggatcctcaaggttatcccacccttttaagccagctagcaccaaggtggtttcagcctccatgtgagcctaccaatctatgagtataaatatgggctgcagcaaggcatatggtatgcctggccattcatgatctataatctggggtcttaagcctgagtttggtttcaagttatatccttgggcttcttcatctccaagcaagtgcagagcccagatttacttgatcaggcctgacatgctggatgagagtacttggtatcatgtattgtggctttgctcattatgtcatgtagaggaacttatagttagcatctaaatgcctatcttttattaggcacttgtggatgagaggtaaactattgacttatatatttagaattgtggttggaaggtcccgggttttaattctttaaaattgctgccttctatttgataaatgtggatgatagtttcttttttttttttagtaggcaacaaagagatgtactaaaaagagtgtctatcaaagaaagaaggcgcaactcagtatatggcagatatcatgaaacccaacaaaagcaaaaactaaaaaacaaaatcataaaggtagaaaccaagccttagcccctccacttctagctaaaaaatcaagaatagtcaaattctcaaccctcacctcaaaagtatctattaacgagacagaaagctttgaggacatccttcaactccattgtgaaatgctctaaatcttcaaaatttctacaactccactaattccatgggccctagaaaagaaatagagaagcaaacatccatatccacgtccttctctcactaattaaactactgtatcaacaaaacaaagagtccttaatggattgaggaaaaacagaagccacttctttccttacaaggtgaatatcgacaaccacaaactacttaggaacatacaatgtagaagaatatggtgatggagctgatggagcccccatctccatagacaactctatgattggaaattggaaagaggggaagtctttttttggaaattgcaaacctttctcaattagaagggacaaggaagaaggtttgagttggaaggaaacaaagattgataagttctctatatttaatctttctatgcatccttagcctagggaagtagtgagcctttctttgcaagcattatttggaatccttgggtggcaacaaaggcgggcttcttctcttggaaagctatttgtggaaggatcttaactcttgatcagctcaggaggaggtgttggagctttttgaacaaatgctacatgtgtatgggggataaagagtcagttgatcacttgcttcttcactgccccatagcgaaaattctatggcagttggttttctctttgtttggagtggcctgggtaatgcacaattccatcaaaggcaatcttctgagttgacattattcttttataggaaagaaaagaaagaaagcttgatgggtcgctctttgtgcctattttggatgttatagaaggaaagaaataggaggtctttgaagacagagagtagtcaaaacaagttattaaatcttcctttatgtataacttcatgaattaggctagattgtacatagatgatcatgctacatcaatggtaggctttatagacaagctgagctcgtagtaaggagaggaaggttgttttttgttttcctattttggcgctcttgtgtacattgtgtctaccttgcagcacctatttctgctgctttctttttaatatttgccttggttgcttatcaggaaaaaaaaaaggacatgttttcatcctttttgctttgcaccaactatataccaattgaccaaagactaacttgtttgcatgagcagatcagttgtgaagactgtcccatatgaatctacaaatgcaaatgctttcattaggtgggggcaagtgccacaacccctaatctctctgagcaagaatgatctagaggttcctacatgcaaagttctgcgaaaggacctcacagagaaacaaccttttgtagaaatattccaccccaatctttcatccctttccccatgaataagacaaaattgaccctaccatctccaactctcagtcatgactcatgagaactcctaaaattatgggattccaatggctccttacacccttctcaagccataaatttggcatctgagagcatttttatcagcgactatgaggaacatatttggaaagcagtccatcaaactcccatgcttgacaaatccaaccagaacctacttctaagacaatttttcactaagatacaagtgcttgcatgtataccttgatgtaaagcatccttgttcatttataatatttacccttttacttatcaaaaagatacaagtgcttgcatgaaaattctcccaatttctctttatagcttttgcaggtctgccccagagtctagtaggaaggaacgttgctattatgagatatgaggaccatgtttaggaggcagcaccttgacccaaatcccttgcatcaaggatccatccaaaacctacttctaagaacatttcatgctaagatacaagcgtgtgcatgaaaatcctctcgacctctcctatagcttttcacaggcctgttccaaaggctatatacctgccacagaacaccaactaccctccatcttaccatcactcttcacagcaaagcccgacaactacttatcaagcaaggccttattaagctccaaatccagtggactcctaacccacaactcactgaggcttatcaaaactaactgtggaccacttaatcaaatgcagtcttctccaagttctttccaagaagatctggagaaccctagggattaaaaaaaaggacatgtagtagattgagaggctagatatgctacttctcaatagtgttaatctaccccacttggacaagtattgccctttccgcaaggcatgcctcttcttaaccaccatccaactggatcccaaactgggatagagatgaacaaagccaaaagtaaccttaaatactttgtaaataccctaacttcacccaagtaaagacaccagtattctatattgtccactctgcctgctggattgacttatttttttccaaattaaatttaagcctagaggccaattcaaagctcaaaagaatccagttcaagtacaatagttgatcatggtttgtattagaaaacaaaagagaattgttagtgaaaggcagatatgaaatcacaatcccctcttttgcagccactagggcaaccaccttcaactgctatggtaataaaacaagtcagatcttccatcactggaacagaaaggtacgggacaagggggctaccattgccccaaactcctcaagtttgggaaagaaattagtaagggcaccattatcttactatagaaatgcaaatgaatccaatctatccattatttaacccaattctattttggccatagcagaacataagaactcctaatttacaatgatctcaatatctggctagcaggtcatctctgctctgaaaatctttaactctagagtcaatggtctcacaggatcaaggacagcatccagaatccatctctcatgcatgatggcattttgcacggaaacaacttttccaataacgtcattcatttaattaagggtgatttgcatacatgactcaaaataactatcaaattgtaaaagtaacctccccctttgattttgttgagaaatgaccctctttggactcttttacccctctttgttctgtttgctttcaaaaacaattacattcccacatttttgttttcattctatttcattttgtcatttttaagggtgttttctgaccaaagttaagtttgctttaaagaaaacttaattgatgttaggttttcaatcataatgataatttgaactatattatagttaagtttcattggcaaaaaacttgaataaggttaagtttctatttcatttatagagaaaactttattgtagtcatttgaactttattatggttaagtttcatttaaaaagaacttaattgatgttaagtttccgtttatccatcaatcttgtttatccatctatcaatcttgatcctaggacttgttaaggatttaagatttagcaagtaacaactttttaacttatctttgaaactacaaaaaaccctaacaaaaacacaaccgcacaaaaacgcaaccataaaaaaaccctaataaagaacctcaaaaaacttcaaccaaaatcccaaactgaaattgcaaaaaacaaaaaaaaaaacatagaaaaccttgacaaaaaataatgccaaaaaaacccaaccaaaaattgagattgcaaaaaaccaaaaaaacaaaaatgataacaaaaaaaaaaaaagaacgacaacaaccataaaaatccctaacaaaaaacgtcaaaaaaccctaacaaaaaataactagaaatcctaacaaaaaacaattacaaaccccaacaaaaaacaactccaacaaatctcaactaaaaaaaaccactttaaaagaaaatcataaaaactgttaaaagttttgaagaaaaaagagatgagagtactttgttcattgatctttgatctattttctttattcaatgatcttttatgggtttgaacttcattggaaaaagggagaatgtggtaaacctaaagagagagagccattatttggaaaaagggacaaagtgtaaacttgaaagagctaggtatgaggaatgaggagagttgggtatgaagaaagaggagaaatgaattacaaatgagaggaaatgacattttgagaaaataaagaggggcaaaagcatctcaactgggtttttttttttttttcctttttataaggaaggctattcttccaatttcaatagtattggaggtcttttagccaaatatctctttaattaacttggatctttggcaaaagcttatgctttttcttttttctttttttatttataggcaaaacaatgatatgcattaaaagtgtctgataaaggacacaccgaagtacacatgatgcatacaaatgtgcctaggcaaacagaagggaagagagcttacaaaaaataactgctctttcctttgttggtaccaaccaatcaacaaagcctattatggttataaaacaatgaactatgaacactctaacccaatccaaaaagatatgtataaggaggacttgattgcttgttctgactgtaagcttatacatacaccaacccaaacttattggtctaaagacctttatgctctcagcacctccctttctgggcaccaatagaattaagatggcattgaagattttggctcaaaaaaaccttgcagaagaaagtcttgcaagaattttgtttcctcagcttgcattgaagccccccacaaatttgtcaaaaagctattgtcagaccatcatgctccaaggctgtcctcatctaggtcttgataaagcaaccaaaacctcctaatcaaacaatccctccaagccttccctatctgcctcattagtcgagttgaatctaaaccctccaattctggtctcctttttctagggtccaagtaaagatgttaaaaaaatctgccaccatcacacaaatgtcagacacctttgaaagccactccctcatccctcctacccaccccaaatccttgctgatgtagttgccccgcctgtgggcattagccactctaaaagaatctggtgtttctgtctcctttaagtcagagagcttgagatttcttacctccaatatgtcttcaactcctcagaccaaactcctcaacagaaaaaggcctgactatggtacagagttgttccaattttagtaaaagctgttggcaaggaagatttaagtagaatgaagagaagttcaagtggctattaaagagttgcttttgcgggataaattaggagattgatgatcatgaaaaatcttaagaagaggatgtagcctggactaaagaagaggatgtattcccaacacttttggaaattagatgcaaacaaaaccaagggtacctactgcatattgtttccaaggtttaagatattatttctcctatttatctggaattcatctagaacacaggaataattaggggctgttgttgattgttgaaagttctgtttgtgatgtgttttacttcaaggagcatttgatagatattggaaagtattccagttttgttgtttcaaatcctattatattgtgaaattttatgcttgtttagtttcatatttaaatgcttattaactataacttctattgagcgagaattctcaatacttcttctcactaggcggagtgtgaggaactacaagcaaaggtagaaac

SEQ ID NO: 12787 - DNA, 2017 bp, Vitis vinifera
  Intron number 4 from transcript GSVIVT01003120001 (locus G SVIVG01003120001) derived from phytozome v7.0 (chr-ID chrU n; pos 7437367 to 7439383 reverse strand)
ggaaagagtcatttgcactccaggtaatattgttctctctctctctctatatatatatgtgtgtgtgtgtgtgtgagtatgaatgcataagctttttagaagaaaacttcattgccatatcaagaccatgaataatctctttggtttgaaatattgttggtgaaaggaaagcattatcatgccaatgacagatgggcacccattttgtgcattgattgaactctttcataggtgcttcttgtaaccttgattatctcttcattatgaaggacaaatggcaagtcctgatgctagctgaagttctcttgaaatcttaagaggctatatttttaattgttgtaattatagaaatcaggttctggaacttctgaaccccacctaacttggggggtttgcaaaatagcctgaagattgaacgaagtttagggctgtgatcgtcgggtttgggctagagaaacaagatggctactttgcaagtttaaacagaagtgtggaaatgtagtaaaatgtgcaagtgtggaaaaaaggaagaaaaaaccagggatccatgcttctacttaaactaagcttacacattttcactaatcaaactctaatatccattttacattaaggggccatgtttgtagaatctggaagagtttctaaatgtaaaaatcttgtaacaagacggacaaatggtggactcaagttactctgcaggaaatttctgaacatggctagtttaacaacctgacttgagacttctaataactcaagttactcaactaaacccaaataagaaaaaacctgtgtaagctacttctgaccgagataccagactaaaacttgatatttaccattataaaaatcactttggtagattaaaacttgaaacagtgagataagctgagaccctaatgacttaaacatctatcatagatacctgttgttgaattgagaaggttttgtaatttgtttatggtctgaagccataatcttaggcttccaaagaggctatgccttttctaaccaagaaccactactgcatcactgttaaaaaatatattttttaactgttaaaatgattgcacataaaaatggtagaatgatagtttgtttttttatgttaataatgtttgatagatttacctatttgatgagttttaaaatattcaagggaattagttcaaaatttcctcgggtagtgagcccaagaaatggcagcctttttgctattggaatttagtagcagccaaagcttatatggaagaactactgccaataacactcaaataggtgggtacacctgccctttgttgaggttgtttacaaggatgaaataagctggggtaggaaaagggttcgaatccatgttcatacaattattgaagataatagtgaattattatttgaatctttctgggcatatagtaataattcagaatagtttcttcttgggccatgtacctcatttgtcttaatgtctttctacttgtaggccatatatcatctcaatttctgtaaatctactagattcttttagaattttttttcccttgacccacagtcttacagtctgaatcatgattcaatttgaattcctactcataatttttctgatccagttcagctttgacaacatttttcccaatgaacagtcttttcctttattttaatcatggcattgttttcctttttgcttctctacttttctataattaatctcattattaatatgtttataagcatgaacttgtgtgccttttttgcttcttttatattcttcgtctattattattatgtttttggatttgtgtgcttttattttcctgcatctgcatctgtctccaatttcaaccccttataagatctctaagcttgcccatgaaaaataaatcttagaagtttcagaatccaacataaatgaacctcattgtccaagattagaaaagtttgtgtatttatgattttctattttttggacattgagataaatttttttgttcctgttgttttctgctgcaggcattcaaga

SEQ ID NO: 12788 - DNA, 8576 bp, Vitis vinifera
  Intron number 4 from transcript GSVIVT01019978001 (locus G SVIVG01019978001) derived from phytozome v7.0 (chr-ID chr1 ; pos 12070756 to 12079331 reverse strand)
gaagctctagttcgaggggttctttgctttagtgcagaaaaagggagatcaatacgttgcttactaatgaattaattgtagcaaaagaccaagcagatattgcgctttccttggtgtaatatgaaaacttccacacaagttcgcatgaatatttctacttggagtgttaactagcatcggtttattccagattcttttaacttctaaagcaaatgggagcttaacatcctctagaacattcaagacttggtatgattttataaattaatttaagatattattattaataacttgacttaaatgatcctattttaaggttaaaattggcacttttatttaattaatttaagctaaaatgatgcttgatctttatacagaaagagggaaaacagaacagaaagctatatcagcataatagcttaacctctctaactctctcccccaaattgatgttggggaggagactgttaactttcctttaagcctttcaaagaattgagaaaagaaaggttttgtatgtctactacttggttaatagaaggaaatatgattgacaaccaattccttctgcaacatcttttcttgaacaaagtgtaagtatagttccttgtatttcgtctttgaatgaagaataggattttccgacaaagctattgtgctaaggttgtcacaccaaacagtagaagaagtgttttgcttaattttcagctctataagaagggactgaatccatatcaacttagaagcagcattagccaaactcctatactcggattcaatgttggatcttgaaaccatttgttgcttcttggagcaccaaaacactatattattactgagaaaaatacaaaaaccaatagttgatctgtgatcaacatcattaccccaatcctcattagaaaagcaagtgagattgagagtgtttgacctcctaaagataatcccttggcctatggttcccttcaaataccttaaaatcctcttgacggccttccaatagataccccatggtctttgcatagattgacataatttgttaatattgaaggcaatcttaggcctcgtgacaatgatgtgttgaagacctcctaccacacccatatactcatgagcattctttataagatcatgacccttttgagaagaaagttggaaaccactaatcattggtgtgggtaaaggattagcattgttcattttcgctttcttaagaaggttattgatatatttcctttgagacaagtggaacccttctacaacttgcttcactttgaagtacttcaactctccttgatctttaaggtttagatgaaaaataagtttttctaactctttattgttactcactattatgatagtatcatctacataaactaggataaagacatatgagttggttgtgatttaaaaaaaaaaaaaaaaaaaaaaaaaaaaaaaaaaaaaaaaactaaagattgacctactttggataaggtgaacccaagtgaatataaagaatcttttaatttttcaaaccaagctcctagagcctgcttaaggccataagacctttaccttacttaaaacttggtggttggtccatatacacttcatcttgaagacttccatttacaatgtgttgttaacatctaattgcctcaattaccatccacaagccatatctatagttaagataattttgatagatgttatattcacaataggtgagaatgtttctatgaaatcaaatccaagagtttggagatacccttttgcaacaagtcatgtgtagaccctcaattttgtccacctagcatatgttctactaagtatttgttcggtgctttatgacaattccctgatggcccattactattcatgtagtctatattttctaagccaccttaaagactttgtttgagagatttatttaatcccgttgtgactcttggcagctttaatttagacttaggcccacttaggcaccctagacccatttagatacacttggcccattaggcattaccttaggcccattaagatgcacttgacaccttctaacttgcacacattcaccttaagttacttagacaatatttcagaataggtcacttggacacttcttttgacatagcccacttaagcgtgttcttgattttggttacttccttttccaagataagatgagtattggcttgactatttattgcatgaaatgaatttttattttttatttttgagggtttgagtttgacatttaaattattataatccgttgcattactttaatttcttgattttttctaattgcatacgtctgatatttatttttatacccttatcaatttatttgtttatttactcacttattcatttattctttaattccatgaattgacattttggatttttgtggctatgtgatttgattttctatttgattttattctattttcaattacatgatttcttatttcaactttatttttaattttgcatgagacttagagccatcaaggagaggagatcacaaccaaatagggaaacttggaaggaatccgggctgcatatagaaagtgggcatatcacgactttaagaacgaatctgggctgcatatgatttgctttaagagggaatccaagctgcatataaaaagtggacagatcacgactttaagaaggaatttgagctgcatatgatttgcttgaagaaagaatccgggttgtatatagaaagtggaaagatcacggctgaatggggcacatccgacagcatatgagaaaaatattaaaggagaattttggaagatctcacgcaacatataaggagtgggctaccatataaataagggtgaagatctacacacaaaagcgggattttttttttgggggagggagaagtaccagaatttcagaggaaagataagtgaacacgcatgcatgggggaatgacggctggcctttgaatttattttagtggcttaaaaattaagtggcctttgagttgattaatttttatgaaatatacatagatgaaataatgttgttggcatgggaagattttaatggctttgtttcaattaaaaaaaaaaaaaatcaatggaagcaatgttagtatttttttatgtttgcataaaataaaaaatcaatggagatgtattatgatgcttggtgttttcttaaatcaatgaatgagaatataggaaacggaataatattaatggttaatggcatatcaatagatgactatcgaggtcaattaactgtttatacttaggacatttttggatcataatttaacacttaaatttggacacagtagttttaaatacagctgagggtgagtcagggcctaagatcaggccgaaaggtgtagtcgatgggcaacaggtgaatattcctgtactaccccttgttggtcccgagggacggaggagactaggttagccgaaaaatggttatcggttcaaggacgcaaggtgaccctgctttttcagggtaagaaggggtagagaaaatgcctcgagccaagagactaataaaataaataataatagtaggaattctcttatcccattcggaaggatctcatctcataattatacatgactgtttatatctctagcatgaccacttgatgaaatgtggagagaagtggagtaaatggtcgatactactggaaggattcctctttggctaataggtactgtaactggtattcctgtgatcggtttaataggcattttcttttatggttcatattccggattgggttcatccctgtagtaatcggatgaattgaccctaggttcatatttaggacacttgagtttcacattggcacactagagagttcacatatacacacttacactctttcttaatagttcatgtttgagattctatgtgttttaatattttttttaaaattaatcctagatcaattaggtaaagaaaggtcaattttccaaaattcatgcaaccaattttatttggtattcatatttgaaaaaagttttaaaatgaatttttctccatcatgaatttggctccttgaactcaaatgaaaggtagccaaaaaggtgatctaagttgatattttcttgttttcaatttcttttaagaaagaaatcaaaaatacctattttgtgtagaatgggatatgtcaaatcacttggtttcttttactccctctaaaatcgttttcaaaagaatttaaaccaataaaaagcttttaaaaaaaacattcattctagatttaggcaaagaacacattttatttggaaattatgcaacttatttcaatctaagttgcattctcctttgttggttttcaaaattttgtttttattcatatagatttgaacttgtgctcccaagctaatgggaatacacaggttaaacttatggatattgaatggggatttgatggaacccctacatgaaatattgttttcaaaacttatctttgttgccacttttgctatttgttgtaatcataaccatcaattttttaggaattgtatgtaagatgtatgttataattgatgattttgtatactctgataattttttctatgttatttagataccaagtatgcttgaatttctttcttttattatttattactataattttgatctaaccctctatgtcttgtggaacatgttatgagtaatctatgctatttaggtatgccctctatcctccactctcaaaattccatgaatacgcatatcaatgtgaactatgcccgtgtttgatactgtccttgagtgcctcgatgtttgattgattttctcttataaaatgcatattgaatagaactaactttgatgattttgtgatagcgcttaagttgcagtttaggtacgtatactatcattccttatgattgtgttttgaattattctttggcatgctagtcacaatagtgtttcaaaatcaccttaagccatttaggtatccataatcaactgactaattgtcatattcccctcaacttagctagtagagacctcgttagggtttaaaggggtactacctctttagaggtacttcccaataagtgacctgatccctggacttaaactcgagttttcgtagacagcttttccaagccaggagtcatttttagggattttgttcttacttgatttcccctttaaaaataaataaaagtggcgactccagttttgtttttttttttaaatacagtctttcaccttaattaaaagcgagttttgccttctagtggggacgtatcatgaaaaatgtgagtccacaattttcgtcattggttcaagactgaagcataaaggaaagaaagggtggctactcatttgaaaatgaaggctctgataccataataagctaaaatagtatattttctattcatgattctcttaatatatacacaagaatgggttgtacaggttgtatatacaaacatgattttaggttgttttataggaaggaatattgtgattggcctttacaagtaaggttatacaatggtattcaatatcaagcagcaattgtggggtctagctatggagtgttagtggggttggctagttagctgtaacgactccttccttataatatttacctagagttgaataagaagactcacaattatgacatgcatataacaccttaaggcatgtttgcctataatgggcttgcaacccttttcagggttttaatagagctaactttaggtctaaatggacacatgaattactagttccaacaatttagcctaaaactatttatctcattattgttcgtgcttaagctattagtcatgtatcattccactgaaggccttagattgcattataggatactacgacttaattatgacaagctatttagctcaactaatggatatcaggttcatcggtctgctaatatctatacatacaccctctacgtgacatttataattaaaactttaaaataattattagacctcttttatcacatccatatccttaaattattaattcatttatttcatatttgattggttggatatagtataagataagataagagagaagatattatacattatctcattatttgattggtaatggaaaataaaaagttatctcatcacttattttatcttatgttcaattaaacatgggataagataagtaataagatatattctctattttcttttttgtatcacttctatatgagataagttaatcttatactaagatatatgagatatgcatatcttatacatcataaatttatttttttcttaatttttattttttatatactcattttacgaaataaaaatgtctttattgtaaattgaatttatggttaaaaaataaaaactaaaaaaatatttataaaatatattatagaatgatattaatatgtgtattatatatatatatatatatatatatatatattttatagaatgggagaaaaagaagaaaacaagagagagaatagaatgtatgcataaaattgaatagattttcattagggtcctacgaaataaaaatatttttattataaattaaatttatagttaaaaaaagaaaaactaaataaaatattttaaaaatatattatagaataatattaatatatgtattatttaatatatcatttgatccaatatagcatttgatcattatagtaaagattgatttcaatttcaatttgaatttattcttcatctagtttggtgagaagcttaaaagctactaaaattaatattatctaaagatgaaattcattctctcaattattaattttgaataattattccatttttcatcccgagtcatctcctaaagtgaatccatatagtttcattaaagtgaaccacaaaaaacattcaacgaattcatcatacaatcaccatatttatatcaatctcaagagaaaatcaacaatttaagagagaagaatttaatgttattacccaaaagattttcctccactataattctccaatgctagtgatctccctatatttggctagtgaggaatgtagaggaaaaacaaattattacatatctcaattacaaatgaattcaacttcaaagattgtcaaaagttctaaagaaagagattaagagatgcaaacaattaataaatactaattttaaattattattattttttaataaaaataagtcagttatgtttttataagatattaatatccatatttttataatatttataaaaaataatttatgattatataataatattattatttatattttattaaaattatcatattttatgtaaaccatcaatccaatccacacacaataacaatacaattgacataaaattaaactttattaagtaataaatcagatgtcttatatgtgggtcatgcctaatattaaaaataataataataataattaattccatgaaatcataagaaaaaataaatgaagtttgaaaaactaggctggaataatttatcaaccaattaattagacttcaattgccttttagaaaaattgaccaagggaaaggttgaagttttcaaaggacagggtgggaagggaattaaagacaaaggaaacttccaaaacaaagaaaacattgacgtcaacgcgtggatcatcacaccagctttaaattttccccttttttttttctttttttttttttttaaattttattgccgcttcttttaatataaaataaaaatatgtttaaatattttttaattgaaaaaataaaactaagccatgatctcacataagatattttgatggggtaacactctatcctatcttttagagggcaataataagaaagggtagataggcagtgggctacttgaaatggtcaacaatgggattggattgaaatcaagactgaacgtagtggcgtatttccaacatcctcttcacccaccaaaagagaaattgtgactaaaccctcagcctatcagaatcaccttagttgttttgttatcaagaaaagattatgttgagtttgggaaaggcaaccaaaacactattccaataatgatatggagtggattttggatgacaccaagcaagaatgaaagtgacaaaaaagagatggaggatatttggggatatgtttatcttcccaaatcatcaagacgtggtgggacatgttccaaaatgcgttgttgtttgcttattttcagaaatttaaccacgaccttcaaatatatttaagttatgttttcacttttcagttctgaggttacatttctgttgtttttttttttccttttaaataaataggggaacaataattccgaattttgtggaagatacatcttttcccaagcagagccttaagaatttcaatgggtccgggcgggtggggctatagaagaagcggtcttctacgcggtaatatctacagaaaaatcaccaatttgccctcgaaggcgttggaaggacgtcaccagggtcggcaacgccgaagctaacatgctcctacggtcataccgaagatcctatatatggttgtcttattttcagcaatttttattctcgtcaataacaaagccaacaacacttctcacagggagatttttctggtc

SEQ ID NO: 12789 - DNA, 2270 bp, Vitis vinifera
  Intron number 2 from transcript GSVIVT01016807001 (locus G SVIVG01016807001) derived from phytozome v7.0 (chr-ID chr9 ; pos 1560790 to 1563059)
aggaggttgctattaagcttgtgagtttttattcttttataattcttgtgggaaatttatgaaattgaacgttttatatttgttaattttacatagaaatgtatgtttgtgatttggaggaatttattaaaaaacttaaggactactgagaaaattgttgtggttttatgtaggaagttctgaaaatgtatttatttgttaagtttgcgggaattcataagaatttagttattgattttatttccttttgaatttgaatttgctgctaaggaattaaatgcctggtcctgaaatgtttcatttccttattttccccaatgacttctaaagacactcaaaattgtatatatatatatattaaaaattttattattcaaacatatattgtaaaggactttggcaaatttatcttaatgttgagatgagatggatctgtacaaatcattttgcccaagttctttgtttggtttctgaagaaacgtaggaagagaagaaaccaaaatatggaatcttaaatgctatttcaacttattaagaaaacaagaaactcttaatacaactgctagaatttgatgaggccagtttctttcatttttttccttttttccttttttttgctccttctcttttgaaaccccacaaaataaaatagcatattgtaaaacctattttatttttttctccttggttttcttggtttcgaaatagaggtataggataaataggggctatttaaagcattatttggtatttattatgttgaaggttatgggaaatagcattgagagcttctaaattatattctttagttcttaaaatgagctctttgagagattaagtgctcatagcttgtctggaattatgctagagactttatagtattgtgcaggtagtcttaactaagatatggcttacaatgtggttgatccttttatcatctactaagagcagagttctgtgttctcaataccttctagagtgtggtgctttgtgctggttatactttttataactatgtttccatgcctgagtgacatcaattttttttttccctgggttctgtttgttgcatgtgttatttgaaatgttatctttaatgggatttcaggttggattcttttaggataaaatactaggcactggcgttggagttaataatggactgggacatatatggaaatagagtatgtgcttattataccttttcagagggtcttggagccctttgggaatagctaaatgattctctttattctcctcctcttggggaaattttgcataacagggcagaacaaccttcataaacttttggtattgattttcatagattggttgggttgtaagtgaagcaaatatgttggttttttgtctatccctcctttttttgggccttgtatactttgtgtatacttttggcgcttttaatacaattgctttacttattaaaagaaaaaaaaacttttggtattgataattattatttaagctatgcacatggatttagtctggatgattgtgatttttcaagaagcatttagcttggatgttatggcttaggggattgctaagaattttgaatgaccaactgaatggtgttttggtgcttctgaattaattcacaaaaggaaaaacatcatcttgtactttccaagtccacttagtaatgcccctttgggtttactaattgagattggtttagtttggctcaaaggagttgcagtggcaatctttggagtttactaatcttagtggacttggttatctagccactcagagtttaatgccctagataaaagttggaaatttaagggacattagtaaaatgagaagtgaagaaagtaccctacctgtgatctgttcagtgtggagtaataaaacataccacgtattgatctcactaaacagcctcaatttattggccacaacaaacatttttgaaatgaaaattgtgtgatctcatttctgtatagcaagatatgtttatttttttttgtctaaaatcttatgaattattggtaacagtttaacaggaagactataaccacttgagtagttagatattaccgtccgatcataccagctcagaaatgtacgcaacaactgctagtgctcctgacatccactgtattattgaccagttttttgtaaatagattctatgcatttttttgtcaaaggcatggattcatgtagacttattacaaaactttgctgatgataataaatgtcttgttctgtattattctgatattgtttcttgttttcaggaaa

SEQ ID NO: 12790 - DNA, 18445 bp, Vitis vinifera
  Intron number 16 from transcript GSVIVT01030782001 (locus GSVIVG01030782001) derived from phytozome v7.0 (chr-ID chr 14; pos 16000453 to 16018897 reverse strand)
ggatcgtgccaaaggtgaaatctaatttgtgcataaaatagttcagttggcaaaaatgtctgctcaatttcaaccatcatttccttctgttgactaagcatttattagtttacaattcttgcttttctcacaatctttgttttatagctgctctttgtgtggtcatgaattctttaagggcttttgtatatgccatatggagtatgacatttaaaacagaaagaatatcctgctttattgtcttattttgttggtcttgctcaacttcaacaagacccaaagcttcatctcaaaatgttaaagagatgcattacgctttttcagtcctaagctggtctgttttgtctgttatttttctgggagcaagtggggtggttaggggtgcaatctggttggtggtggtttggtttggctgtgggagaacccctacaatgctcaattgcttctatatggattattgatgtatatggtaatcaataccagaaatggttttacaactggaaaatgaagggcgaaccctgaggtgaagtgtttaggccttttgtatcataagatttttgaaaaattatgtctaagagacaaaacatgaaagtaaaacttacaaaggccatgtgactgtggaaattgttatgaaggccaggcataatgaaatgtttaaactattaaagagcatgatatatattgtgaacccaaatcctataagtttaagcttttaggaaaattgatagttcaacatggttaaagagtatgatatatattgtgaaccaaaatcctataaggttaagcttttaggaaaatttgtagcttaacatggtttcagaacttggtttggtaagaggtcatgtgtttgagccgcatctctacaatttgcatatttgtttccccatttgcatatttgtaagtctaaaagggctatttacaaatgtttacctatgagcatgtgtatttctccatgtgcgggtatggggttgcacataatggagggtgttaaagagcttgatatacattgtgagcctaaatcctattaacttaagcttttaggaaaattagtagttcaatatagtatcagagcttcattaggtgggaggtcatgtgttcaaaccgcttctctgcaattcgcatatttgtttccccatttgcaagtctaaaaagggctatttgcagttgtttgccttcgggcttgtgtatctttccgcatgtgggtatgatgccgcatgttagggagggtgttaaagaacattgtgaactcgaatctgtagaaaaaaaaaatgtcatatattaattgaataaggaagggaaacatgctttcttttatagaaaaactataacaaatcaaactaaatttactgatgtacacccaaatttctaggaaccaagcgaatttaaaatatacaacctatccctaaaaaacagcaacaacttatccttaaaaaacagcaacaaattattcctaaaaaacagcaacaaataacaatcagatcagaaaaattctgatatgattgagattctcaacacttcctttcaagctggcttgaagatgtcattcatggtcagcttgcttactaaatcaccaaactgcttctttggcaatcccttagtgagtacatttgcaacttgttcaaccataggtatatagggcacaccaatcagtccattttccagtttctccttgataaaatgtttatcaagttcgacatgttcagttctatcatggagtactggattatgtgcaatggcaatgacaactttattatcacaaaagaccttcataggtaaagggctagtagccttaagttcttcaagtaattgtttaatccacaaaacttcacaaatgccatgggctacaactctaaactcagctttagcactacttctagctacaacactctgctttttactctgccaagtcacaagattacctccaacaaaagtacaatacctcgaagttgatctcttatcaattacacttcctgcccaatttgcatcagtaaatacatccacttggagatgtccttggttctcatagagaagtcctttcctggagtcccctttaagtaccttaaaattctatacactacatcaaagtgtccctgatttggcgagtgcatgaattgactcaccatgcttactgcaaaagcaatattaggacgagtatgcgagagataaataagtctcccaactaggcgttgatatttctctttgtcaatcacctttattggacttgctggttggagtttcaaattcggttttataggagtttctatagccttacatccaagtaaacctgtttcacttaataagtcaagtttatattttctttgagaaatgaaaatatttttcttggatctagcaaactccataccaagaaagtatctcaagggactcaaatcttttatctcaaattcacgagttaaagctttcttcaatctctctagttctagactgtcatcactagttagaataatgtcatccacataaactatcaacacaacaatctttccttctcttgagtgtttataaaacattgtatggttagcttgactttgaatatatccttgaagcctgattacttttccaaatctctcaagccaaaccctaggagattgcttaagaccatacaaggacttctttaatctgcaaaccttttttttttttttttttcctttttctagcatttcttcgaaacccagtggtaaatccataaacacttcttcctccaaatcgccatttaagaaagcgtttttcacatctaattggtgtaaaggccaattaaaatgtactccaagagaaagtaaaatccgaatggaatttgaagaatttctgaactcctttattgatctttaatcggtacacaccatacacatatatatacacaaatgactgaataagaaaaaaatcaatctagcttaattctctcataaaattaggaaactaaatcataaggaaatatcctaaatgatttctccttttttattcctaaattaaagtcctaactttggcattatttcaacactccccctcaagctggagaatatatatcatataatcccagcttgcaagttaagtcttcgaagttaggcctaggtaaagctttggtgaggatgtctgcggtttggtgcttggtaggaacatagttcaatttgaccgtctcactagtcaccttctctgtgataaagtgtctgtcaatctcaacatgcttggtcctgtcatgatgcatggggttctttgctatgcttatagctgcctgattatcacacatcatcagaattggagatgaactcgtttgtcccaattcactaagaaccctttttatccaaatcccttcacagattccctgtgcaagagctctgtactcagcttctgcactacttctgactacaactgattgcttcttactcctccaggtaacaagatttccccagacaaaagaacaatatccggaagtggaccgcctgtcaatgatgtttcctgcccaatccgcatctgagtatacttcagtgtcacggttctctgtctttctgaagaataggcctttccctggtgtcatttttaaatatctaagaatcttgtagactgcttccatgtgttcctcagtggggctgtgcatgaattgacttacagcactcactgcaaagccaatatctggccgagtgtgtgagagataaatcaagcgcccgacaagccgctgatatctccccctgtctaccggtttactttctttctcgataccaagtttcttctgactatccataggagtatcaattggtttgcatccaagcataccggtctccttaagaagatcgagtatgtattttctttgagagactacgattcccttccttgatctagccacttccataccaaggaaatatttcaaatttccaaggtctttaacttcaaactcttctgaaaaatacttcttcaaattctgtaactcccccatatcattcccagatagaataatatcatcgacatagactatcaatatggccaatttcccggcatgagacttcttgacaaatagagtatgatcagcctgaccttgtttgtagcccaacttcaggactgcttttgtgaatctatcaaaccaggctcgaggagattgtttaaggccgtacaaggatttttggagtttgcaaacctgattctttgccatactttcttcgaaaccaggtggtatttccatgtagacttcctcttctaggtccccatttagaaatgcattttttatgtccagttgttgcaagcaccaatcttgattgacagccaatgagagaaggattctgatagtgttcagttttgcaacaggagcaaaagtctcctgatagtctatcccataggattgtgtaaaccctctagctaccaaacgagccttgaatctttcgactgatccatctgctttgtattttatggtgaaaatccacttgcaccccacaggcctcttcccaaccggcaaatctgtgatagtccatgtcccattcttctcaagtgcatcaatctcatcttgtactgccttcttccattctgaaatttttaatgcctcttgtattgtgttgggaacctgagtatcatcaagagaagtagcaaatgctctgtaagatggtgataacccttcatacgtaacataattcccaattggatgatctatacatctcctaacacccttcctcaatgcaattggcaaagtagaatcatcaatgctgggaattaacacctctccagccctatcctcacctatgttctcttcaggaagacttgaattggagtcaatatattagccacatgttgactgtgatccgtgctctaattcctgtcttttcctcctcctgatgtaaacttgtaagttctcattagcaagttgtggggctataggttgaataggcatgagagactggatggtcacgggagaaggaacatttgtgtgctgggctggctgaactgatggcggcatgggtgtggacaacttagtgggcgcgaattgggaaggatttggtgactctgagtgaaaagaaggtacaccctcaagaaaagactcccaaacttgatgttcattcatgctctccccctgaacatgagatttgggatagaagaagacatgttcaaagaaagagacgtccatggtggtgtaaaatcttttgttggttggagaatagcatttgtaccctttttgggttggagaataccctagaaaaatgcacttatttgctcgaggagcaaatttgctacgattttgaggatacacatgaacgaatgccgtgcaaccaaatactttgagtggtaaattagaagaggcggcatgggtgtgaggaaactgttttaagaaaagttgacgtggggattgaaaggtaagcactctggatggcatacggttaatcaaataggtaactgtgagaatagcttccccccagaaatagttcggaacattagaggaaaacataaggcaccgggcaacctccaagagatgtctattcttgcgttcagccaccccattttgttgtggggtgtcaacgcaagaacttatgtggataaataatgccatgattttgaagataagtactgagactactagtaaagtattcctttgcattatctgacttgaggacttgtattttggaattgaattgattttgaaccataagattgaaggtttgaaaaatgtgcccgacctttgacttttctttcataaggaaaacccatattacccgagtatgatcatcaacgaatgtcacaaaccatcgagtgccagaaatattttttatccgggagggaccccacacatcactatgtactggagagaaaatagtcgaaggtttgtatgggatttgaggatatactgttcgagtatgctttgcaaactgacaaatttcacagtgataagatgctggatttttattgataaataatttgggaaacaattttgcaaggtaaacaaagctaggatgaccaaggcgatagtgtaacattataatctcactatctttattgaccttagaatttgacacagaattgaaagactctgacatactctgagactgtacgcaacttgcttgagagacttggtttgagaattggccacatgaaaggaggtagagcccggaacacagttcagcactgccaatcatcttccccgatttcaagtcctgaaaaacacacaagtttggatagaatttagtaacacattggagatcacgagccaatttgctaatggacaaaagattacaatccaagtttggaacatggaggacagagtcaagatataagtctttagtaagttttataaaacctgtcccggcaatttttgactttgaaccatcagcaatatggacggatgaatgaccattacttagcttgtaattttgaagaatggcagcatctcctgtcatgtgatcagaagcacctgtgtttactatccacggcctcattcctcctcgattagcagtgaaggctacaccggtagtactgccactgccaacttggcttaataatttctgtagcatctccatctgctctttgttgaatggactcggctcgggaacaaatgtgctctcagagttggcagccacgtgtgctctgccatctctgtcaaaccgtggctttggtttccaatcagccggtttgccatgaagcttccagcaagtctccttataatggcctggtttcttacaataatcacaccaaggcctatcccgtttctgacgatctccaccactactattaaatggccgagcagcaagggcagaggcatccaatgttggggcaggttgctcttttgatcccatcatcactttctttctactttcttcacgcctaacctctgaaaaagcctccctgagacttggcaggggtttaatgcccatgattcggcctctaacatcatccaattccctgtttagtcctaggaagaacttgaacagtctcttttgttccacaatttgcctgtatgttgctgcatcatccgaacatttccatgagtgagtctcaaataagtcaagttgctgccaataccttgtgagtgtgttgtaatactgagtaactgattgctctccttggcggaagtcatgtagagctgattcaacctgaaacagttctgaagtattttcagaacttgggtaagtttctttggctgcatcccatatgtcctttgcagtcccaaacaacaagaaattttcgcctatgtcattgttcatggaattgataagccatgacatgatcatgctgttttcaatcttccacttcctgaaacccggttctgtagtttctggcatgactgcttctccagtgaggtactcatcctttcctttaccgcaaatgaacagcaacacagattgtgaccactgtaaatagttatgaccatttaatttgtgtcctatgatgagaataggagaggaatcattgccaccaaggtttggaatttcagatctgccccctgattctggtgacgtgacgctggatacttgtgatgatgccattccgtattttgtcatggaccggaaaggtagaagaacacttcccaaggcacgtgcagggactggagttgagaaaaaatagccggaggacgccggaaaatctgatcagagggcccgcggaagcaaaagaaccccaaaagaggcacgtgcagggctcagattgtacaaacaggtaagaagggtggctggtcggcgtcaggcgagcctggaggaggaagcgcgtcgccggaaagtgtctcacgcgccggcgcgtgagatgcagtcgccggccggaaaaacgcgcgtgggctgcgcgtggatgggtttctggttccggtgctttgggacaaattggagatctcctccaggcgctccttgcggtgtagaaaaaaccgtcgccggaaagttcgccggaagttcgccggaaaagttgccggcggtgagtgttttctgacgacgattcgactgaccggaaagcgttttctcccttggctctgagaacagggactgatgaccggaatgagagagagagagagagagagagatgatcggattgagatatggccagagagatttggccggaaggagtgatggcctgaataagaggtggccagaagggattagggtttcagaaaactggctctgataccatgaagaatttctgaactcctttattgatctttaatcggtacacaccatacacatatatatacacaaatgactgaataagaaaaaaatcaatctagcttaattctctcctaaaattaggaaactaaatcataaggaaatatcttaaatgatctctccttttttattcctaaattaaagtcctaactttggcattatttcaacagaattgatctttgcaaaagctgcaaaggtctcttggtggtcaattccataggtttgtgtgaaacctttatctactaaccttgctttatatctttcaatgctaccattgggcttacacttgattgtgaaaacccacttgcatcccactgtcttcttctccttaggtaaatcaacaatatcccatgttctatttttcaaaagagcattcattttttcttgaactactgatctccactccgagtgtcctagtgcttcctgtatagttctaggaatgaataagtgagagatatttgaagtgaaagctttatattttcctaagagtctttgataagatagatatttggcaatgagatatttggtacaattcttaactcttttttggattgcaatagggatatcaagatcaaaaataggtaaaagagtggagtccataggaagattacctagattttgagaactaggagctgatgattgaccatactcaagattgacttgattattcccagtattagaattaaacttgcgcctagtataaacacgaagcttagtggacataggttgtagagtttctctccttgtttgtgatgcagttttatttggcatagataaatcaatattttctcctttttcactaattaaaacatctgttttttgatttatttcaggaagaaaaatactatgttttggttgttcttgttgccaaaactaatcttcattagagctctcccctaaagagtagttttgttataaaagagaatattttcaataaagttgacatccatactaacatgaattttcctaatggtaggattaaaacacttatacctttttttattaggagcataacataggaaaatacatttttcggttcttggatcaaatttggattgaagatgagttggcacatggacgaatgctgtatagccaaaaaattttaagggtaaatctgacgtgaggcgtgtgtttggaaaagtattcttaagagtttgtaaaggtgttgcatagtttagaacccttgtaggcattttattaatcaaataacaacttgttaaaattgcatccccccaaaggtgtgtaggaacgttcatatgaaatattaagagccctacctacttcaagtaaatgtctgtttttacgttctacaatttcattttgttgaggagcgtccttacaagttgattgatgtaaaatacctttctctagcagcacctaaacaatcattcatcgtcactctaaagaatatttattttggtttgaaattggttttcaaccatagaataaaaatcctgaaagagttttgcaaccgcagacttagagttcattagataaagccaacataggcatgtgtgatcatcaataaacatcacaaaccattttttcccagttaaagtagtaatcttagaaggaccccaaacatcactatgtatcaaataaaaaggctttgaggcacaatacagttttattttataagaattgcaatgacttttggccaaaaaacaagtttcacaatcaaaagaagtacaatccaatcctttaaataaatctggaaacaaatgttttaaatagaaaagactaggatgtcttaatctgttatgccatagcattatttgatcatgcacaaggattaaatgaatactaccaataaaaccttgagcttgtttattctcaaactagttgtcatcaaaatagtagagattgccaatcaatctagcactgccaatcatcatccttgagttcgaatcctagaattcacaaagagaggcacaaaaaacaacacgacaattagaattcttagataaacgacttacggataagagattacaagagagttttggaacctgtaaaacgaattgtaaaacaatcttatcagacaaacgaatagagccttgcctaacaatagaagataagcttccatctgcactacgtacttttttatttcgagaacaaggtgtataagaaataaaaaaatgagataaattagtcatgtggtcaaaggcacctgaatctatgatccaaggtgcggataatgaaagagattatgcacacgaaagactacctgattgagctagagatgctataggagtaccaagagtcagtggagcaggttttagcagttgtagcagttggtctaattgttctttgctcaatgagggtgtctaggcagcatgtgctttagcagggaaacgattagagtcgccttgcttgttagtcttgcattcaacgggcttccaatcagctggcttcccatgtaatttccagcaggtttcacgagtgtggcatggtttattacaatgatcataccgaactcttggcttgtcatttggacgatgctagttattaggattgcgagaagctgctgctgcagtgcctaataaggttgagttttccagaggcttagagagcttcttcccaagcataacatttctctggctttcctcacgacacacttcagagaacacttcacctagagaagggagaggttgccaaccaatgattctaccccgaacttcatcaaactcaacattaagcctagctaaaaaattgaatatccgtgaattttctaccattttcttaaaatagttacaatcatccgtatttttccactcatagtcattgaataagtcaagatcctgccataaacccctaagcatattaaaatatttggtaatcaaattctcacctcgacaaatatcacctagtttgagttgtaactcatagatttgggactgatttccaaggtctgaatacatttgaataatgttatcccatagtgctttggcagtaggataacacatataattcgagctaatctcctcctccatggaatttactagtcatgccatgatcatggagttttatgcatcccaagtggcatagctggggtttgtctttgttgggtctttggtgtcactagtcaaataaccaattttgcctcgacccctaatgtacatccgaacagattgtgaccatttgagaaaattgttctcattaaggcgatttgtggtgatctagatagagtgggaatgagaattggatatgggtaattttgaggaattggaaccaatagtaatggaaggagtagattcagaaatttctggacatggtaaagagatagcaatagaaatgaaaagggaagaagaatagaactggaaagaatgagaggaaaaagaaagggaatagccaattaacttggctctgataccatgtagcaaagaaaaaaaaatgtcatattaattgaataaggaagggaaacacacttcgttttataaaaaaactacaacaaatcaaactaaatctacagctgtacacccaatttctaggaaccaagtgaatttaaaatatacaacctatccctaaaaaacagcaacaacttatccctaaaaaacagtaacatattttcctaaaaaatagataacaaccagatcagaaaaattctgatatgattgagattctcaacaaaatcctacaagtttaagcttttaggaaaattggttgatcatcataaacaaaccctctagttcattttccacaatcaaaattgtaggccttgcaggtcttgtacgtttagtgaaaataccttgtacactaagtgtattttgctcgaacatcaattagaaatgcatttcacttgcttttaaaattgcatttagattgtgggtcattgaggctatcctgcaactcttaagtactagtaaccatattccacaatcacatgcagtcctagtacattgagtgaaagagtcttgtacattgagtgtattttgcttgtacatcaattagacatacatttaatggcattcttggtatttttgctttatcaattggtcaaatggcttacatagcaattttgattccacatgtggttacttcagctattaccatgcttgcacaacttttgtagctcttacttttaggttctcttagacataattttacccaaaagtttatgtttgttttttttttctgttgaaaagttagtttggttggactagttcaaattggactcaaattttagaatggataggttccttgatttgaggaattatttgaattctagtttttttgtacgtagtcaaagttttattcatattaggattagaattagatttatttatttatttgtttgtttcagtttccttatttttagcctagaaattaatctatctactggttatttaaacggatggagcctatgttctgaaagatagagcaaaaaataagagtttgtccaaaaaaacctttcatggttttatggtattggagccagaggaaaaaaaaaaaaaaaaaggatggtgaagactactatgacaggctatattcatagggaggaatctgatgcaccgcctgggaattcacaactacaagttccagcaacaaatctggcagtacagagaacctaaccctgcaaattacgatccataaattaaatggatgtaattttcttcaatggtcacaaccggtgaagttgttcatcaaaggaaaaggaaagttgggctatctcacaggtgccaacaaagcaaccaatccaaaaaatcctgcgtaccaaacctgggattctgagaactccatggtaatggcttggttaatcaactccatggaggcagctattgggtagacctacctctttcttcctactgccaaggacctatgggatgcagtccaagagacttattcagatctaggtaatgctgctcaaatgtttgaaattaagactaagttgaaagatattaaacatggtagttattgtgttacacaatactataatatccttcaaaatgcatggcaagaacttgatttattctctaatatggagtggaagtgtgcggaagatagtgcctattattgcaagattctcgaaaaagaaagggaatttggttttttggtaggactcaataaggaactcgatgaggttcgaggtcgaatcctgggaaaagagttgctgccatctataagagagatcttctctgaggtgcgaccggaagagagtaggcgaaaagtgatgttaggagaacaacaatccagccaatctgagacttctgccttggttattcatggaggggagacttttcaacaaaatgactagcaaccaggaaaaaagggtgatcgtccttggtgtgaccatagtcggaaacgaggccacacaagagatgcatgctggaaaatccatgggaagccgcctactgggagaaacccgagacccgaccgcgattccaaagcctaccacagtgaatttgagaacctcaacaaccaaacaaccacttcaccattcaccaaggagtagttggaggtcttgcaacatctccttaatccacaaactgcattcacttctgtctcaggttcaccaaatgctgatccctcaccatcttgctctctagcataatcaggtagaactcaatacccatttagtgccttagccaattcttgtaaaccatggatcattgattccggagctacaaatcacatgacagggtcatctacttcatttacaacatatgtaccatgtgctggtaatatgaaagtctgaattgcggatggggtcatataccctagtagttggaaaaggaaccatctccttgataaaaactttttctcttgaatcagtcttacatgtcccaaatttgttgtgtaatttattttccattagtaaactcactagagatctcaattgtgtagctaaattttcttctactactattgtttttcaagacttagcttcagggaagacaattggtagtgcatgtgagtgtgaaggtttatactgctttgatgaccgtgaagttgtgcaaggacaagccgttgttgctggtagcaatgttttatcttttccttttgatcatgaaataatgttatggcactatagattgggccaccctagttttccatatcttaggttcttgtttccaaaacttttcaaaaataaagttgtccaattttcaatgtgaagtgtgtcaaatggcgaaccataccagattagtatttcttgctaaacctttcaggtcctctaaaccttttactctcatacatagtgatctttggggacaatgatggtgcaaaatggttcattaccttcatcgatgatcgttcaagaatttgttgggtttacctccttaaagaaaaatctgaagtctttcaaaccttcaaaaggttctatttaatgatcaaaaatcaatttcaaacatccattaaaatttttagaaccgacaatggtagtgaatatataaatgttgttcttggagaatttttatcatctaatgggattattcataaaaaatcatgtgtagatagatactccacaacaaaatggagttgccgaaagaaataatagacacctcttagaagttgctccgtccttattattttcaatgaatgttagaaaactacatcagggggatgccattcttacagcagcatatttgatcaatatgatgccctcaaaaatttttaattttaaaaactcccattgctgtttttcttgcttcattcccaaattcccgaatttgccaagatttaccaattaaaatttctgggtgcattgcttttgtacatgttcattcacataatcatggtaagcttgatcctagggctataaaatgcttatttttaggatatgcagcaactaaaaaaggatatagatgttttgatcctgttaatcagaaactgtacatctctaaagatgtaaccttctttgaacagtagccctattacacttcgcttcagggggagaattctagagaagctttgtcatgggaaattccacaatctcctttttcggtgcctacactctcagcaatcagtccaacaaccagtccactcccagcaaccagtccaatgtctactcaaatctctccatccattccttttgttcaattgaacccaacaatagttccaatacatgatggattgtcaaatgtagggggagataaagcattgccaccaacggcctagtctacaccacaattcaaagtctactcaaagaggtgtatagtacctgatgcactcatgccttgccatgaagccagaccggagataatgcctgaatcaggtttggataattcttcatccacctcacattcctcacttcctgtagacccagtgcctagtgacttagatctcccaatagcacttaagaaaggtgttagatcctatactattcatcccatatctaattttgtctcttatcataaattatcctcatcttttttggcttttacctctcacctttcttccatagaaattccaaaaaatgtacaggaagcatttggtgatccaagatggaaagcagcgattgtggaggaagtcaaagctttggaaaaaaatggaatgtgggaacttgttaccctactgaaaggtaaaagaactgtgggatgtaaatgggtctttttagtaaaatacaaatctgatggctcggtggaatggtacaaggcaagattggttcctaaaggatttacttagacttatgggatagattactaggcgacttttgcaccggtggaaaaactgaatacaatccaaattcttctttctttggttgcaaactagattagcctctttagtagctggacataaaaaatgtttttctcaatggggaattagaggaggagatttacatggatgtaccaccaggacttgaacaaggaagctccaataaagtttgtcaattgaagaaagctctctatagtctcaaacaatcgctccgggcatggtttgaaagactcaagagtagtaaaacgatatggctatcttcaaggacattcggatcataccatgttttacaaatctactgatgagggtaaaataattgttctcatagtttacgttgatgatatgattttaacaggcaatgatcatgtagaaattgaagctttgaagatcctagctaaggagtttgaggtggaggaccttggtgcactaaggtattttctagggatggagattgctagaaataaaaatgaaatctctgtttctcaaagaaagtacactttagactttctcaaggaaacagggatgcttggttgcagccccaatgacattccgatcaattcaagacacaagatagacccggctgaaaaaggggatctagttgagaaaggaagatatcaacaactggttggaaagctcatctacctctctcacactaggccggatattgcttttgtagtaagtacagttagtttgtacatgcattctccatatgaagcacacatgaatgctatctataaaatactgcaatatctcaaaggaatcccaagaaaaggacttcactttggacagcacgaccaattcaaaataaaggccttcatggatgcagattgggcggggtctatagaagataggaggtcaacatctagctactgtacatttgtgtttggaaatctcgtcacatggagaagtaaaaaaaaaaaatgtggtggcgagaagtggtgctgaagctgagtttagattgatagctcatggaatttgtgaagtcttgtggatcaagagaatattagaagaactaaagattacaattcatcccccagctatgatgtattgtgacaacaaggcagctataagcatctcccacaatccagtccaccacgatcgaacaaaacatgttgaggtggaccgacatttcatcaagtaaaaaattgagcaagggaaaatatgcatgacatatgtgccatccaaaagccagattgctgatgttttaactaaagggatcccaagagaagactttgaaaattatgtggacaagttaagtatgatagacatctatgccccaacttgagggggagtgttggaaagttagtttggttagactagttcaaattggactcaaattttagaatggataggttccttgatttgaggaattatttgaattcatttttttgtacgtagtcaaagttttattcagattaggattagaatcagatttgtttttcagtttccttatttttagcctaggaattatctatatgctggttatttaaacgaatgtagcctatgttctgaaagatagaacaaaaaataagagttcatccaaaaaaaacctttcacggttttattttccttgttgtttgtttgtttgatttatttttttatttatttttgctgttttttcttttaacatggtttcctaagataacagttgttgaaatcacctattattttttttattaaccttggaaaaaaggggcttccaccattagctggaggcaaccgaggagatcagtcaaatccttcttgttggtaaatgactcatcatgtgtgcacaattgcacgtctagggttatttgacaactctagcaaacttatggggagtacaatacataaggaattcaatacgaagctcatggttgttccttatgactggagaaagctcatggcatgggtggaaaggggagaatttttgcttgagccttctaagtggaagttgtatgattatgctgttcagagtatctacactagttgatccctacaatgaatttgcatttgtaactttcttgcttctgtagtagaagtataccttcctgatctcattgtaggaaatgcattcacaggaggatttatggttggctagatgtattatattgagttcttcttttccatggttttctaactatgtcaagttgttccaatagtaggtgtgcaatgagttttgttagcagggttaccatcataagttgttctcagttgtgaaccttaacttcttcatttgttatcacatctggttctgttggtattgttattgtttgcatgtaatttggctatttttctaccattgctagttgatattttgtttaaaaatgtctgtgtgttaaggagttgatctggttccatatgcacttttgacaacatgatgcttgtctggtatgtgaggcttatacacacacacacgggcacacgtatagatatgtatatatacgagggaactttatatttttattatgatcatatctatatataacaatttatataaagaatattctcactttcaataccttcatcttgttatctggtttactgatattctgatacctggaaggaacttctgagtgctcacttaatacattcttcacttaccatttctctttggatgtggtttgtttctttatgtatattcatacttaaattatgactgctgaacactggatttgacttctaga

SEQ ID NO: 12791 - DNA, 1732 bp, Vitis vinifera
  Intron number 2 from transcript GSVIVT01007565001 (locus G SVIVG01007565001) derived from phytozome v7.0 (chr-ID chr1 7; pos 11960354 to 11962085)
atacaagctcatcacgtgaggaaaagaaggtaaaattggtcttttctgttacacaataaatttatgtgtgcatatgtgctgaaatctataacttcattttatgcatgtatgaagctgaatttctttacctatcaaaaaaataaaaataaaaaactgaatttctttgaggtgcatttggatgtcttatgaaaacaaatatctccattgtgttttgcatagatttgaagttcaaatctcaattctagaatggtgctatcgaagaaaatgagattcctggtaacaggccgatggcatgggagcaattttgacttgcccaggaggggcactgttttaagttttaacttttaatttttaatcctcacttgtgagccattgatttccattgttgtgagcctttaaatttccattagacatccaactgcacctgtagtgtttacttctgaccaacaattttcatgctcaacacatgttaatggtcagatggaattttattagcaatggaaacttattgtttgtcatgtgcattatatactacatacttgcctagttgttatgtccagcactaggtatagtagttaagcgtttcccatcacttccattcccacaagtgtcatgtctagaacctcattttttgtaaagctgatctcagcctaggagaaatgaggagggtcatattgggttgacaatgaaaattaaatcctcagtagaagtcttaaatcctcaagaacatttgtctacaaaattttcaagttagtgcatggccatttggtgtgacagaagatgattctagatgggattaaaaaatgtcaaaaggataatgtatagctgacccaaaattttagaacttgtttcaaggttcaagaggacctaatgcccttgaggccttgttcaagtggtaaagggttggggagggtttgtgggaggttccaagttcaaaccccaatggggattcaagaggacttaggtctgtgtttcaactcaaaattcagaatggtcacattgataatggaatcattccttggaaaggaaaatagttgactccataacatttcctgcctaagtatttgtggggggtggggagtgtggatggtgttctcaattggtatgatgaccttgcttggcattttaattgttggtgtcctgaagaattaccaagtttcaaggatttgacgtgataatttttgtgagtattcaagaagatgctccaattatcaagatatgcttgaggctttttttatagcaccattatgttttatatcacttaagctagaattgatctgcaccaatttgatgaagaaaagaaaaaatccctctgatggatctccaaattgaatataattcaacagcatgaagatttaatcccaagtattggggttggctacatgaatcttggttttctgttctgctctttaagccatactttttgcttaatcatacaccaccaacatgttttgtctttcagtttcaaccattctctagaattgactatatacaattttatgtaaagaaaaacaagtaattttaacttgtaataaacagcatgattgctaaagacctaaatgatgatacaactttaaagttgaatggccaaatgacatttatgtggttaactccaaatagttgggatttgggctctgtgagttgagttgtggaaatttggtatttcaacgctaagaaaatcggatatctactaacagcaattatatatttcttttgaaccatgcagatatta

SEQ ID NO: 12792 - DNA, 1088 bp, Vitis vinifera
  Intron number 13 from transcript GSVIVT01022002001 (locus GSVIVG01022002001) derived from phytozome v7.0 (chr-ID chr 14; pos 4401723 to 4402810 reverse strand)
gaagtgctagtggcgttgaggtaagaagactcaaggtttttccaatttgtcttctacacaactaccaataaagaagatatattacattatctttgcaatttatcataatgaaagccttgattttcttccaagttgtgaaagtgctaattcttgttaattcaaggaaatggatttaactccacattcatcaccttactctttttgctagattttagtattactaaatttttttaactcaaaatgaaaataattttttttattgaagacttgactttactattaaagacagaaaatatgactatcaattgaaatgtctacaagtaagatcctttaaaatgggattatattattctgatcatttgcaattagattttcattgttgtgttttggactgaattccatgtcatggcatatgtgtagacaagaagggaagcaaaacatttttacttctattagcgcataaaaccaacacttaaaaccctatattaaacaacaatttttttttttgtttggcggagtttgcctttccctatcaaaaaaaaaaaagaaaaagaaaaaaaaagaagggaagcaaaacatttttacttgtatttggccataaaactaacacttgaaacccaagattaaacaacaatttttttttttttttttggctgagtttgcctctttggtttgttatgtttgctcttcaattaaaaataaccctctatattgtttggtgaaatgagagagtttaactagtctgtggaagaactgtcctgatatgctcaaaattatctagttcttcatggcatttactaatgatgcttgttccaacagggcagggggaaaaaagagagaaatagtgtaacctatcaagcaaagacacatgtttgtttgaattgttcgtagttgttatgattgtggcatcccaaatattgttttagatgagctacactttagttgtagcatagtgttgctcgttgtactggattgcctattgatgcctcctgcctggactatgttctgatctatgaggacctcataataggcagttagaacactattaaatttctattatttcacaggttgaaggggtccaagggatc

SEQ ID NO: 12793 - DNA, 8932 bp, Vitis vinifera
  Intron number 4 from transcript GSVIVT01025999001 (locus G SVIVG01025999001) derived from phytozome v7.0 (chr-ID chr1 8; pos 26066492 to 26075423 reverse strand)
acaggtggcctcaaacttaaaggtgagtgttactttcttcggaggtatgcacatatgcttatgtgagttattaatttttagtgatactttttgttctagtaccatgaggacttggtgataaagatcattattcttctattagttagttcataatttcatataacctagtgttcctttaggcatcccacagaacacaatgtttctgtttcaacttcttacaggatgttatatcgattttacttctaatgtagatgtcaatccaaagtcttgaagcatgagcataacattagttaatttgtctttcattcgggaaatatgaaaacagtattatcagaaaattagtggtggatgacattaatttgttctctaccagcatcaaactttccttttatacctagtgttgtggaccatgattacccctaaaaatctgtaaggcactttagagacttaacaccttggagtgctcaattagcttaaccaaaatgttgctataagcagaactaagagctaatgtgattatattaaaaagctttgcttttgagcagactctcaactccataagggtttcaacaatgtaaccttaggcttaagagcaacattgttgcaaccaaataatgcctcctctaatgtgatgctcccgtgacttgaacttatgacctttgactttgataccaattctatgttcaaattttgattatctcatccaaaaaccaatcaacgagaataagtcaaactttttatgacattcaatattgtcgtcatttggttatcctttccttggggttaagagcaacattgccacaccccaacatgggttaagagttccctaatttataggcattggttaggggtcctttttctgtatgtttttttatgtggcagtaagacaagtagattaatcacttcacattgtcttaggttccatagatatttctagatatgatgaaatatctaagatccttcaagatggttccatagatgtggtctacgtgactctagaagtggtagttgaggtattaggcattgccctactagatgtgtttgctatgttggaagttggataaaattatggttgatctttggggtgagatgcgtggatagttggattctatggttcctacaagtggtatttctcatttgacttagatcttagctatgttcctgatgtattctatttgtccgtcatcccataaggctcatatttgtcattgtggctatatccccttatcacatattctacatcaagaccttattgacccagctgcttgcattgtgaatgagatgatttatataagagatcccttaatctccacaaaagaagtccttccctatggaagtttgtttaccaaagggcttggatagcatttccatgtaatgcatcaccccttaatccaatgagccttgttaatacctcatcttagagtcatagtagggggcagattgatggtgccatatgtcctagaaaggaagtttctcgtctaagggctaatgatgttgttagcactcatcctagtttaggtgttgacgcccttgatcaattgacgggatggtttgatgccttagagacacaaatttttgcatagttgactctcatgtttgagcaattcaaggggcttcgtatgaacatggacaaatgtgtttctttgattgatggtcaaatgtgctatatggaccaactctagtctcttgaggagttcaatcatcgacatattccctagattccttttagtttggctggttggatgcacgctttatattttgtggagactctatcttctacatactatgaacatttacttttgtttaacttcttttgattactagatagcttcttggtgtcacaaccctttatagctttttggttctattttgggcaacttgttcaatcatctatatccaatgtgaaaaaaaaatttgaaaaaatcagtcattcacaaccattgatgagggattactcaaaaagttaggatcagtagtcctttttagaaatcgaatggattcggtctcatgtatatgtgaggaaggtaataaaaaaggaaagaagaatccatctttttcttttatcacttaggagccatgcaagatgaaagtatcatgcctggttttgaatgagagaaacaagtgaggaatcctcatgcttggttttgaatgagagaaacaagtgaggaatcctctttttgaatctagctctccctttttagttttttcttttctttctattacttcaaaaataattgcttcagattcattttaatttaattaattgtttttttgtctctatcaagatgtctgctttcatccaaaaatttactacagctattcctaaaacaaaatactagatttctagccacactactcctattcttcaaattgaaacaaattagagttctaaattttctaggacccctagacataaaatatttttaggaacaagcacattgtaatgatttgtctttattttcaatcatcttttgacatcttgcactgaatctattaaaattcttattatatatatatatattttatctttgactaggttggtacttctatgaaccaacaaaatacctctagtttgatacaaaataaattttccattaaatctagattcatttctcccccttgaatagaagatgtagaaacttccaatgttaatataaagcattcaaaagaaaataaatcatggatcaaaagaacatgttggatatagatgattgaacaagttgtccaaaatataaccaaaaagctataaggggttgtgatactcagaagctagtaaataacaaaaaaaagctagccaattgtaaatactcgaagcatgtagaagagaaatgtaaccctagatcaactcaaaaggagggggtggtccatagctaacagatgtttcctttgctgtgtcgaagaggattcaattaatcacattcttatcaattgttccaaggctagggttttgtgggagcttgtttttgcgttgtttggtgtgatgtgggtccttctacttttggctagagatacactcctaggttggcatgaatcctttgtgggcaagaaatgtagaaagccttggatgaaagttcctctttgtttattttggtcggtttggaaggaaagaaacatgatagcttttgaaaatgaggatctctcgattcaaaggatgaaatattcttttgtatgtaatctttggtcttggtctaagttatgtataaaagtaggacctttacctttaatcaacttttttgaatggttgggttctagatgagggttggtgagtttttttgtatcccctcttctttttgttcttgcctttagacgtctcttgtatactccttgtatgcttttggttgacctttaggttcccttttctcttaatatatttttttctgtgtgattacctataaaaaaaaagggtttattagacttccaaacccccccaccccaacctatagtgtgctttgaacattactacatcaagtttaaaatcaagtaatgtacaccccatcctctataattgcatgcaatgtgcattttttgagaggcgatgttcatttttttaacaaaaaggcatgtgttctccacgtaactaagtgcaaaatggtcaattttttgggtttattacactttacccctaacatatagtgtgttttgtacattgccccattaagtttcaaaattgagcaatgtaccctctatcttttatgattgtatgcaatgtgcattttttgagagacgacgttattttttttttttttttttacagaaaggcatgtgctctccacgtgatcgagagcaaaatggtcaatttataaaaccctaaccagcctgcccttttcttccttcattcttcttcctttcttttcactctttctctctcctcccttagtcaatgactacatctcttgaaatttcagccttgaaacctaactaggataagtattcagagatgggctttgaggaaggatgtgatgaaaacaacaaaaaacccaaatttcaaacccaaattccattttattcaaaccgatagctcccacaattcaacataattgggtttatggctataaggagttgaaaatccaacttcaatgtcaaagctccaaaccctccaaaagatagaattaaaagaggaaaaaaacactttaattcagtatgattacctccgatcacaaccaaagatccaaaaaaacataactttttgaaaaaaacccaaatcaagaatctagaagaaccacatcacacaattctgcaaattttttaacaaaaccaaaacttttccttggtgggtatcttttgataggtgaaaaacagatgttcaaatgcttatctagcattgaccagagtggaaataggaaggagaaagagtggagagaagaaaaagaagaagaagaagaaaaggctggttagggttttttaaaaaatcgacccttttgccctcagtcatgcagagagcacaagcctttccgcaaaaaaaaataaaataaaaaaataaaaataaaaatggcgtcgcctctcgaaaaatgcacattgcatacaattataaaggataaagggtttattgctcaattttgaaactcaaaggggcaatgtgcaaaacacactatatgttggggggtaaagtgtaataaacccaaaatattgaccattttgccctcagtcacatggagagcacatgcctttttgttaaaaaaattaacttcgtctttcaaaaaatgcacattgtatacaattataaaggatttgaggtacattgcttgattttaaacttgaggggcaatatgcaaaatacgctataggttgtgagggtaacgtgtaataaacccaaaaaaaaaatgttgaagagaaatgtaaagtgtaggtattcaaccatccaaaataaagcgaacataagggaatgtactgatgaatgtactcctctagggaccatagttagtctatatagcatgatatctaaccattaattagagaaaaggctttgctcatgtgcgtatgcggtttggtgaactactcaagcatgagagctgagtgtgtagaaatttgagtttgcaaggcataaaaccatgtcattaacttatcaaggacgtcaagatctaaaccaagatgagcatcaacatcgacgccattagcccttggatgacaagctttcttgctaggatgtatgacataatcaatttgccccttgctatgactccaagatgaggtgttgatagggcccattggattaaggaacgatatatttggcaaattttgataatgagaattccataaggaaggacttctttcttggtgactgagggatctccaatataaattatctcatcaacaatgtaggtggctagtcaatagtgtcctgatgcaggatacgtgatgagaggatgcagccacaacaacaattatcaaccctatgagatgagggataaatcaaatacatgaagaatgtagctaatacctaagtcggatgagaaatattacttgttggagcaatagaatccaactatttgtgcaccttaccccaaaggtctatacaatgatactccatttgcttcaattttagacatagtaagtgcatctgcttgggggaatacctaatacctttactaccacttttggagttgctcaaccattgtgttgaaaatgtttgatttaagaagggtttcatccttatcaaattcaatgatattagaatgaaacaaatgcactatctaagtatagggagtcttaaaggaggcaagagctaactagctaaactccctcaaatagagttaggacatgggtgttcgaaaggaatctaggtgaagctgcctctcaagtacgactgagcggtatctatagaacttagtgtacctatctctacaaattttagtaggcaaaataaagaatgggatgctatctatggatgattttgtcagacctttaggaatggtaagagtaggaagaggatcattaggaacattttcatcttgacctccattatgtgatcttgaacttggtttgcttagaggagccttaccaccatgatgtttgggaagcatggaccaagaactgagatccttaaggaccttgtgaccaaaacaaaaatactccattgcaagaagaaacctcataagtgttctattatgaggatgctctcaatcgaaagtttgaaaacaaacaaaaaatggcctgaggtggagagaatgggactgatcaaagatgaaggcattgttggagcaataacgacgattggagagactgtagttggagaaaatgaatgactttagagggaaccaaatgaagacacatgatgatgatacctatagctgatggggactggggttgaagggaaccaaatgtagaggatgttggaggtttgttggctattgagaattctggtagccttaacattgaacaaagccaatggagatgaatgtgtggagaagctaggactcactcacacaaagaggaaaggacgccaatgcctttcaaatcttttgtcgagaatctaggaatgttgtttatccttaatttaactatcaatatttatctatttattattagcttgaattagagtagaatatagaatttgaattaaagtctattattggtttgaattagagtaggagatagaatttgaattacagtagaagtctattattggtttgaattaaagtaggagataaaatttgaagtatagtaatactcaaatgtatttgtatataaatattcatcatcatcaataaaaataaataataatactttctctatcttcttctttcttaatatggtattagagctagaagagaaaaggctagaagatccgttacgatgaaccttgagtcaccaagggctagaataaaatttgatagttctacccttgttatgggtggttcttcaatgacacccgccacaaaggttgtgaagttaattaacatgattctaagtcacttcatatgacttgcatgaccttcttaccttttttctttgaggggaatttggtggtaatgtgccccttttccccacatttgaagcattcaatctcaaactcctttttgatgctttggtctttctttttatcttttccatttgattttcccataaattttttccatttttaagcatcttctttggatttattcttatctcctaaatttcataatttcatataattcatgatttttctagcaattgcaagctcctcatttgacattctctcatcaccttcagctttggaatctagggactcttctttaatggtattcaattcatttccttagtgatctaagtgtcatttcaaaagtttggagaggtcctacaagttcatttatttgtgaggaatccacattcttggactcttgaatggtggtcacttttactctaagtctctatgggaaagatttcatgattttttcttaccactttagagtttaggatgggttcaccaagattaaatctagaattaataatgttcattaacttaacatgaaaatcacaaagtcccatgtacatccatcgtaatggtctcaaatctagaggtgaacatttgaagtttagacactttaatggcattgattcctcaatgagttatttggaagatatcctatgcctccatagccaaagtgcatgttgctatcctcaggaattcatccatgctaatagcatttaagatggaatacatgactcttaattgtctcactagctttattttcacttccattccattttagtttaggcttgatctcgtttgttggtctaccttctccaacacattgggaggagagtaaccaaattcaacagtgttccaaacttttttacttgcattttcagaaaatattgcattctcactttcaaacgagaatagtttttgctagttaaataaggtagtttgtcaatagaagcaccctcttgatgaggttctagatttgagattcaagggctgaaaaatgatttttgctataagacttggctttggtaccagttgtagataaatctcaaccatggatatcacctagaaggaagggtggggtgggaggaataggtgtttttaaatcaatttcgtatgacttccctaagaatggttatcgctccttagaatttttcactgttttatttctctcttccaattcttttcaaaaagcaagccaaatcacatgtaggaatggatggaccaacactctcccaacaatcaaatcaatgcaattcacatacaaatgaaacaacactccataatctagatttacatccaaatcatttgcaggaatggatggactaacactctcccaccaagttaatcaatgcaattcgcatacaaatgcaacaacactccctaatcaagatttacgtcaacttccaactatcaaatcacacattcaaatatcttttacttctaaaaaccaaactggaaattatatcaaaccatctcaaagattaaatgatcaaatttcaactcaaattctcaactaatctactcgataaaatagtttaaatttcttaagccaagataaaacacgtgggtattaataaaagaatatatggagtggataagattacgacacagatttaatgtgaaaaatattcgaaaagatcaaaaaccacaacctaacaaaaaggcgcacaaaagtataatattctatacaaaggcactaaatggccaaacaactagtgctgctacactcttagttttgcaaggcttggtaagtttattaatgtgagacattttttttttcttttatggtttttcggttttagtgcattcttttttatttttttattttaatttgaatgttttaagcttattgtatagctaaatgattcgttaaatccacaaacacacatttcaatttcctctgttagtcattctggctacaattcagtgtatattatgctatagaatgtgcctttttcataactcatttccattaatttttattgtcattgaaaattattgtttgaattttctttcagaaat

SEQ ID NO: 12794 - DNA, 4940 bp, Vitis vinifera
  Intron number 28 from transcript GSVIVT01023271001 (locus GSVIVG01023271001) derived from phytozome v7.0 (chr-ID chr 12; pos 20379438 to 20384377)
ataaggtttagtttcttttccctaaagtttttgttatctagaaccaattaaccgtatgaatacatcctgttttttcatcttacatgtgatatgataggaatgttattctttttctctactcttgtggttgggtacctcttttgtggttgaaggaagatgagaagaatatgaaatttttccatggaatcaccaatgcctccataagaagtaatttagataaaaatgttgtgatttgggttttagtctttcttcaagtggttttatttgaacgcaagggatcgaagacgtagtcttgaggacagtatgcttaagactattgggcaaaggattttgccaatcttaagaaggattttagcagaggagatggttttggaggtcttgcatgcactacgttgaataaagctcattgtccaaatgctttcaccaatttaattagggtagtattaaagggcttttttggagtgtatgatatacattgtgagcccacatcctacaaacttaagtttttaagaaaattggtatttcaacctggtattagaaccttgtatggtgggaggtcaagtattcagacctcaccactgcctgcttattttcccaatttattaagtcatgtataagcccaaaaatggagtctacacatgagagagggtgtttgatgaggatgaatattcaagatatatatcaagaaagagaattagtattagttgtaattaaagtaggattattattacttggaattaaattaggattaatatttgttggagtctaattaggattagctagttgaattataatataattagaatttgagtcatgataggttattagagtcctagtagactttggatgttataattagaattaaaatcataataggttattagagtcctagtagattttggatttcttagagaagcctataaataggttaatcaatgtaaatcaaaggaatgaatttgatgaataatattatactttctttcattgcaaggttgcaaccctcaatggtgagattccattgattttcttctaggtgagactcctagaaggccttagtaagattctaaggtttttccatcttttcttcattgtttcttctttctctctatttcttatcttataattttctctaccataaaatttattccttgttcctctccttacaccctaaaaataaaaccctagcccatctacccttgagtgtaggcaaccatcctagggttgtcctacatcaattttggtatcagagcgaaaattcttggcatgaaggcatatgtaattgaggagtggagcaacgtgtgcaaacatggttgaaggctacaacttttttatgcagccattggtgaacataccaaggctaaatgaagaggaggattggcgacgtactagcatcttccaaactcgtgttgcttgtcaagggagactatgtactttgattattgatggaggtagttgttccaatctagcttcagaggagcttgttgagaagcttaatctaaagacagaagatcatccaaatccttatcaaatagcatgagtaaatggcgcatctattttggtgagttcttgttgtctagtgacgtttaatttcagtagtaattttgagttattagcatggtgtgatgttttgccgatgaaagttgcctatattatgcttggaagaccatggctttttgatgaaagggtccaacatgatggatatgagaacacttacacacttgtgcgcaatgggcataagaagatccttcgtccaatgaaggaaattccaccacataagcaactagaggaaaaattagcacccttgaaactagaagagccatcaaatattcttactaaaaagcaagttgaagttactagaaaggagaaagaaatcatcaatgatgaatctagaaagcaagaggtgatgaaactaatcctagatcaaccaatagaagagctcaaagaagttgaagaagaatcgatgtttgacttcccaaggccaaacattatcatgagtggtggcaaacatgaagaatctgctgaaatttcttttgaatatagggaatttaagaattttattcttccacaaaacaatttacaagaagagtgtgggaagcaactttccacaagcttgttgaagacccataattatttcgagaattatcaacttgttgtacaacatcaaaaagtttttcgaagtccagtatttgtcttgcatgaaattgaacaagttcaagagatcttgagatcctctcttaccatgggaaagagacgacgaaaaaagaaagggtggaagacattgctcgaaatttcaattgatcttggaaaatcactaaaactcgaggtcgagtttttttcaagtcagggggaattgatgaggatgaatattcaagatatatatcaagaaagagaattagtattagttgtaattaaagtaggattattattacttggaattaaattaagattaatatttgttggaatctaattaggattagctagttgagttacaatataattagaatttgagtcatgataggttattagagtcctagtagattttggatttcttagagaagcctataaataggctaatcaatgtaaatcaaaggaatgaatttgatgaataatattatactttctttcattgcaaggttgcaaccctcaatggtgagactccattaatttttttctaggtgagactcctagaaggccttagtgagattctaaggtttttccatcttttcttcattgtttcttctttctctctattttttatcttataattttctctaccataaaatttattccttgttcctctccttacaccctaaaaataaaaccctagcccatctacccttgagtgtaggcaaccatcctagggttgtcctacatcagtgtttgagtgcatgatatacattgtgagcataaatcctataagctaaagcttttaggaaaattggtagttcaactggcttgatgaaatttgtatgtgaatttcattttatggaatcatttaaataaagttgtactactacctttttggttcttgttccaagaatgttagagcaaatagttttatagattttagaaccattgtttagtgggatggctctacaagctattagctaaaattatcactaataaattggagaaagtggtaggcctagtggtttcaaattctgaaaatgcatttgtagaaggaatgcaaatttttttgttgtagttttgtttgctaataaaacagttgattccaaagaggagctctagcatggaagaacacaaaaaaaaaatcccatgacaatgtgaattgcattttcacttattctatttggagaagataggcttttgatgaaatgaaattgatttgatgtattagggctttaacccaaatcagcttatgtacattgttggccctatctaacagcctaagcttgaaattgatagtttagctacataaaatgttgtatctctactattatatttttaatcttagttaacagagttgtggctagtttctttcagagtttcaaaagattagttagagggatccactttctttttatttatttgcgatggtgataaaaatatttaagtgccacattagctaaggccatggaaagggtttcattgaatgctttgtagaggggaaaagagagggctaaggtatgaaaatatccttcttttagtttgttggttactctttttgtaaggcaagtggagcacaattgttatacccaatgttttaaaaaccagaccggaccggccgatttaaccggttcaaccgtcgaccggtcacatctccggtccggtttgccctattaaaccgtttgaagattaaaccggtaacaaaccgcctaaatcagcggtcggaccggtgacccagtggaaccgaacggttccaatcgaaccgaacaattcaatttaaaccaggctcccttgtataaaaattaaaaagctttgggcaaaagcccatgctgggccttgtcttataatgacaaagcccacaccccactcaaccatgttgtgggctgagtcttgagcccaccagatgaggtaatgccttggccctccaagaggatggcttttataggcatcctttgcaccctcattcctcttacaatccgatgtgggattgccaaccaacctaatgaatgaaaaaaaaaaaaacaaatccctccaagaggatttgaacttggaccccagattctatggacaccacttggctgcacccttttgttatttaatataccaaacaaaacaatatatattagattttaaatttttttatattattaaataaaaataatataatatttttaaaaattataaaattagtttaaattttcatttttaatatattcacatttaaatattttacatatatcatttaataaaattaaaaatattaatataatttaatttgataatattattgatttttaatttattcatatatattttaaaatttttataattatttttaattttaataatatataaagtatatatttatgacgtcattggttcgaccgcggttcgaccgctggtccgaccagtgaaccgtgaaccgataacttttctggttcgatcaccggtccggttctgaaaacattggttattcctaaggtgcacacttacaaatgcaactgagttagagcctaagtctttcttacaaatgttccttgtgattgtgcagtattacctttcctaggttaagatttaaagagtttcttttaaaccattaatttgcatcttcaaatacttttaagcctcctgaacattcatttcactttgtgaatgatgtcgaaaagaatcataacactgaataactcaataaataatgttcttgttgtcaaaaattaatattaatattctgagaaatagatcaatgcacttcatttcagtgattttctatatacttcatattgattcattaactctttctgttttttagagac

SEQ ID NO: 12795 - DNA, 2847 bp, Vitis vinifera
  Intron number 3 from transcript GSVIVT01020530001 (locus G SVIVG01020530001) derived from phytozome v7.0 (chr-ID chr1 2; pos 4761623 to 4764469)
gcaatttggaatgtgaagcctgcatctcctagctacgattggaactcctgcatgattttgagagcctaagatccactgcgcaaggagcattggctacaccagttagcttgactgacttgtaattttcatattagaatattttttttccatctgtttcttatggctggtatcagtacatttagaatgtcattcgatagtgattttacgaagtgtttctaatattttcaacactcaaaatttttttatttttcaagtattaaaaatgttaaaatacttcctaaaatcactaccaaacacattcttaatttctttaactgatttttcatgagtttttattatgataaagtagtttcattttgttaattgttagggcttttacaattgtttgaagctttgatttgaagtttgaagtgtttggtggcatgtgaactttacttgaatgcatgtgattgaaagaagaaaaatgggagaaagcttgttaggcattttacgatgacctccaggcatccaagttgcttagattcaatcttcacatttcacgcctctgtttgtctgctaagaaaaactgaaaactcaaggggaaaaaagggaaaagagaactgcaatcttggatattaatattgaattagacattattaatcaaaaagcatgcacagtactggcattgagggggtgaccaaactctcgtcacactcttcttcttgcagtagtcaagacagtttggaagagtgagtctatttgtaacattaagagtaagaaacacttcctagaaatattgaaagaatgattttttatttattttttattataaagaattatttaaagtccgtttctcaataatttaaaaaaatatttctaatacttttaatatttgaaaaattttattatttaagtgttaaaaatattataaacattttctaaaatcactacaaaacgtatttttagtattgttcataatttaattagtcgactgacatcaaatatttttttatttaatataaaaatttggtaatcctagctagtaataatttgagagtaattgaaattagtcaatttaatttttaaccaaaattaattattgaattttaatttaatataaaattattttcatattattgaatttatatggtgattttagttagtagtagataaattaattaagattaaactctgtttggattgaaaacaataaattatggcaaattggtgttttgtctatttatttgaaagctacttttttttttttttttgtaataaagattttaatgaatataaaagattttcaataatataaatatgacaataatattattaggaaaattttaagatattaaatcgacaatcatcaaagatgtaattcaagtagaaacagatgagattaaaatataaaaaaataagttagagtcaataaaggattgatttgaatataaaataattacaataatattgattggagtctttttatatgaaccaaaaggtattacaacgtgagtcttatcattattgaatgttaatttgaacttgtgttttcataattatttagtagtgttaggagtgtgaaagattgttttttttttattaatgtaatcggttcttataaaaagtgtgattatttttcaaattatgtaaccgacagtttttgtttatgaagcctaaggattcgaaatgaatcgagcagtcggtgtcaggggagtccccacttccacatgcccaaagtctccacaacacaccagcatgcaattctagtactagacttgttattaatcttccaacaccacaagccctcactctctcagtctctccctctctctctctactccacccaactcatctcctctcgttttcctgattccctttccacgtttcttctccattctctggtcactggttgttgggttatagatgatccgttacaaagcggtttctgcatagtctctgctgccattgacttcaaccaacagaattcatggagcctcagcgcttcacccaattgatgctcctctactgcagaatccaaagcacgcgtgtggcacttgtgggtggtaaccacacctcttccaggttttgcactcgctaaatcccccgttttcctttttctgcatcttcatctctgtctgtttctgggaacttccaaatttttccaaatcgacctctcaaaattactgctgcattcctgcaacttcagatccagagacctttgtttgggtcctatagcctgataatcatggaaatggctcgtgggcttcgagccaagaatgggatagtcaaacacagtggtggtgacggtggtggtggtctggaggacctgaattctgataaccttttggtcattaagcttcctgattcaagggttttgagggttgtgtcaaggtccttgttcttggccatggttgtggtctcgttaccctgcattgggttcattttcaggggaccctctgcctcctacatcgaggcttctgaatttagcaatgaagctgattcgattgaattcgagtcattgcctttgctttttcaggatttggtccatgaaggcctaattcgagaaggccatagagctcttatcttgagctctggcattggggatccagtctacaatttgaggttcttcaatattttaagctctggctttggggatccggtgtacaatttggggttgttcaacgataatgagattgaaattgtaccagaatctgatttagagcactcgggattcatcccagatgagaagtttgatattgtgtttgcctcttccttcagagctattaagctcgttgatccccttatcaaaactggtggcattttagccttacagttgagcgagaccttcaaagaaataccaaattatag

SEQ ID NO: 12796 - DNA, 12121 bp, Vitis vinifera
  Intron number 7 from transcript GSVIVT01028932001 (locus G SVIVG01028932001) derived from phytozome v7.0 (chr-ID chr1 6; pos 17292865 to 17304985 reverse strand)
cacaggagggatttgcaattgtatctacggaagaagtgtccttctttaccgacaaccccgattgctacagagttggagataaagctgacttaccaggctggagtggtgcgtataatttttactatggaggacctgggggaaattgcaaccgttaactattcatttttgtttttttgttttttttgttttcatttcaaagctcaataaagcttcacccatatttccgctcagcattaacaattaatatgaaaaaactacaaaggaaaatataatataatataatataatataatataatttaaattaattagaaatgtaagtgtttccaaattatttaattttgataagaaaatagaaaaataagtaaaataagtttaaaaaagttattaaaaataatttattaattttaaatttatttttatttttattattttgtaagaagaaagaattttaatcattgttatttatattatttcttaggtaaaacgtgaagagaaaaaaaaatagaaagcacattattcattgaaaaggttgaaaaataagaggttatttttggatcttaccctcataattattacatatcttcgctattaaaagaatgaagagaaaattgaacccttcaatatttcctacatttttcattattaacatgagtaaaaatctcttatcctaacattttggctgattaatatccattatcaagaagataaacccatttgagaaattattataaacttttccatatatataaaacccatttgaaaaaactacaaaggaaaatataatataatataatataatataatatagggttaattggttaaaggggtcaaaatcaatgttttcataatcggatcgatcattgaattggaaaagttaccgattcaaggttcactggtcgaaccggtgatgtcataaatatataatttatattttattaaaattaaaaataattttaagaaatttatataatattaaaattatagcatttcattttttttgtatgtgatatatctattaaatgataaacataaatataaatgtattaatatatcaaattttattaaataaaatatgtataatatttacatatgataagaaaattatagcatttaattttatctatatatctatgcattttattattttaaaatttttaaaatattacatcaattaatttatgttattttcatatttattgttaataattattataaaaataaacatgaatataaatatttatatttgcttaaatgttttatattataaaaatttgcaaagagcattaatataaaatattgtttcacatatataccaaaggagttgggtagcttgatgctggattgtttcttttgtaaaacttggatacgaggttcaaatcctcacaatgcatcacttccatttgttattctttatttctttaaaccacatcccacattggaaactcacaaatttaatgaattgattgagttctattcaatgtctgctcattgggttgcctggtgagaggaagattgtaggcccagacaaagcccaagagtattttggataaccttcgggtgtgactggctcacagaaaaccggacggttcgtctagtttgacggttcaattgacagttcatccaattcaaagccagtttgaagtcccttctggtttaaaggttgaatcggactggatcagcgtttggtctggtctggtttttaaaacattggtcaaaataacccccatatttgtaaatataacccaccagtcaaaaaacaaaaaaatgacccggttgagacaaaaatgcccttattcttttttctctccaacacatacaacttatcatttccctttccccctcatttacaacttctcctcttctacttcatttacagaacgacttctcatattttctcttcttctacttcattatcttcatttggtgcacaaaacagaaagaccatctactcttccgattcatttacagaacgagtcctcatctttcatcatcatcttctatttcattatctttctttgatgcagaaaatgaaaatctcatgtttccatcaaaaaccctagaaaatttctcctttgtcctctcatcctctgtttcctttctttgatgcacaaaacgaaaatctcatatttccttcaaaaaccctagaaaatttctcctttatcctctcatcctctgtttcattcggaatccttggaaaaattgttattctattttttcaagttatctcatactgtatcttcaagcatgaaggaaacaataagttcattgaaaagtgataagaggaaaagattttaaaaagtggcaaaagagcaaaaatgtcaattgtaaacagtagaaaaaagtgaagtagaagaaagtgaagcaaaggaaagcgaagctattgagcaaaaatcccaattaccaacagaagagacaagtgattcttcacatttgataaattattgaaatttttagagatgttatacaataatatttgagtatggttaagtttattagttaaatgtttttaaaaatttaggatttattgaattgtattcaaagtataaaattgttatatttataatttttcttttagttctcaattgttatcagttatgtattttgagtgaataaatttaggtttgttagctgatgtttgaaaatatttgggaactattacagtgtgttgaaaaataataaattccatattaatattgttttagttttttgtattattatcaattatgtgtttagagtgaattagatatattcaatgtcatagcatctaattagggataagtttacagagaatttatgaaattttagggatttttggaaattttaggggtattatacaatggtgtttgagtaggtctatgttatttacttgatacttttaaaattttgggaactattgaattgatttcaaaataacatatggtatatttgtcatttttgtagttatatattgttgtcaattatgtatatagaatgaataaaaaatatataatgatttcatgcaatgacatgtgattaaggataagtttttaaagaatttatgaaatttttggatttttgaactttttagggatgttatgtaatgacatttgagtagtgttaaatttgttagttaacaatgtttttaaaattttaggaactactggagtgtgttaattagttattgtataatatttataattttgtattaaatctttactaacttaattttatttaatttatagactactactccctcgacatgttttaaagttaaaatacctatagaagagcactttccatcaaatgttgcatgtctatcacacctgagtgtaatagaaaatattaaaaagaagctcaataaggtgcaattggagaggttcaaggattcttgctttggacattttttgcttatgccagaacttaaattttcagctcaaattgtgcaccacatgttattacatcaatgtcttacaaagaaggatgatgaaatgtggtttttagtaaattcaaagggattaagatttggtgaagatgagtttggattaatcattggtttaagttttggtcccattccttagcataatgaaacatcaatgagaataagggatgtttactttaatagtgaaaacaaagtgcgtagtgatcatttggagaaagtttttctttcttttgatgaagtgaaaacaaaaaaaaaagaagcaaaagaatttttttgataatcttaaagatgaagacatggtgaaattagccttatagtactttttttagcatgttctacttgggaaagtagggaaaaatttaatagacatgcaatgggttggtcttgttgattgattggaagtttttaataagtatccttggggtaggatttgttatgaaagaacaatttctaggctgcaacgagtcttggagaaccgggtgtcaaaatactaagataaaaagcaacaaaagggtaatatagcacatgaggcatatagtctagttggatttccatgtcttccaagtttgggtgtatgagactattctgattatcggaatgaaataagttaatcatgttgctaagaactgcccacagattttaaattggagtgctacttccacatcgaggttcaccgagctccaacaaatctttttggactccaatatgagtaattttttttaccatatattttgatagtgttgtcacttacatatttatatatgtctatgtttgttaattaaattacttaacttgaattcaatagttacctttgtgttcgttgcttaaacctactctagatgaatgtcaacaagattattacaagcatttgaataagttagggtcagtgaatggtgttcctccagaaattttaagtcaaccaacaaccccaaaacatgatattatgggtgacctaaaagatgaagatcaccttgttgaagctactacatatgttgttgctactgctacattggaaaataagaacaaaaaggattattctatcccaccttcaattgaggtaactctgttatcatacattcatctataaatttcatttttaatgtttcaattgtaatacaaagttcaaacaaaaattcaaattgtaaacttaacctcggttaagttaatcatcaatgaaacttaaccatagtcaagtaaaggttactttgataaacataacataactagcataagtacacatcaatttttttttaaaattatgactataattttggtgtacaatgatgtatgaagaattaatgtttcatttgtttataacatgtgcagaatctatggatagagttcatgaagcatatagaaaagtctgaatcaaatttcaattatttgaagaaagaattgaaggaagtgaacagaaagattaacaacttaagacaacttttattggatgttagtgatatatttattgaatttaatattttattaaatcaaattatgtatttcatttctatatttttgctatcttattgtatagtgcatatcttattttaggtgaaaggggaaaatgagtcatgtgctacagataatacaaaattttcaaaatctggtacaaacggaaaagatattggtatggattttaattcattggatgagaattttgagactgtgatggaagataaggaggatgagaaccatggccatatagatgtgaagaccaatacagatattgtagctgcaaaaaaaaacataatagggataaagaaagatgatgtgattttttatccaattgttgatattgccaaattatttgatacccctgccatatcaggcaactttttagtttatgtatttctaaagcaactgttccccattatatttaagcgaagatgtgagttgaaaaagtcctatttttttgcagcctcctttcacagaccctacaaagagaaggaaaattagaaaggaaggggaaacaacatttgactttaatcatttgcaatctatttttgaggaagcaagagaagcctttcataagtggttgagtcttcaacaagagtaattatcttgactttaaacttgtaatagtttttttttttttggcaacttctttggttgaccatggttttttgatatattattataataaggtttaaggttgatattaattacttgcatgcggacaaagaatggtttgagtcactaattcagcatggttcatggcttaaagacacagtttgtaaatgttcttattgtgtttgcttttacttattagtatattgttattataatgaaatagcataactaatgttttttttttataggttgtctagcatattgatgttgctttctacttttaccgtaagtggagaatagaaaagccccatgcattttctcaaaattttaccaccacagatacaatattttgggtatgtatagtttctttttactattaaccctcataatactagttaaattatggtagtttaactattctttttaccttttcttatatagcaaaatgtgaaagcaatgtgggagagcatgctaaaaagtggaatcaattccaaatgcaagcagatgatattcttgttgactatgttaataggcttcacccaattccttccatgaaatggtctgaggtggacatcgtctatgtccctattaatgtccgaagtatacattgggtattaggagtagttcaccttgcttagaggagaatatttgtgtatgactcattgataggcattaatagtgataatcgactaaaaagtgccataatacctttagctaaagtgttatcgcgtattttgcatgctacatcatattatgagaagagcggtgatcctaagagtgaagaacagtgggacattgaacggttgcatgatgttcctcaacaagagtatgagtaagtaaacaatgcttccaaacttcatcttatcatttcacctttatgccttacacaataaatttattttagccatcttaattttgattacttgtgtttcatgcagtggtgattgtgggatgttcttgattaaatatgtagaatacttaattcatgatcatccattcagctcactaaccggtgccagcattgattggtttagagagaaaatggcaactgaattgttctacttcaaaattttacccatgtagtgggttccattttgattatgtaaaagatttatatgatgttgagtgttgactgttatttttgatgaatttgacttgatactcaaagttacaattttgcattgtaacagtaactgtcaacttaactataattaagttatttgttaatgcaactcaacaattgttaagttcaggtgaatattctcagtgtgaatttaaccataattaagttatttattaatgcaactcaaccattgttaagttcaggtgaaaattctaactgtgaacttaattgtggttcggttctttgttaatgttaagtttaggtgaaaattctgactgtgtacttaactatggttaagttctttgttaatgaaactcaactactgttaagttcaagtgaaatatcttattgtgaacttaactatggttaagttatttgttaatgcaactcaactactgttaagttcaggtgaaaattttgactgtaaacttaattgtagttaagttatttgttaatgcaactcaactactgttaagtttaggtgaaatatcttactgtgaacttaactatggttaagttctttgttaatgcaactcaactactattaagttcaggtaaaaattatgactgtgaatttaactatggttaagttctttgttaatgaaactcaactattgttaagttcaggtgaaatatcttactgtgaacttaactatggttaagttgttaatgcaactcaactactgttacgttcaggtgaaaattctgagtgtgaacttaactatggccaagttatttgttaatgtaactcaactattgttaagtttaggtgaaatatcttactgtgaacttaactatggttaagttctttgttaatacaactcaactactattacgttcaggtgaaaattctggctgtgaacttaactgtggttaagttctttgttaatgcaactcaactactgttaagttcaggtcaaatatcttactgtgaacttaactatggttaagttctttgttaatgcaagtcaactactgttaagttctttgttaatgaaatgatcatcaacttaaccattgttaaacttaaccaagtaatttatatgataaaactaaaacattaacttaaaatttcaatccatcattcaaaaaaattgctttaagcatatataaaaaaaaaaaaataggctcacaaattccttcatgaccctatacaaaaaaaatgtagatacatagctaaatcatccccaaaaaacaaattatgtggtaacattattaaagtgactgatgaattggttgtaaggagaaatcttggatgttgatattgctttcaacaatattgacacaactatgttcatctctaggatgtaatgggattggtcgtttgcatgtttttctattatgcccataatcaccacatctaccacagcatcgtgtacgcttagcctctccacttgaacgaattctctcatttcttagtcttcctgttggttgtcgactttttggtggtagcacaactctacaacagatgtcttccaaaatgacccaatctttgttatttccagtaggatatatagactttgagtatgaagatataagcaaattcttcatatagtattgagagcatagagtatagcatgacatgtttccatatctacatgcagcaataacatgtgcacatggaatatagtcaagatcaaacatcctacatgtgcatgaacgggtttgcaaattaacttgattacttaccccagcatagttgacattgaactcctaagagtggataggctcaacctcataacctgatgacttattaaaccttaagcgcaactccatgttagcccatgtagtaagctcagttttcattgacaatgcttgttattagcgatttgaaaaccatatttgaagtaagtttctcaacttttcaaccattcgcacaattggaagatcgcttgcatcttttagtacagcatgcatgcactcaacgatccttgtagtcatgatattatatctttttccattactgtgtgaccgagcccatatcgctttactcctacatccactaaatatttggttgctcttggagaaatcatctctaactaaccaaatatagtatcaaaatctgacattcaatatgcatgggcaacatcatgaaacaacttatgtacaacaacattcttaaactttgttttcaagttttgccctaaatgataagtgcacacaccatggcttgcatgaagaaacaacttttgtactactttttcaatgctaccatgacgatctgaaaccaccactaaatcatctacatgtccaatcacatcatataattttgtaagaaaccactcccaagaagcataattttctgaatcaccaattccgaaagccaatgggtaaatttgattgttaccatctttgctcgctgcaacaaacaaagtccctaaatattttgacttcaagaatgttccatcaactacaattactagccttattgatgtatgaaacccagaaatacctgcaccaaatgccataaatagatatttgaattgattgtcaacatcagtaataatatcggttattgtcctaggatttttttgctatagcatataacaataagaaggtaaaacaccataagactctttaggtgatcccctaatggagttaagggaaaattctcttgctctccatgccttatcataactaatctgaacaccgtacttgtttcgaatatctcctagaatgtctttgggacaatatcgacgaccaacttgataagtttgtctcatgctttcaccaaccaaccaactacttgcatgacgattatcccgagacatcatgtccaacctacaagtgtgcatagaatggtatttcattacttgaaagaaattagaatttcctaacttagttgcacgaaatctccatttgcattcgttatcaacacattgaagcaccaataacttggtagtagattttatcattctaaactcaaacttctctttcaaggcaatcatgtacaatttcttctgcttcttttttactagaataaatttgcttctcttcaatatgatcatcattagtgccacaatcactagtacctatccgactcatgtcttggtcattattgcttacctcctcaatcatggttggagcatcattcatgagaccatcttttatgttcataatgctatgaatttccattatttgagttgctttgttgcttgaatccctattttcaatcacttggacattgctagtcaggttggtatccaacacatgatagtcatcatcaataacttacccattcatgttccattcaacaacattagatctctcaagtggctcatagttgaattttgttatgctttcatcaccaacaacattaagagattctattgatccatcatttacatgtccatttccatgcataaacatttactctacattattttcagatcttctatccacagtgatgcataatggagttggtaacttgttagtacaatttaaacaaatgaaacatttaacatctccatcatctcttagttgaattggtgatgtcggtatgttaccattgaatgcatacttcattgaaattgaacacttaattggatctagttgaagaaagtgatacacaactctcattaattcatggtatgatatattcttcttcactgtaatgcctttaccttcacttcctttaaagtggtatgtgtttccattttgtacccaattccctttatgcaaaagcattattcctacttcatcaatgactacaaaaataaatatttcaaactatcatgttaataataaaatagtacaacataggatatacttttattaagtttcaactataaactatgcaatgaatcttaaaacatatatttttatttttattaaataactcactacataataatttgtcaacaattcaatctcagtttttcagtatagttatataaaaacaaagttttgctttgaatagaaacacataaactcaacttatgttaagttaaacctgacaaatagtaaaatttgttgttcaatgcagcaatgcaacacttcccataaatcaaatatccaaacaaacagtatataactacaatgggtattaatcatacgagcaatactaaaatcgtaataattctctatgcaagtgatttattgcttaccatcatttgaccttgccatatcgataaatcttttcaacttcttttgaactaacttttcactttttcagaactaacaatggtgtctctattttttacctacaatattgaagtaagattttgaattttcaagaaacataaaaaaaaaatgataatatcaaaaagaaattgttggttgcttacattttttttcatatttttgtgaccaagaataaagaatagatgaaaccatggtaagaagttaaacttgttctctacaggaaaagagagtggaacaaccaatgatcgaatagaaaaattaaaacctaatctgttataaaacaaagggaaagggaaagttgtcttggagggaaaaatgaggggggaaagggaaattagaagaagggcgtttttgtctcaaccgggtcattttttttgttttttggcgggtgggttatatttgtaaatatgggggttattttgacccctttaaccaattaaccctataatataatataatataatataatataatataatataatataatacaatttaaattaattagaaatgtaaagtgtttccaaattatttaattttgataagaaaatagaaaaataagtaaaataagtttaaaaaagttattaaaaataatttattagttttaaatttatttttatttttattattttgtaagaagaaagaattttaatcattgttatttatattatttcttagataaaacgtgaaggaaaaaaaattagaaagcacattattcattgaaaaggttgaaaaataagaggttatttttggatcttaccctcaaattattacatatcttcgctattaaaagaatgaagagaaaattgacctcttcaatatttcctacattttccattattaacatgactaaaaatctctttcatctaaaatgtaatatactatataagactcatattaacatgagtaaaaatctcttccatctaaaatgtaatatactatatacgagtcttccatctaaaatgtaatatactatatacgactcatttctaaaagtaagttgtcctaacattttggctgattaatatccattatcaagaagataaacccatttgagaaattattataaacttttccatatatataaaatctagtgaagatggtgttgataaatgaattgatgattccatgtatgacgtcaattatcaaatttaaggttacagctaaccagaacatccataaaatccgccaccctagatatagatagaaaatatgtggaaattataaaaatgtgcttgtgggacaaaatcttagtgtcttccagggtgagttcgggggtggagatgagggtggttgtggttttagctcttcttttctggggattcagtcatgaggtggagggaggaagggctacttctatttctaaaga

SEQ ID NO: 12797 - DNA, 3194 bp, Vitis vinifera
  Intron number 3 from transcript GSVIVT01033788001 (locus G SVIVG01033788001) derived from phytozome v7.0 (chr-ID chr8 ; pos 17825068 to 17828261 reverse strand)
ccaaggtagagaagttttctattcttttctatttttctttgtaggtcaatttcattgctaaatggagcctttcttgctgtattttctttatttgctcttacagtatgatatttgtctaagaattcaatgacaccctttggattggatttcatcaagttaattttgtttacgattggcctcatgccaatggtgtgaactcatatgagttagtttcttaggccatgctttatgtgtactgttttaggataatctttcatattcccatatcccaaaaatcatattttcttaaccctccaaatcaagtattctcattgaattatggaaagacatatatagtggcccacataattctgattttattttaattggagggagtgtgtttctttcagttctagattataacgaacccatagattgtcaaacctatttggtactgttccatcacttcataggaaggtttaaggtgcatggagagtgggtaaccaaggagtctcaaatttcagaaaaaattgtaagtttcttttagctgtttttggtggactgaggaagcgactggagaccgagtattgagggttgtccttttcgagtttgagtagtgaggaatctgataggatggaagagttgttcactgaaaaggaggttcgtgtggtgttgctagaattaggaggggacaaagcccctagtcctgacaactttcctatggcattctgacagcattgttaagactttgttaagaatgaagtcttgggcctcttccaggaatttcatgtctaggaaacttttaacttttggaaggagtctaaatgccacattcttagtttaaattcctaaaaaaggaggagccgaagatttgaaagattttagacatattgatttagtgggaagtttgtataaacttttggctaatgttttgacaaacaagttgaagacagtgatagtgggaggggtgtttgattcctaggattcttttgtacaagggaggtaaatcttggatgcggctcaattgcaaacaaggctgtaaatttaagattaaggagctgaaaaggtggtagtggtttgtaaattagatgttgagaaagcatacaaccatggaaactggaactttctgttgtagcctcatgtaaaatgggctttaggaagaagttagttgattggatttggttctatatcttaacatcgtggtttttggtcttggtaagtggaacactttctggtttctttgaaagtttgaggggcttgaggcaaggggatcctctatccccttatttttatgtgttggtcatgcatgcccttactattctttttcaaaaggtagggaagggttgcttcatttgcagcttcaaggtggaaggtagaaaagaagagggagtagagatttcccaccttctatttgttgattataccttcttttttgggagccttgcttagatcaattgatttacgtgaattgggtcttgttttgatttgaagcttcttcaagcttgaaagttaattaggaccaaagctaattaatccaagtggtggttgtccctaatgttgaggagttcgcttgtttgttggcttgtagggtgtggaagctttcagttacttatttaagcttatcctggggctactttcaagtatctaattgtgtgagatgtggttgatgggaggtttaataataggttagtttgttggaaaagacaatacctctctaagggtggtagactcaatttgcgttgaagtgcgctatgcaatttgcctatctattttatctatcttcttgtcattcctaaggcagtggctttaagatttggaaaaaatttagtgagatttctttttttgggtggggtgtgggctggaaggggaggagctattgagaaaaaatttgcctagtcaattggttgtccatttgcaaagataagaagttaggagggttaggtgttatgtcctctctcaataaagccttacttggaaaatggtgttggagatttgctttggaggatgagttcgtttggagatgggtcatagtggaaaatgctgttgacttgtagaaggcaataagatgaagttgggagcttttaaggttagaacaatgttttttgtagtcaatagaagaagaatcaaattttagcaagatgtttggtgtgggaatgctcctttaaagtgtgtcttctcctttcttttctattttattgctaataaggaggcatgggtgacgaatgtctgggaggttgtaagtgggcaggtaacctatcaaaaaaaaggttgtaaatgggcaggttgtttggaacttgggcttcataagacaatttcaagattggaagttagcattgaggagttatttttgaagcttcaagtgtttgagaagtgcaacaaaaatgaagatatgctgattgagaggctagcaagagtgaaaaattcttggtggaatcattctactctatcctggtgttggatggagaaatatctttttccttgaagttagtatctcttagcacctttacaaatgatttttttttgtttttttttgcttgggaggcttcatgggaaaggatcatgaccttagattagcttaagagaaaaggatggttgttggctaatcattgttgttcatgcaagagttccaaagaatcagctaaccaaatgcttatccattgtggaaagtcaaggatctttggcattttttgttttctctctttggtattccttgggtcctcccattttcagtgaaatgtttgctaaaataatggcataagagttttgtgagcaaaaatagaaggaagatttggaggatagctcctctttacttgttttgcataattggcaagaacaaaaccgaaggtcccttcctttgagggaatttgatgctcagatcaagtgctataggactcccttatttgtaccctattcaaatgcattcgctaatgtatctaagatgatcttgtatccttgctagattttattgattggttgagtgttagatagtgggagactgtgattgagcgcatgtatggtaaggtggtttcttttttgttattttggcatcctttgaatatgtctcgtgtacctggggtgtgccccctctttttttgattggcacttcttatatattattgtttgctcatcaaaaaaatgttttatacccccaactgtagtgccactacttcctaaatagtgttcctttggcagatttttcggttctgtagatctaa

SEQ ID NO: 12798 - DNA, 1710 bp, Vitis vinifera
  Intron number 1 from transcript GSVIVT01012100001 (locus G SVIVG01012100001) derived from phytozome v7.0 (chr-ID chr1 ; pos 1500949 to 1502658)
gctacagtgcgtgcctttttctcctttcccttcttctcttttggtttcggtttttctttactggaaaaacgtgggagtttgaagtattttaggtttggaaagagacgggagtggatgttggtgtggttttgtttggtttgggcgagtggtttttcaattgggtttgattagtttggtttctacgttttagtttgtttctgggatttgtttgattgctgagaaaatgtggaaaggggaagaaaggtgaagactatgtttatgtgatgcctacacattcatttcccgtccccacaatggttgcagtacctctctttccttttctttttttttctcctcttttctttgagtttccgtgtttttttctgagaaaatgcggtaaaatgaagaaaccaaattactgtagttctgtttaggtttacggggagctagggttttcaagtgggttggtttaatttctatgttgtggtttgtttctcaggcccgcttggttcctgagaaaatttgggagaaggaaagaaaatgaaattagcgttttgaatctaagatattttccttgttggggttcttcttacgaatacaaaccaacggaaaacatgatattgagtattgtgtttttctttctctctcttcaatgatctgattgttcttgtttgtataatgttttgatcctatagtggttcagatctggtttttttttttccttttcccttttctttttgcctgagaaagttgaagagaaataattctatgaagttttatattagttgcaaattctccatttagttgccaagaaagtaaaaggaaatgagagtgaacaagggatcagtttcagaaccaagaaagaagaaaagaaaaacccaatcacaaattttcattaagaatatagaaatggaggaactttctcctatgtaaattattatatctttgatcaacttattaaaagttaaaaacaaaaataaaaataaaaataaaatcattgattcatttttgtgctctccaaccaggaatctaatattgttgtattaataaaattattaaaatttttgtatctttttaaaataagttgtttaagatctcgtttatttttcgtacctatgctgctgtgcattactcttgctcgtacttgtatattagacattctatctgcattatcttgtatgaagcctttgaaagttattattggtgttttctttcatttagattaagtttacactggaaaaatgcaccttgaataaatttagacaaggtaacaattttgtcccaatctcttttacgataaatgggagggtggtaaagtaagctagctttcaaccggcatgatatcatttccctcaaaacctctttgtttgttgaaaattttctgtgtttgcttcattattaatgaaattctgtttcttatggaaatcaattctgtgtttggggatgtactatcttctgtgctgatgtgtttgccattgtttttcagacttcttactacgatcagaccggtcttttctttccaatgtttaaaaaactgattatttttattactttttccctaatggatttatcttaggtgggaaaatatttttcatctagaacatctaatagagattttctttattacttcttattttgattgtagttgttggcagtttttagaattattttcttattttcttttatatattttctaattttcgggtgttgcagcttattgtgtggttgcag

SEQ ID NO: 12799 - DNA, 3052 bp, Vitis vinifera
  Intron number 5 from transcript GSVIVT01037590001 (locus G SVIVG01037590001) derived from phytozome v7.0 (chr-ID chr6 ; pos 10345266 to 10348317 reverse strand)
aggtaatgtagggttatcttgcattcttcatcctggtcaaccttgatgcatccaataattcactgttaaactgcatctttctgaagttttctgcctaaatctgtatcttgtgaaattaatatgttattgaggagccagatcactcaacataaacaaagcttatgcttgttaacaaaattttagacattatgacttcatggagattgattatggttccatgtgaaattctgttgggaggtcaggttgttggattatcgcatgccaattagtatatattatgcttctctgactgcaggcggtagtgacattgaagcccttcactttcaaaataatttattttcttacaggcatgtcatgctggaatttatttatttgataattgtatcctactgtgcatattttttaacgagaaattggcctgccctaactgtaacgtaccctaaaatatttagctgcagtccactgtccactcgctagaactgtaacttttccttccatccagaaattgtagcaagattttctcttcaattccagcatacatttgatcttaaagcataaacactccacattctgtccacaaagccttaattctacctttccctccatggaccctaaaagctgaagtcctagcacattgttatttgattttgaatggcattttacaatatttagttgtcctgcatcaacttatttactatttattaatacaatgttgtggtttttttcccttatcttcttttttcttggtaggaagggaaatgtttgaaactgaggcagttcaattttattttttttctgtgtgtgtgtgtgaaagagagagatgagagacagagaaaggaaattttagagaaaaaaacataaccaacaaacaatgcaaagcaccttatacaaaattgctaccaaactctataaaagaagtcctgctacctggagacccatcctctatccacacatgcaggaccattaacattatctctttgatcttgatactagatgtttccaaatcccaaggttttaaggttcatttccttccatatgactaagccacaaaaggtagcctccagaccctcctttctcctgttcttcatgaagttaccttacccaaagcttttaaaaagacttaaaaagaacccaattaatctggagaagcacaaggaccaatgattacactcccaagtcaatagacagtatggttgactgattcttcattcccattacaaaaacaacaccaatgaaccatgctccatcctctagatttcagatgatcaatagttgggattttctcccagatgattgtccaaacaaagccaccctaggaggggaaacgttcttctaaaactctaatgccacctctgctaggcaataaaataacggagtaagagctgaattggaagttgggaaccgaccagatttaggtctgtgacatcccaacttaaaccccatggatcacttccaaaaaatcttccaccatgtgttgactcccactcaagagcactctctctttttttttttttagaaagctggggttttaaaaacctaacctttctgaatgccctctattgaagcctctctatcatgagtagtagagaaaagaactctcgaaatgttgaaaagagggaccactccacaccaaacatcatgccagaaacttactcttgctccatttcccactggaaataaaataaaattggagtcctcccacccagtcattttcactcataatcccttcctatgtgtgctcctcaccagaaaagtacacaaatcaccagtcccaaccccatatttgcctcccatgaccttcttccacaagctgcctctatcatgccattttcatagaacagctttgttaaggatagtccacttccttacctctgaacttcccaaatcctttggacaacaaactgtgccccaataaaaaggatgaatctttttgttctcctctgaaacctcccttggggaaagccatgctgaaatttgtccaatgtgttgctcaaacaaacatgtagactgaacaaagtttctttgaacaacattagtctacctccttttgaggtaggttaacaattcctttttcttattgcttgtggaggctggttgttgcttcttacagattaaattgtaaggcttgccagaattacataactgctcagcttatctctatggattttccaaaaaatgaagcttactagttggaataggattaaagctttactgtcatgcactgtcgattccttgaaacgtgtgtcccaattacatatttcctgttgtaaataaggcaaggattctatggcatagaattttatttttttttgataggtatttcaatggcatagaatatgatgtctatggatcatattctacttcactgtatcaaggcaaggattctattgcgtcctttgttctccttgtttggtgtagtttgggtgatccctctgtggtgaaagaaactcttttaagttggtatgactcctttgtcaagaggaaaaggaagaaggtgttgagagtcgctcctctctacattttttggacaatttggtgggaaccaaatcaaagagcatttgaaaatgaggaagggaccgaccaaaagttaaaacttttgttccttagcaatctctcaacttgggttagcatgtacataagagaaggatcgatgccttaattttattttgtagattggtgggatctccttgagattgagggaggctttgttgtggcttctcttttgaggcctttttttaaggtgcctcttgtatacatcttgtatacttcggtgtacttctttgttattatattgtacatacctttctttgcctatctaagtatatgtatacgtgtgtgtgtgtgtgtgtgtgtgtgtttcgtgcttcaaataagattaaaaggaaagtgatgacatattggtaatttgtgttgttgttctttaactctgcatcttctattgtaccttgtcttgccttttgaattgaactttttattggtcctttccaacctgaggtttttatcatgagtctggaaaactataaaatttggttctctttggtacagggaaaat

SEQ ID NO: 12800 - DNA, 8397 bp, Vitis vinifera
  Intron number 5 from transcript GSVIVT01009355001 (locus G SVIVG01009355001) derived from phytozome v7.0 (chr-ID chr1 8; pos 7657224 to 7665620 reverse strand)
aagatttgaccagatcactggtaagcatttaccttcgaaagtgctttatttgttagcctctccctataagccactaatgcatccatcacttgctacctaattttttatgccacatgttttagttcaaagattttctaagctttaactcttttgagaatgttacattcctgtccttttttctttttgctacctttgagcagaaatatgtgtccaaagcttgtataagctttaatttttttggctaaagtgtaggttaatagacttaaaaagatggtgagtaaagtggttggccttaagtttcagaatggctttgtggagcaacaattgcaaggtgttgtgcatgcttgacatcgagaaggtttatgatcatgtaaattgagagtttttgttttcagttttagacaaaatggggtttagttggaggcggggatcaattggattacatggtgcatattgttctatttgtttatgctagccatggcagcgctcagttgcctccttcggagggctagggagggtggttatctgtttggcttcaaggtgaatggtagacatggtgaaggagtggaggtttctcatttgttgtttgttgatgattctttggtttttagcaatgtttttagaattgaatcggttgttgaactgaaaaagttactagttcacggttcactgatcgaaccgacagtcgaactgcaatcgaactggtgatgtcataaatatataatttataaattattaaaatttaaaataattatagaaataaaaataataatttatatattatttaaaaattaaaattttatttgaaaatcagaatattagtttcaaattaaaaattttaaattcatttttaaataagaaatttattttaaaatcagaaatttatttaaaattgtaatgttttcattaatttaaattaaaatcataagttttaaacatcatgaaataaaaaaataaataaatataaaagaaaataaataataatgagatgaggtaaaaaataattaaaaaataaaaatctggaagaagagaggagagggaaaggcaaaaaagggttccagcggggttgtgggggtggctttgcaagggggtgggggtcctgccggcgaggaacgacgacagtaggaaaaaaaaaaagttgaaccggacggttcgaagggaatcgttcggttcatccaattcgtcgatcagaccatcggtttaactagtccaattccggtccaatcactttccggcccaattgactagatcagaccaaaatcgtgatcggccggcggttggaccagtaggtccggtccaatttttaaaaccatggtttttagtctaaccacctaaactcaaatgacctatttaagttggttacttatgtggtttgaggccattttgggcttgaaaataaatttaagggcaaactgattccaattgggagggtggaaaacttggaggagttggcttctatactaagttgtaagatggaagatcttctgaccttttatttgggtcttccttttggtgtcgtttccaactctctgacggtttagggtgaggtggaagagaggttttgcaaaagattgacgatgtaaaaaattcaatatatttccaaagaggggagtcacattgatctagagcactttgtctagcttgcccatctactttatgttgttatttcaaatgcagaggaaagtgaggttgaggttagaatagatacatagggatttcctttagggtggagggaatttagagagagagtctcatttaatgaagtggcctactgtttgctcagaacaagactctccttagcaagtggatttagttgtttacaatggaaatgaggctttctagaagcaaattataaggggcaaatatggagaagttgaaaaagggggtttgggtggggggtggtgtactaaggaagttagagataggtacgaggttgggttatggaaagccattaggaaattatgggcaattgttaatagtaaagtctctattttagtgggcaatagaagggtaaagttttagaaggataagtggtgtggtgatgagccattatctgtttctgtcccctacttatttaccttagctagctcaaaagaggcatgggtggcggatttgtggaaccaatctaatgttagtggttgttggactcctagcttctctaggcatctaaaccattgggagattgagattgtggagtggtttccatcaaggcttcaagataaggttgtgtatgggggaggagaagataaggtgatctggttgaagacaaagaacggttctttctctatgaagtccctttacgctttcttagagcctaggagttcagcccttttcccaaaaaatgttgtttggaactcttgggttccatctaaggcgagtttctttgattgggaggcgtcatgggataaagctctgactttagatcaactctagaggagagagtggtccctagctaaccgatgcttcctttgtcatatctagaaagagttgattgaccacattctgctacattgtagcatggcaagggttttgtgataacttttgttctctctttggagtatcttgagtgttattttcctcaataaaagagaccctattaggttgttgttggttttttgttggaaggaaatgggagaaagtgtgaggaatagctcctttgtgctttttttgaacaatttgaaaggagagaaatagaagatcatttgaaaacaaggagctctttgtccaaagattgaaaagcttgttcctttgtaacttgttatcttggaccaagttgtacatggctgaaggcttgatgtccttgtgtgactttattgatttattgggttctcactgaggaaggagtcattttttttgttttcccttcccctattttttggccatctttaggtgaccattatatacgtcttgtgtactttgatgcactctttttgacgctttctaatgtattattttttacctatcaaaaaaaaaatttgtttgctccttgataattctccatttgagaacaagtggagaactttagaaactatatgaaacctaatttatttctattcttctttttgggcattttgtaccattgtttttaaagacattcctcccagtgttattcaacttgattggaactcgctgtgtagaacaaaagggtgtggggagcaaggagaggaacattgattagggctttataggttggagatgagatgaaccttatggagtgccaagttgctctttgtatattcccatgtgttgtagaggtctcctcagtatagtgggtttcactcttatacttttttattagtttttgtatttttggggggattcctcatcttttttttgtacttgttaccgtatttaatgcttgttttgtttccgataaaaaaaaataaaaaaaaatctgctagtttttctaggatttgttatgcaattaagttagaccttccaagttcttagcctttttggataatcaagatatttatgggctttgggaaatggatgtttgaattgccctgctgtatttccatccttctgaatgcagttttttttttcttttaaacttggctacagatatttggatgcataagaatgtgtcaatggagtactgcagtcctgagaaactgcttcttctgttctgtgcagtatttactttaggttctagtcaactcaaaaatcatgttgtgcatcgcttttctttttttcctgtagtgtatcataagttttaagacaatattaatttttaataggcaataagagaaggtaatatacaacaatatatagccaattttattaaaaacagtagagctgtttaagctaaatatagattttctatatttatgtaaacattaaaaatggttttcatgacatcaatttaagaaaatataatatttcataaatcaatcagaaaataggaaaatatatttatacatgtatactgcaaaaggaaatataagacagtaatttttttttctttttttgggctttaagagaaaaaaaaagtataagtatatataatgaagatgaaaaattgacattattaccaatatatttgttaaaatattggtattttaggtttgccttatgtgaagaaagggatacaaggaaatttgcaaagtatctcgatatatcatttaaatttccttaaaatgttgatatcaccaatagcattgcatgtgtcaaaatatcgcaatgtttcctaatattttagtgatatttctggaaaatatggacacctctcttttattgtttcttcctccacaaatgttatatgaaatttggagtaagtactatgtcacaaaccaaaaccttccttgaaattcaaaactctaagcattcaagtcttgagttaaatggatgtggaagcaaaagtatgagccaataagaagagaatgctagaagaaagcaagtataaaaaaactaggaaacttttctatacatttctcaactccttagaatagttacaatagccaagcatgtccaaactactttaaagtctaaacacctctaagcatttcgaaagtttctacaagctccttcaagcatctcaacattggttaaagcatctccaagtacctctaaggatgaaaatatcagtttcgatggatatatcggtaatttgattttatagatatatcgagatatatcagtggatattttgagataaaatatcgataaaatgaaaattgatcaaaatttatagaaatgttggaaaaaactttgacaaatatataattaaaatcaacgtttacaatagttttatatatttatataataacattgaagcgcagttgattcgatggtaggggccaaacatttcattcgcaagatctagattcaattcttgcatgcagaggggtatttatttttcatagctttaagaaacaaatcctacatagaaagtgggaaacaaaaaaatgccctatttaatcaagtagttgcctgcctcttacaacatgaaagcatgggttgagcgtatagggtgaggcaagttagggtgccctttgggctaggcccacattttggcatttaaaaatgggaaaagggtagttgtgctaacgtgggacccaaaaaaatggcgataaatccaaaacattggcaaaatatcgacatttcgtgataaatcggcgataagcaaggaaaaatttcgaaatttcgcccactcgtcataaccacccttattattgtgtcaaggtggattgataggcgacatttccatgaaatatcgctgatattttgagttactttcgttcttgctctaagcaatgttgaagtgttaaagaatagcttaaaacaacttttgaaatgcttttgggcatacttagatgtgcatagccaaatcccacatcagaatggaaattcccccaatacctataaataggcctcataacctattgtaccaaactcaaagagttgagaaatgtcttgtatagtaaagcttcctagtgttatttaaacattctcttcttcctattgactcttaattttgattgacttggattctcagagttttgagatgcctaggagccacatggatttttcaagaaagtcttggtttgtgaccaattgtctcacagtcaaggttacaaataggttaataactaggaaagaaaggatgttaacaaacatatctagcttcaagatggatgaagtagctcttaggaagcaacatcctagtagaaaatttagcactatcaaaggaaggaaaagggaaatgttggaagatgaccttcaagccatgaaggcatgcgtcatcaaagtggaagtagcattgacaacctagggaagaaactttagggactcgagggtatgctcaagttagccatgatttggcgcatgaggtatgcgaagaattgtctacctttaaagttaagatgctagagatgtttactaattttgagattcgtagtgaggagctttcccaagacatgtttatttacaaaaaaaaccatggctagaggagttgtcactacctaataggaagcacacaaggtggaagtgctcaagtcccatgtcttcaatgacaaaaagtatgcctaggagctcaacaactacttatggcataagcaatgctccttcaagttttggagtagcttttgaggtaatcaaggaccgaattatcgggatatgtcggcgatatttcaccgataaatcaagtgtcggtccaccttagcatgataagtggcactgaaatgtcgacccttgaaatatcggaaatttcgccttttttttgtcgagttatcggcaatatatcaattttatagcgatatttcgtgattattgccaattttccagcgctgccacctttcctgccatgtcacaaccttctcccaaagctacaaaacatgggctaacgtgcgtaatgctaggcggccctattccttttgcctatagagcctagcctagtgtctcacgatgtgataagtccaaggacaccttctctataaataggggatttttatccctaaagttttcgatgtgggattgatttggaattacgatttaaaaaacaagcaattgaaatagacactattggaggactcaagcttgggcccttaggcttaaagtggatggcttgttccgtttgaccaaatctttgtatgtgatacatgcgcacatgattatacattaatattataacattttttataaattttatatatatattataaattgaaaatatcttttatatattatattataaattaattaattttatttatcttattatatattttgtatactaattaaatacaaaataaatataaatttataaataaaattattaatatttttaaataaaaaaatacttatctatatatcatttattcttttaaatcttttttttgataggcaaaggcacattagaatgatatattaatattaacaggcacccaacggccaaccccaagcatacagaagatatacaagaggcgcctataagcaaaaacaaaagagagagagaggaacaaatatatatatatatatatatatatatatatatatattattaatatgtttaaatctttcaatatattcaaactaaatatattattattttaatattaatatgttttcaaattcatatattattacctaatattacaaatttattgtgtgtatatatatatatatatatatatatcaaatttctttaataaaacaatttcaatgtgtgtattattacttattttaatcatttattgaagtttttatgagttttaatccattttcctcttatcgatattttgtgtcaaaaaatccaaacaccttggatcccaaatctgctccaaacacttccaagtgcctcaaggttttagaatgctctagagctacttgaactcttaaagaatggcaaaataataaatccatgcaaaattaggtccaaactctgacaaggagaaattttaacaatatttgtgtgtagcatgttcgtagatgcatataaaataatgcaaactccatctcatgatacaaatatgattcaaaacaagatggcatctcatcgtcatcaattaccgtcaaaccatgtaggtcatcattttagtattaaatgtaatgtgttttcaaatattgaaatttattgaaataaaatttgtatcttcacgttaatattcagtatttactttcaaaattatatttgttattagtgcatattatattgttgatcaaagctcatcaaggtgcccagttggggagggtcaatgtcaagatgtgtggtagaggcacacggttttaggtttgattgctaccactggttgaatgccctggatacccagtttggtgggcactgtcagcaccctggggcttaggtcctcatggagagttcaaaggacttattttattatgcaaattttatgatggacttattttatgggttataaagtccataaaatttgcataataaactttataacccatatatgcatgtgtgtaaatagttatcagcctcacattctatcgtttaaataaaatatttgagtaatacctttctaatattctttggaacaacacttatgcttaagtttcaatcttccatacatgcctttgcaacatatgtgcaatgttccatgtgtgagcattctctcatttccctcctttttgttattcatttctaatcttaaatatcttttttcttgggaatcaacaagatgcaatacttactgatggtgcattttgatttacatgaaaaatatatgacactgtttttatcctaacaggcatcatgcatcaagagtttttgacagctatgctttggattagatttgattttaagtagaaatattgatgttgaataatagggaataggcattaagaaggttatccagtgatagggaagagatcagctcccataactcttaatttatgctttttctgtcccatgtgatattgttttccaggttgtga

SEQ ID NO: 12801 - DNA, 2123 bp, Vitis vinifera
  Intron number 2 from transcript GSVIVT01013042001 (locus G SVIVG01013042001) derived from phytozome v7.0 (chr-ID chr2 ; pos 9373414 to 9375536)
ggcgctgctcattgttgggattgcttggaattgaggtgggtctttggtgagttttaattttggacgcatttctatttcacattttggttgcaatagtctttagcttttcttgttggatttgctattggtaactctacattttgtgaggttgtcgtgtggattgaaattaacacgcaagcaatctgagttcaaaattagttgtccttaactgagaaatattaattagtttattagaattcagtatgaactgcttctggttgttggtcagttcttaagtaggtattgtatttgcaaacaattgtcttgctatgattctttctagttatttctatgaatatccttccattccttcacaagctttgtaattagtccgagtttcattcttgttattctgctcaactttgctgtatgcggtcgatgtctcctacgagttcaggccttgtttgagaacattttcaaaaacagttctattatgtttttggaataaaaatctgtttgggaacttaaatgttcttaacctgttttgtgtgttttcggatattgcttataaataaacttttatctataatgctttatttttaattattcctcatatttgtacaattattttttaaaatagtctatagaaaacaagtgaaaacaactaaaatgtgttataaaaaaacatgtgttttttaaacaattctcaaaaatctgtgttggaaacaagagataaccaaaaccctgaggggtagctcagttggtccggccttgggtttgctccccaatggtcaccagttcgagtctcctcagggccattggaggtttacccagtcgttaacttcagggcctcgtggaattagtcgaggtgcgtgtaagctgacccggacatctacggttataaaaaagaaacaagagataaccaaatgtgtgctcatatttttctgtttttttttttggtttgaaaacctgctcctgagaacaattctcaaacatagccttgattattttatggtgcactaggatgacttgtggaaatgactaatttcaatgcattttaattggcatatgcaaagtaattgtccttgcaattggtacttgaaaatgaaccttttcgacaattgatggtaaagattagatttttagaatttatgtcatttcaatcaatggactcattttaatgccatacaaattggtcctttgtaacgcttgatactaaagatcttagaatttttaattttttaataggataaaaacacaaaaatatattatacataaagaacaaagggcccccaaaggccaacccaaaatatacaaggagtatatgacatgcgcctacgacaaaaaagaagaagaggggatatgaaaaacctcatccgcccttatttagaacccaaccaattaaaaaagttgattaaaggtaaatgtccttcgtctataaacaatgtagtcgaagaccaaaaactgcaaacaaaagaattttttatcatttgaattgaaaaatcctcattattcgaaggcaatcctgtttctttcctcccaaacggtccaaaagaaacataaaggagtggctttccaaagttttttacgcttctttcccacaagagaatttatgtcatttcaaccaatggactcattttaatgctatacaaattggttgactattttgcaaggacagttcactcgtaagaggaaacaactatgggccaaaaatgtattattattacttctcattgctgttgaactcaaactaaatttgagtttgctttgctggttactgatagaactccttacaaacattatatggatctacctatctctctttggagaagaaaagaaatgatgattgcaatcatttttgaatatggctcttttcttcattctgtttgttgcatcctgttgtatagggttatacaagggtttgatttggtcaatttttggggaaaaattggtggaactgaaggaaaaatgaatctcactgaatttgttgagattgatttagatggatatgcttaacccaagctaatttgggctttatgttttcttgtattgtgaatgacaaattagtgtgagtatcttatggatttgttattttcatttttgtatttattctatagagctttctccacagacgcatcctattc

SEQ ID NO: 12802 - DNA, 1196 bp, Vitis vinifera
  Intron number 9 from transcript GSVIVT01008848001 (locus G SVIVG01008848001) derived from phytozome v7.0 (chr-ID chr1 8; pos 2796455 to 2797650)
tggtcattgcaaagctggtaagatttcttatccaatttagcattgatgtggtcattctattattccactacatagcataaactatcttccaatgttttactgcattgaaaattgttttccaatgatagagacatatctaaatccctgcgacacaatgtataagaaaacattgagtcgaaccattaagtagcaaaatttatgcttataaaactgctgaaactttgtgtgataataccctatgattccctttgagtcgtaccatactgttgcaagttaatgccagtttgggacaatacctaatgcattacagccaaaattttcaggatttgtagcattgtggttgaggatgattgtaacaaagataacctaggtcactgttctcgtattcaacttttattgttgcaccagactcattagctattgtagtggtgttcattaaatctactattaattagttgaaattcagaaaaagttatgaatgtaaattctggcccatcaaacctttttgtaaacaatattcttcatagttgtttctgtatcaatggaagtgataaatttgtcttccacaattgtgttgatatgttcgggatgctttctactgtgattggttaacaattaatttgcatgtcaaaaatttttcaatctttgaggcttctgacctgcttatctggatcattttcttttgcaagaaattcttcttagcggctgtatagtttttctttctttttatcagaaacaaacatgtcatctacataaaacattaaagcaaacatgttcattttttatttctgttgctaaaattttgttaaatactcatctctttttgttttattccatttatattgagatcctttgtgtcagatatcattcatctgatcattatttgaattctctactctccctgtgtttcccaatttgcccactgttaggatttcatatgcattctgactcctaatcttgggagaaaccttactcttttcttggatttcttgacatctttgtgtagatatgaattcttttacccgattactgtgaatttgttaaatatcgggacaaggttgcgtgtcttctaggtcaaaaagggaattttaagtgtattttttgttttggatatgatgatttgatttgtgtagtgatgaatccttttttggttgtttgtgacgccataacttacctccttgtacttgctttctagg

SEQ ID NO: 12803 - DNA, 13807 bp, Vitis vinifera
  Intron number 3 from transcript GSVIVT01017379001 (locus G SVIVG01017379001) derived from phytozome v7.0 (chr-ID chr9 ; pos 7560321 to 7574127 reverse strand)
agtggccatccaaatattccaagttatttattgaagtaagcattgttgctcttttcctaaatctatggcgttgacaatctgattgaaattactaggaaattaattccctgattttcaagattatatggtcatatccttttctgtttcatttgcctaatttgtaggataaaggattattagtcaactttgttattttgtgtaatttagtttcctaattttgtaggattgtacgttatagatcttgaaaaaaatggtatcaaagtctgttcaaggtctataggttcttttctaatttttaacttgcgatcttcattatcgctgatttccagtggctttcattgccattattctctgcctaaagcggccgtcattgcctttaccattttttttcctctcctcttagcagccttctttattgatgataatttccaaatctttgttataattcaacagttttttgcatcagcaatcacaccaatatttattaagttttgtctctattttgctacccactatgttgaaaagctcagaaaatgaaacctaagaaaatccgacctcaaatcctgcattctagttgcaaccacctaccagacaatgccaaacctttagccctcattcaagcttatcgcctgaaactatctgatatggtctcagcatgtgtgcacgttatcaaaggaaaaaggcaagttcaaccactttagtgtatcaacactgagtgaagatgatcccaagtttgccatctaggatgaggactcaatgatcatgccttggctatggaacatgatgcaatctgaaatcagcagaatgtgtatgttcctgactatgacaaaggaattctaggggagagtggaacagacttatttgatagtgtaagatgttcaaactacgagataaagaccaagattcactctacaaagtacggtaccttatttataattgactactataatgttatgaagtgattgtgatttaaaccagactactattacaatcttaaaatgaaggatactgaggatgttgctatgtttcttaagcttattgaaagatagtgaatatttaaatatttggttgaacttaacatggaatatgatcaagtatgtgttcaagtacttgggaaagaatcattgatatccttgaatgaggtattctcaattataagggctgaagaagggagacgaagtgtagtgttggacactttagtaagtaaaaggtctgctcttgctattttgagctctcaaagctgtagtaggcatacattcattgcaataaaaccaagtcatacaaaggagatgtgctagaaattgcatggtaaaccacagttccttgacaagaatggtggaaaccgaaatagtagacatccaaacagcaaggaagccaaacaaccatcacacttttggaggagaaaccctgccatgagaattcaaacagttctaagtttgagggactcaaaaaggtagagattgaaagactttggagtttccttactttactagacaagcccaatgcatcatgctcattgtccaaatcaggtaagtactccatgactagttcttttaatgttcaaaagattgttggcacgaaaaataggttatagactcaagtgctaccaaccgcatgatctataactctcatcatttctcatgctagaacctacattctagaaaccaaaaaataaaagtagctgatgatagtttagctactatggccagcaagggactattaccattaccccatctctttccttaaagtccgcatcacatgttcctaaacttttagtaaatcttttgtcaattcatcaagttatcatagatataaattgcaaagtaacatttttctcatcctactgtgttttttaagacttggatatagggaggatgattagtcatgctagggaataggagggctctactatcttgaagttggaagtgacaacaaaagtggtcacatatatttatatcatctttcaagtttttcatccaataaagtctaaatttggctacatcatttacgttttggacatctgtcttttcttttgttaaagtatatgcttcatttgttattttggaatttggatgttaattgactttcattgtcaagtttgtcaattagaaaaacatcatcgagttccttttcgttggagaaataatagattatcatatccctttacatttatttatattgatgtttggggagcctctcaaattataaatatcattgaagctcattggtttgtttcctttattgatgattgttctcatgtcacttggttatactttttgaaaatcaaatttgatgttagttttgttttatctacttttcacaagataattagtacccaatttggtgttcaaataaagactatcggatttgacaataagaatgaattctttaaccaagttctatcttgttaccttgagagagaaggaataaaacacgagtcattgtatatagatgctacacaacaaaatggagttgaagaaagaaaaattcaccatcttctaaggtaacccatgccctatgttttgaaaacaaatgtgcctaaatcctattagggaaagtagtattaattgtgtcttacttaatcagttggttatcttctaaagtattgggaaaaaaagtcctaataaatattctttttgaattctttcctcattttcatgagttagatcccacttaaagtggttagatgtgtctcctttgtccatattcatgctcaaagttgtggcaaacttgatccttgagcttttaaatgtgtattcattggttattcaccaacaagaaggggtacaaatattattaccctcaaaattatcagatttagttcctttccatccaactaaatttatttggaaatcaaaagtcttattgaaggtcaaggcctttgtttggatagtggcacacaagaaggtaaataccaatgacatgcttcaattgagaagaccttccaaagcccttagtccagattggtgtatactatgtaagggggagtggagagatgagcgaccacctatctctacattgtccgttcactttgggtttgtggcatcgaccttttatatagggagggatgatgtgggtttagcctaggagttgttgtgatatgatgaatatttcttttatgggttttgggaattcaactaaaaggcaagacacttttgaggattgcttgtctcactttgatttggatggtgtggcgagagagaaatgttaggatctttgaggataaatggaggacatttgaaacattatgagaattatttcatttatttacttctttgtgggcctcttgtactaatgattttaaaggcattcctttaaacatcattcaacttagttggctttcggtatgtacaccactaggattaagccaccaatgaaaggagcctagccactaaagttaatattatatcattttttaaattatttaatataaatataatttaataaaaatgaaacaaaattgttaaatttttaagtagtgaagtatttatgtttaaaaatatattacaacatcatgacaactctatgcgtatgtttattctataataaaaaatctagatatcaaataaaaagtaattgaattttttattaaagtatttaatcataattaatataaatatacatgattaattttttattatttaataaacaagcatacattattactcattggagcgtatgatggtgagtatgacttaattacataggatttgtttgacaagattttttcctaaaatttcaagaaataaaaaaattattaatcctattttaatggatttcttggacacaaaattcctagaattttagaaaattaaaataataatcatatttagatgggatttctagctcttataaaattaaaataaaaagaaattatatttcaatcacaatcttttacaaaatgtatcaaagctagatatagaagtggaggcagttataaacaccaaaaaaaaaaaggtagaagaatatactaaatataaacttgatattttctcattctttaatttaaatttatgtgtgcaaattttattatgtcatatgtaccttttcatttaaaataaaattaagattttagattagaaaaggtttatatctcaatcttatatatttggtaaatattaattttacaattattaatatttgcatttgataaatatcgattttcatttttatttaaaaaataaaaatggaatagagcatatgaatgggattttctatttttcaaaaatatattatttttatccaaataagtgtaattatctcataccctatgatttatttattttcttctctgttaattgtttttcttctccatgttgttggaaattattatggtagtgcttactttgttttcaaaatataataaataatttagtataccattaaactatcattctatataaaatttattaagtagaaaatacttattattgtattgttatttttttattatattttcttttttgcaattttcagactactcccaacttgttacatattttcatcttcatcaccaccccttgatgaaaccctagccctaaccctaaatgtaaccttaattccaagctttcaaatgacgggtcggcaataattctctccatgattccatgctcatgccttgcttccctcaaatccatctacaaatcatggaaactattcttgccctccaaggccttaatttccctttgccaaaacaaccaccaatcctcttagggttttttcttagtaaaatcgtttacatggccttaaaatcatttttttcagccttatccaatgtctcaaattttgttcctttctacccagctaattttttgtggaaatcaaaagtcccctctaaggtcaaggcctttgcatggttagtggcacataagaaagtaaataccaatgacatgctacagttgagaaggcctttcaaaacccttagccctgattagtgtatcctttgtaggagcagagagactattgatcatctctttttgcattgtttgattactttgggattgtgacatagaattttttcacacattaagatggagtgggttcggccagacaatatttgtgatatgatggtgatttctttcaagcgttttaagaattctattagaggcaaaactctttgaaggatcgtgtgcctctctgtgttgtggattgtgtggagagagaggaatgctaggattttcgaggacatttggaagacgccgaagatgatgcgagatcagcttcgtttctatgtttctttttgggctcattgtacagacatttttaaaccctatcctttgagtgtaatttagcttaattgactttcgatatgtacaccctagggttgagactatagggtcaagagatgttatgcttgtataggccttttgtaccttttgtatagccttccttggttagtggaggtttacttagttcttttgatcaggtttgtacatcatggggaggggatagaatgtgaagactggatattgagttggtgaaagtgggaggaaggttagtgggtacgataagaagcagaaggatgaaggtgtctgaaagtaggtgttggttcgcgatagaatcgaaatcctttgagatttcgattgatcaagcaggagggaggttagtgggtacgatcatggagaggggaagaggctttgtggagtggattaaatttggtgctaaaagcctatcccagttactggaaggggtagaggacttttgcaacattgctgaaaggaagaaggtctctaagacgtggttagaaggaggaagaagtttctgcttggcactaaggaggaattcagctggtcgctttttactttgctctgtccgctctacggaaggatgaaggttttcccttgtgttccctgaaggaagagggatggtgggagggtgggtcttgctagccaataaactcagaagtcttgggattgtgcctccttttgttagccctaaagtacctgaaatggttgtctcctctcaaggtttgactaatagtcttgttagaggtttgtcttatgctgaagcaaccaagcttggtcgcaggggagtaggagagaaagtgtggctccagattggggggataaactctttcagcaaactacaggatttaagggactatcttgtggagaaatggggagaaggggagctcatttctctgtcttccctaatttgggccaaggccttctggagattgaaaggggagattcaccttgcttttcttggagactctctcattctctttgagtttgaactctgctcggaggcggagcggattctcttagaaggaccttacttttataggaggaaaaggctttggctagataaatgggtccctgaggctggttgtgtcagagaaggtgtggaggtgggtgaagtgtgggtaagattgttaggccttcccctctttctttgggacaatgcctttttcaaacagtttggcgatgctcatgggagttttgtagcggttgataaggacactgttgggtgtcggaatttaaactgggcgaggattttggtgagaatagttggtgagaacactcctagtagcttgcaggttgtggtgcaagaacgttgtttttccattcctttatggtgggagttgtcccctcgggtttcggtggtgaaaccatgcagaggtggccataagctgaaggttaaggatgactcgaagtgtgcttcacgcgcgagggcaagaatggagttggccactttctcaaaggaaaaaggtctagcctgtgtgtcgcatttggagcaatgtaggggagctggtgacgtgacacagctctggtcttctgatcctgcactgtagaggggtggttctgagccactgtttgaaaagacagagttgggcctatcttcaggtggggaaacgacccaacagcttggggttggcccaagtgtgaaggagaggtctttaggggcctttgtccagaacaaggatttgggccaagttattgggatgggcctttttccagagtcaagatagaggaatgagatggattgtttgactaaagcccaaggagccttagtgggctcagagggctcgtttaggaggttggaaggaccggcccacatccttcccttttttgaaagggcctctgtgatctcgtagagactggtttcattacagggagatgaaggcaaacctcgcgagtcccaactttctgtggaagatgtcaagcttgctcttgagcagcgaactcctcttgtttttgatgccttgagtttagacgccacgaatgacgcgttgatggaggaggccgctcgctttccaggtcaaattccctctgtcctttctctcgggggggggggggggacaagttattctcttctactccctctccttcttctttgccctacaacgctaaaatcttgggacccttggtttgttgggaggactcggatggcttttcgatggatggtaatgctttggagccagggcctttgtgtattgcccaactagatggctcggaggttcagtggccctctcaccttgtgtgtttcggggtaacgaaagcaaggaaggtgcaatcgaggacgccttctctgatgagacttttggaagattgctatcgttcagtaggttcgtggggttgccggtggatggcttcgaaaatgaaatcttgactatggggcaaagattttgtgtaaggaggaaaaaagaatccctttcttaggtccagagtcgagagagagttatgaaagctagagtgctcctttaagtatgggtccccctcaggttcaagaaaaaggagtgggaaatttcttggggagtgttcaagaagtgttgatgttaattagaattctctcttggaatgtcaggggaataaatgataaggataaaagaaaggtagtgaaagcatttttaaggttgcaaagggcagtcctagtttgtttgcaggagacaaaatgctaactcatgtcggatttggtagtgagaagtttgggttttggtagattcatgaattggggaagtgtgcagtccagaggataggcagagggcatcttagttttctaggactgtagagtgttggagcttcttgagatggaaacagggcaatattccatattgtgttggttcaaaaattgcgatgacaatttcatttggattttttctggtgtttatgggtcagtccattattctgagagagaattcctgtggtctgaacttggggatattaggggtttgtggagtgatccttggtgcgtcggtggtgatttcaatgtggttagaccgcccaacgaaatgagaaattgcttgaatttgtcttcggcaatgaggcgttttttagaggtaattgatgagttgcagttgagggatctgcctctcgttgggggctcttacacttggtgtggcggtttaaataatagatcagcttctagactcgatcattttttattctcagaggactgggagagttacttttgcaacctttctcaaagcttgttgcctaaacccacttttgatcattctcctattttgctagatggaggaggaattagaggcagaaaaaccctttttcgcttcgaaaatatgtggttgaaagtggaggggttcaaagacttggtcaggaagtggtggacttgctacaatttcagcggatcctatagtcacattcttgcttgtaagttaaaggctctgaagcaggatctaaaagtgtggaatagagatgtgtttggaaatgtctctttgaataaaaacatcactcttagtcaaatgggtttctgggacgccaaggaaagagactgtggtctctctttagaggattgtgaggccagaagacgggcagtggaggagttcagtaagtgggcagtcttggaagagatctcttggaggcaaaagtcaagagaattgtggttgaaagaaggtgataaaaattcaaagttttttcacaggatggctaatgcttgaagaagaaagaattttctatcttctattacagtggatggtaggaagttgactgaggagactgagataaaggaaggggtggttaatgcgttccataatattttgtcaaaaaaaggggattggagaccaagtatttcgggactgcctttttcttccttggatagtgttgaggcggggctcctcgaggaggccttttctgtggaagaggtctagactacagtctttggtttgaatggggataaagcccctggaccggatgggtttacatcggctttttggcaattttgttgggacatagtcaaacacaaagtaatgggattttttgctaaatttcacagttttggccgttttgaaagaagattaaattccacctttattgttctcattcctaagaaagggggtacagataatttgaaggattttcgtcctataagcctggtccccgtctttacaagattctagctaaaattctggctaatagattgaagagaatggtgggaaatgtgatttcgaactcccaacatgcctttgtggaagatagacaaattttggatgttgtccttatagcaaatgaggccttagattcaagactaaaaagtgcaaagggtggtattatttgcaagatggatattgaaaaaaaacgtatgatcatatgaattggggttttttattagcaatcttggataagatggggtttgggactaaatgggtgaattggttgaggtggtgtatttcttcaacccgtttctcaatcttgcttaatggttctcttgtaggctttttccaaagttctagaggcctaagacagggagatcctctttctcctttccttttcattttagcaatggaggtgttgtcttctatattgaagagggctttacaaggaggctttcttgagggtttcatggcttgtgggagaggaggtgagggtgtggttgtttctcatcttttattttgctgatgacacactagttttttgtgatgcaagcaaggagcatgtggaggtcttaagttggccttttatgtggtttgaagcaatttccgagctaaaaatcaatcttcagaaaagtgagatgtttccaatgggggtggttcctaattttgaggacttggctagggtgttgggctgcaaagtgggttctcttccctcttgttatttgggtctacctttgggagctgctttcaaatcatctcgggtttgggatgtagtggaagagagatttcaaaaacggcttgctttgtggaagagacagtatttgtccaaaggaggaaggttgactttggtaaagagcactctttctagcatcccaatttactttatgtcgttatttatcattcctcgcaaggtgagcctaaggttggaaaagattcaaagagacttcatttgggggggggaggagcttctcaaagtaagccgcatttggtgaattggtctattgtttgcctggagaaaaaggatgggggcttaggtatcagaaacctttctaggcttaataaggctcttcttggaaaatggtgttggagatttgctttggagcaagattctttatggaaacaagtgattgtaaggaatttggagaggaagaaggacgttggtgttctagcgcttcaagggcgagtcatggagtggggctttggaaggcgattaggaacgggtggatggagtttagtaaaagggtggcttttaaggtgggggatggtagaagagtgcggttttggaaggataggtggtgtggagaggattctttggaagaggcttttccaagtttgtactctcttgcctcctccagggatgcttgggtagctcagttatgggatcagttcgggaatttgggtcattggaaccctatattcacaagacttaacaatgattgggagatggaagaggtggaaacttttttcaataggttacatggtcatgcgcttagaaggggtgatgaggatgtcatgttttggagagtttcaaagaaaggtttctttacagttaagtctttcttctcatccctagttccatgcatcggtagagagttcccttcaagcttagtttggaatccttaggttccaaagagagtcaacttttttgcttgggatgctatttggggaagaattctaactatggatcaactaaaaaggaggggttgggtcttcccaagtaggtgctatttgtgtaaagcggatgaagaatcagcaaatcatgtgcttattcattgtcccaaggtagctatgatttggcaccttatttttgctctttttggtgttcattgggttttgcccaattctatcaaggaaaccattcttggttggaacgacacctttgttggaaagaaaagaaaaaaggcgtggaatgcagccccttttatgtttattttggactttatggaaggaaagaaatagaagaatctttgaagatactaaattagcggatcaagctattttatggtcttttttgtacatgttttcggattgggttagggtgcatgtagactgtacttcatggtccattttcgatttcattgattaattgggttgtaagtaagggatttttttgcttttttcttctccctttggccttgttgccttgtatacttcgtgtatactttcaggtgtacttcaggctttcttaatacaattgcttttacttatcaaaaaaaaaaaatcatggggaagattcctcatccttctcatgtttcttttcttatttaatatatttgttttgtttttgataaaaaaaaaaccaccaatcccaactcctttacctattccctcaagaccttgccatcaccaactcttttctctttagccccaaatccctagtatggtgcccgcttccaaggccctaatctccctccgccaaaacaaccaccaatccccactcctctgcctcttccctcaagacctagccatcaccaaccccttcctcttcaaccccaaaaccctcgtggtgcctgctgcttccaccacttccatcaatctccttgtctggcctctacaacttcacctacaccaatgcctatgcttgtgtattcccaaaaaagcagttttattttttgtaggaaaaggggttagagttggggtgaaattataggaatgtcattcttaatgggtcaatcaatgaacaatactttaagaggaataacagattagtaaatatctaaagaaaataagtttgaaaaacagtcatttaaagaaaataacgttaaaaaacagtcataacaaaagtgtatccaagcttttatcatatactatagaaaataataataatttcttatatttgagttggtcttttagttgtcggcaatggagcaaaaggaaatattaatttatggatatagtttcttgtattataaacaataatggttaattaacatgtttttcattggttcatcttattacttcttgacttatacaacgcgtgcatgcctttttactttgcttgtcaatgtatgtgcaacattctcttttattagctctcatagaatgataattgagactcggtgataaatttaataagaagcttattctattattatctagtttaaattaataaattgaaaattaatttgttgtagataatgtgattatgagaaaaatttatgttttattttgttcatttaatattgtgtccccatcatagcagtgtcttacttttcaaggtttgagttatcaaagtatccttaaattagttatccatgtaaattgctggtagagaatgttaatgctatattgtcagcgtaatgtggatctgttctttcaaatgaaatttcctttttggctttgttatatttgatggagtcaaattagttaactgaagtttcagaggaacatggcatttctgttcaatgctcaagcataatttggggttctgacgcatctgcaactgaattattgttgttgagtgcaatccatggatatggcatttgaatagaagtttgggaactttgttatgggacaaagtttttatagtttattctttgaattgtgtttgtcatgaaaagggttttaactcaattttgcctttggatagaaggttatggcaatttgtacatgtttaagttgtggagtacaatatgtatgattgtacaatcttgtggataaggaatttttcaccaaagcccatcctctcttcgacttatccatggtcaaaatttctttccaaattgcttcctaggaaaaacaactcacttatatttgaatcatggattccaaataacatccgttggaaaaggtctaatctctcatgctccatccaaaattaataggatttaattgagaaactgctactcttttagaccattcacgccaccctatgttcagcacccctctttattgattttccttgtagaacccaagaagaaaacctccctccctcactcactctctttagaagacaactaagagcctccatcaccacagtgaataaataaagagaaagagcatccctgcacttcaaaatccctagaacttttaaagaagctagtaggagtaccattcatgaggattgagtaccaaattgtatcccaaccgatcaacttttggtcaaaccccattttctctaaaactgcaagtaggaaagcccaatttataaaaataaaagatccaaatataaggtctcatagaggatatggattcatacactcttggttattttcttagtgaaatttgtaactaggtggtgggcttctgaatgtgtttcgttcacaaatatggcatttatggagcatccgcacatgatctatgggtcgtgtattatcaactttgtctcaatgaaatcttgctttttttccctagctatgtcaatacagtaccccacacataggaagggacaatgatgaatggatatatcttttttttttttttttttttgtctatttatcaatgattataacgaaattgcatgttcaattctacagctag

SEQ ID NO: 12804 - DNA, 1300 bp, Vitis vinifera
  Intron number 4 from transcript GSVIVT01036188001 (locus G SVIVG01036188001) derived from phytozome v7.0 (chr-ID chr1 4; pos 9310073 to 9311372 reverse strand)
aaagggtcagtttatctctcagaatccttctctttttaattcttatgattttaattttccttttaacattgttatcaatcaaattattggaggaaaataaagaaaatttagattgagctggttcttgtttctctttttttattttcatttttcacctaaatttaacttaacggttaataatagagtttaatataattaaatgtttgatttatttgtttttattcatgtttgaatggtggacgctgaatgtagtttgtatatattaaaatatttataaaattaattatgatatttcttcttactctaatttgaaaaaataatattcaaatatcctaaaatatttgaattattaatattataaaagttttataataattaattatataatcattatgaaaatttgtattggaataataaaaatgatttctaattatactttattagtaaaaaaatgctagaaaattttctaagttaacacttctatacagtgtacatatctttgcataatggttttataattgaagtatatgtttgattattgaaattaattcactaacttttatatttttaatttgggaaagaatatcaaattctatttttttatttacaaaatttattgaattatttactctaatgaatatttagatgaatgtaaattatgttttgggcttttttttttaattaagaaatatatattagaattagtggtagtttatttttattttgttgtgtgataaatgtatagaattttatggtttattttttattaatttattatctagataaaggaattttttatagacaaataaaaagtatttaagtagtattttttttatgataagtttttgtaatttataatgaattcattctcatccaaattacacgagattgtggtggtttaatttttttttaagacaattagataagaatcaatcaaaatatttaaggcttaaagtaatttgctttaacaattaaataaaaaaatgggaaaaaaaaaaaccaaacagacgactcttttggaacatttcaaatgtatgagagttgtgttaaaatgaattccatggaaattgtgctatttcttgactgattttttccttacaaattcttatagttttagacaatgaaattcaacttgtttaagcatgtacattttcctccacccttctttaagatgtagtttattgtgttttcctacacatggattatttacttttttcagttagtcaaaatatataaataacaaaaaggtgggatgaactctacaggttgcatttcctagcttgaatttcttaacaatctc

SEQ ID NO: 12805 - DNA, 3342 bp, Vitis vinifera
  Intron number 1 from transcript GSVIVT01031043001 (locus G SVIVG01031043001) derived from phytozome v7.0 (chr-ID chr1 4; pos 21337628 to 21340969 reverse strand)
gccctattttcctctgccacgcctgatcctcgcaggtactaatctaatgatgttattattattattattattttgcaacccccgtttgattcccaagagaatccatcccccatttgatttccgggaaaattcatcctcgtttaatttccgagaaaatccatgcgaaacccccaaggaaaaccaaaaaaattgctgttttttttttactccctgtgttttctggatctgttctaggggtctctttgcttttatgccactggatttaaatttcacgaaccctaaatccacgatttttgagccaggctgaaaaacacaacctttgcctgcaaataatgatcagattaccaaatagtatcttattttatttaaaaaaaaggacagattttgtatcctgtgcgtaggctggactggtaggagatatcgggaaatttcccgaaaaatcggtaaagagaccgataaataccgattggcgatgttcccgaaaaattaccgaaatttaatcgaccgataatcggtgacgaatatcgtgtctgggccggccgataagcgaaatttcggagaaatatcgccgaaattttccgatatttcaaacactcgtattacttcttaatctataaataaatgtttatgaattaataaagagaaaacaaataattaagttatttttttattttattttattttcttctcttcttttattttttaagtttattttataacaatatttatttttgttatttttcattttatttacccatctgatttactttcatattttattatttaggaaatgatgaattttgagtcgacaacaatattatcgatttcaatttattttatttttttatctatttttatttactaattttaatttttatcattcatgatcattgacaaagtttatatgcattaatttgctagacttttttttttttttttacaatttctactcaaaagtactttttaatggaaatattttctctatttttttaaaagaaaatcatatattaaatgttttttttaggaaataagataagtgatttttcaaaattttataagcatgttctaaattttgtgaaacgtgtgatcaaattggctatttcccgacaagtgattttaggataaccacctattaatagtatgtttggtggtgattttaggaagcgtttctaatatttctaatacttaaaagataaaattttttaagtattaaaaaaaattaagaacactttctaaaatcattgtcaaacacactctaaaagtgtgattgacagtgattttaggaagtgtttccaatttttctaacacttgaaaatttttatctttcaagtattaaagatgctaaaaaaactttttaaaatcactactaaacctactctaatacctgcttggtagtgattttaggaagcgcttttaatatttataatatttgaaaatttttatcattcaagtgttagaaatgttagaaacgttttttagaatcactttcaaactcactcttagactgagtttatcagtgttttaattcgaaagtgtttttaggaggatcacttattaagagtgtctttggtagtgattttaggaagtgtttctgggctttataacacttggaaattttcatccttcaaatattataaagcctagaaatacttcctataatcactgccaaatgcactctaagagtgtgtatggtagtgattttaggaagtgtttccaccatatctaatacttgaaattttttatttttcaagtattaaaaagattagaaacacttcctagaattactatcaaacgcaatctattaagtgttttcctaaaaaacattgtaagtgattttttaagactataagttatttttcagattttaaaaaatgtttcttaattttgttaaacatctcaattgttagaaatgcttcttaaaatcattgcttcttaattttttcaaacatcttgatggttagaaatactttttaaaatcatcgcgaaacaaaatcttagattaattgatgtcgttaactcattaatagaaatatttttttcactgaaagattgctgttgttaaatgtaaaatagtaattatttaaatttattaaagcctttttatttatttattttttaatacagttagacgcctccaggactgcaacatttcttttatttttcttgctggtttctggggaaaatctattgtagaaaattgaagttagacaaaagggggaaaaaatcaaagcattggagccaaacaacctacacctttcccagaagatctctcaaagaattttcaaaaaggccagtttgaatttctattcttccattttgtcatggaatcaacatttccattcgtgattttcttcgatactctaatttaggggctggttttgaattgatagtcatgtgtgtttgtttgttttgttcattttccactgattttacaacctgaggtttgtgcgattgctagtgtttttgcatttttcttgttttagggtctatttgattgcagggataataatcttggaaagtggaaggaaaatctggaatcttgcaacagctaagttcccatatttttttcttataattttttccatagccaaatggagcattagggttttgagggggggttttggatgggcattggcagagatcccagattctctcttagtaatggataatggaagttagaagtaggaatcagagtttgttcaaaccttattcttgtgggtgaacatgaggactcgtccatccagtagcagtaaattccatgaaacctttttatgtaatgaatatgtattttcactaatcttctgtgtagtgttataccataaggatgagaatttttggtttcttgtgttctgtgttctattttttgctttgatttatttcatttagtctatcagtgtacagagactgtagatctctgagtattttactttgaggcataagcctcacattcctcttaggatatcagtatatatgaaagaaaccaataaaaccattactataatggacttggagttatttgtcatggtataaaggaaatggatgatgaatcagataaaaaactactagttatagtttgtttgtgctcatactattcctagaaaacccatactagaacgtaatctcacagttatttgaaaattgaaatataacagaatactcttactattcagtgatgactgactttttgtgtcctgttttccaaatagatcattgttttggatattcattatgttgtttttattttggttttaaatttaattttggctatagtggacatacgtttgctcttaaatatttgatggctgttattttggttcaaactcgaagaaaggtggagactcg

SEQ ID NO: 12806 - DNA, 8144 bp, Vitis vinifera
  Intron number 12 from transcript GSVIVT01035312001 (locus GSVIVG01035312001) derived from phytozome v7.0 (chr-ID chr 4; pos 351155 to 359298)
acgataaattagtttgaaatttacagcttgtaaataagtgtaagaaagcttgtaaattaaaggtggtagtgatcttaggaagtgtgtttagcctttttataatacttgaaaaataaaaatttgcaagtgttaaaaggttaaaaacactgttggaggtacctaacatctgcatatctttaatacaccacctcccaaatgaggtaattggaaacgcacaaaatcacctcatcccaaaactaggaccataaaagaagacgacctctcggtcctgcgggatgacctgactaattgacctatgcctagaaaaacgaatccaactacccgtctcctcatgtgcccaaaagtcaaccatgcctctgatatgctgcaaaaaaccaatacttcatgatccttcacaaggaaaagtggctataaaaggggagccttttcctcctctaatgactctctctctcagcctctaaaagaaagctgtagaaaatgtagaaaatgcatttctatacccggaaaatagtggaatgaaatctccaatattttccttgaagaattttggattcttcattggcataatggaggaccgagagtgaagtttaatcagtccaaagggatttggatgtcaattctatctttgttcaacatccaatatcttccactataagcaaaaacaacagcaaaaacatcaacaacaaaattttctaggggagttttcctttagttttttcttctccttttataaatcttcctttaatcacttttgttttgcgtaatattcaagaaaatgtcaactttgtagctttaggaaaatgagcaactaacctctcgattatctctttgttttgggtttttctagtaccacttgtgattggttgttccttagaattgaaaacaagaaaatatggatcgaaatagcagctcacaagcctttgtttcatgctaagcaattcttgaatattatggagttctagggaaacatgtccacttgcaatctgcagcttcaggttttatgatttaggcctcaagcaccatggtttagccatctcaatcagttgttgaaggggacaatgtctaaccaatttcaaagggtacaacctcacaaatcctcgatctcaatatcgcctcaggtaaatagataaacctagaaacctaacctaacaaaggtacctattctttaaccaaatagttgatcaaaagctacaaatctttgaagaatgcaatatccaaaagctaaaaaactttgcagaagtgtttgtactatataatctccaccttgactatccagacaatctccacctcgactatccaggtgatctccaccttgattatccagacaattttcatctcgggcagtcggaggtacctcattctcaaataccaacaaagtaacccaatttgtacttgtcaaccaatacacatatcctcacaattgattgtttaacccttatcaaatcaaccacccaagatatgttgggccttgttcaactggctcaagagtttgcccaacctcccacctgctcagcatgcatatgttagaaatgtctaactccttctttcagataaaattggttgacagttttatgcttggttgaagccactcatatagaatttgggagccataacaattaccaacaatgtatgaaggaggcaaactttgaggcacctcaaatattcaagagttagatacaacttaagaggttatttatcttacctaacctcaacaggaagtcatcaaaaagcacaagtacaatcttgatgtcaactcacatacatatcagccaaatggaagaaagtcttgtcacctaagcaagcgatcaactaaagttcagataagtcttctctaacatatttatcttataatctttggttaatttcatttgtttcattttacaaggactaattgtgaaaaacaaacacctttcaagttaggaaaaccttccaactaaaaatctaaggttgaattagtctcaaaacaaaaactcttattaatagtctagctaaaaacaaacggtcaaggtgagtgaccaaacaaaaaacctcgacctaaaacccacttctggcattagtcctctcaattctagatgtactttgttgaaccatccctgtggtcatacatggaaattaccttgatgcaaaactgacctctcactcttctagagatggatcacctgtgtgctttgtggaccttcaagtaaaggtcgcacttgtacacaagctctatctctaggtatgagttaactttatgccaaaccaacctccctctatgagcatgtgttatccttgtgccaaaacctaagtggtcaattccaacaattccagtgtataaaagaacttaacctgaatatttttctactatccactctaaaagcattacatgcaaactaaatgattgaacttgcctattgacttgtggcataagaattatttcagggcaaaacaagttacgaaataagtccacctcatgattagatcacttaaacaacagatcgagaaactcaagctagcaaataatgataacctcttaatcaagagtaacaagttggggaacctagctagaaaggttggccctagcagaaaggcatccaagacccttacctcacataaggggaagtgggtgggaagaaaaaaactaggtctcgaataatgaagtatgacatcagaatttacaacaaacaacttgggatttgtgtgttatctatctatgttacttccaatttgtgattggatacaatatgaaggaatctcgaaaaatagcatcacaagacacaaccttattattagttggccccaaactgaaaatcattcaaatgtgaaagctttgagttgaacaatgttgggacgtaaatgcaaaaaattatctacggaggttcattagttaaaattgcaagtcaactcagcctaagaggcatcaaagcagtagaactgagaatgtgcatcacctacaacttcctatttatttcaaaaaaaactacatatccgttatgtggccttaaagttcaacctgcataagaaacccaatcgagcatctttaccattgttagcaactcatgatactagctaacaattgtgaatgactactcttctgagttttccctattaacttacaacgacctactatcatatggttctactaattgtctggatagtcaatacatagctccgctaactctatgaactattcctaaaatattacagcaacaacccccaaccaaggaaaaatgcaaactacctcgttaatgtaaggtaaacacctaaggaatccttgataaaatttgtttagttattcatatcagaaatagtgcaagtagaaagcaatgatcaaagaactatgacaaaggcctttagaaaagccttgtctacaagaagtccactacttgggtcattagtaagggataaccttccccacataccagatcaagctagatgaacaacttgaattaaaccttacagaaaaagctacgatatcacaattcgcacaatcaacacctacctacttgacaaggctgagggaaaaaatcaagtggcaatcaaatcaatgttagtcacaacacaactagaagaaaagttggtttgatataggaagttcaaccaatatattctttgacaacttctttcagcaaatgaataagtcatgactttgactcgaattgtaagctcttatggaaaatcttccaatgcctagattaacttgaccttggagcaaaagtagaactaaagtctctttcctgatgaaaaagtctcagtctccttacaacatcattctcaagcaacattttgtggatgcagtatctccatcttacaataagatgcttgagttgggaaagagatctaacaatgatattatgcttaaattccaaatccatctcaacctgagatagctccgcaaaaaggttaaccaaacaggatgacatactcatcccctaatctggttcaaatgagaagagtgcatcaaaaacaacaaagtatcaccaaaaaaataacacaaaatgaggaacgagtggtaactacattgaccttaataaagtttgtcctaaaattagttctcccccgccaaagatgggccaacttttggactcaatatcataacatgaggaaaaaaaggttcaagaaccctcaaccatcttgtgagcttactcaactaaaagcaaaggagcattaatcgtaatgttgatccatcaagaatgataaacaaaaactacaaccaaaaggtagagactcttacaggtgctaaaacaggtattcaaaataacctcataaaaggtgtgtttgtgaccccaacttgatggtagcaaagtgcccaaaccatgaaaccaagcacacctaaaaaggtactatgtctaaactatatagctagttttaacaattttggaatgttttaattacctcaataaacttcgcaccttatctcgatcctcacgtatgtgcttgctaaagtgaaatttgcaagattgagaaagactgggcaataatcctctaggaagagttgttcatacaactgagatctaagccctattaccaaaagacaaccaaagccaagcaattggttgaacctcatctggtctatattaattagaattatgatcaattttgttagccaagaactaaaacaattatcatttgggaccattcacctctctaagaagtcaaggtcataatttgtcacttcctctggccaaataagtgggtctataagcctgcaacactacacatatttccccaatcttccctaccatgtatcaaactaaatttcactaagcaacaattagtacacattttttatcacacaaaacccacacaacaacaaaaagttgaataagcccaataattggcacaacgcacataaagtgtggtcatcaacaccccacaaacaacagaaagaaagagaaaaaaaactaacattgacacaattcatcaaagttgcaatcatcaaaattagcaaaacaatgtagcaaaagaaaaaaaccccacataagcaccattcatcaaagtattctcctaatgaagtgtaaaaaaatggtcatcctcatcataatggtctaaagtatggaaaataccgccatcatcaaggagactttagcaaatgagttataacaagtacaagagggtcatactctttgctcttactagcaagcctagtcttgtttatattaaagctcttgatgcaaaggcatatcaaccccacacctataaatgaggtagaaagatttgtatcaccatttgattgttcgccttgacctgatcatccaatatgcatggaagctgatcattgggatcctcaacacttgtgaataaaacaaaaatgagtaagacgtgtcaacctcatcaacaaacatcatatccttggcaaaagtgggaatcaaacacaaagattttttctttctcgccattcctagggaagatcaagacctaaacccactcatagacactcttatatcaaatactaagaggaatcatgtgatccttcgaagacccaacctcatcacatgcagaattgggtcatcaccaactaagccctgatcaatgcttaacacttaagtgaaacaaaagacaactaaatacaaacgaaaagaaagctagcgacaagcaaagaaaccacttaaaatgtcaaaactagacaagccaacgtcctcaacttgagctacatctagttggaactatttgattgaacttatggcatgacttgaactcaaagcaaaggtttccacacgaacattcgattgagctacttactccaatatgacacctcaaacaagactttgtaatacaaaaccatatctcacaattgcaacaccagctaaaacaacaacaaaataagcatcaacaacaaatggaaaatatcccggcacgccaaaatgacctcatagatcaactacaaaacagcctagccaattcacggccactaggctaaccaaattgacgttgggaggaaagtgcaacgagttgcatgcatgaagccccatcaacctgggttaaaccaaaaaaaactagccatcattagcacactatccgagatcgttacaaagtcctaccctcttctagtcatagaagatgtcaggacttgggagggactagaggtaccaaaaattaacatatctttaatacaccacctcccaaacaaggtacatgaaaagacacaaaatcatctcatcctaaaaccaagaccataaaagaagatgacctctcagacttgtaggatgacatgactacaatcttgaagttgtacttctatagttgggccctaaaagagaacccggtagggaggaagggcagcatataaaccttgtccaatgggcatggtagcacctttgaggaagaaagtcgtttgtgaaagcattggatgagaagatcatggcacaatgctacttcaaaaaaatgagcactatattcctaataatcaaacttaatcatgaaaactttgaaaatagtgagaattctcttacctacaagtataaagacaaatagacggaaggtaaataaatcattaatagaacttaaaataataaattgagcaaataaacatatggtaaaattggaactcatgatcctcctactaaataataccatattggataactaaattttttaagaacttaaacataagatttggatctttatgatcgtgtatcatgctttctaataatatattaaatacttttctagattttgtgttgacttgtgattacttctctaaatcaatttttcagcatcctatatatatgtatttgttaggatggatcaatttttcagaatcaattatcaaagaatgcaaaaatataactcctcatagagtctcttgtttttcctctacgacttaaaagaagtccttagtgctttcacaaggaaataggataattttttttatcttcaaacctgcacaaagatatggaaaccatatcattgaaataattaaaacggaaaacaactggaatcaaagtgctattgccttattttttttaaaaaaaaaaatcttgggctttatgcaaaactaaacattagttgcctaaatctccttaattggaatactagatgggtgtatcaattcaacttgacaccttcttccataaataccaaaaatgatatttgttttgggaacaagactagagttttgagcagatataatacatttatgaaaaaaagataataaaatggattttcaactaaaataattcccaagctagtacatttcaactatgtgcgtatccgtatggcgtgagaatgttttttttttttatatgttcttttatatcacaactataattagtaactaggattttgatttttttaacataaaatcatagatagatattataattttaaatttatttttaaaatcacagtcatcaactatagttttaagtttaaatttaaaatcatagttagtaactattattttaaccattttccaaaaaaaatcaaaattataattaataactacgattttatgatatgaaacactccaatttgaaaattattttgagaggggatctactttgtagatttttattttaaaaaaaataaattatttttcctcaaacctcaaaaaacaaacttgtttagaactaaattcaattatacacttctctaatttttctttaccctaatagaagatcaattccattttatcacttttccaccagaatcctcatgactacttgtagaattcttgagatgaaatgaaagagtggtatgagatgcttgtttaaactttagtttcaatctcgatcaatgttgtccattcccttagctgtgcattattccaatgccagttttcctccataaactccaggtacaagattagattccgtgtggaatggatcctgttgtgagacttgaccatcaatatccttctctccatttgtggggtactgcccacttgatcactgctgtggaaatctgactaacacacccaaattctcaacaacccaaaaccacagattcctgcatccttccatccatctttctttaagtaagatagacatccatttggtctttgtttttcatttatttcactttctcccaagaatactaatcttgtctttattgactgattagtttcattagagatcatccaagcaaaagaatatcacattttatattaaaaaaaaaaaaagtattgaatatattagaaagatatcatcctcgaaaagttggaa

SEQ ID NO: 12807 - DNA, 10145 bp, Vitis vinifera
  Intron number 4 from transcript GSVIVT01036146001 (locus G SVIVG01036146001) derived from phytozome v7.0 (chr-ID chr6 ; pos 20109888 to 20120032)
gcctgcattagtgtttggtctagtatgatctccaattttttatgtacctactgcatgttgaaagttcctttgctagaaggtcttttatcgggctctcctatgcaattttatgcaagcatcagattctaactttttcttaagaagatttcatcaattaagattatattttatttgattgtcttttgaattctcattttttatacacttctctagtttgaacttaggttatgagagccatagtgaaggcaatggaacttatagggctcgctgtttcatgaccttgggtagttttggtctaactatagaatgagacgatcacttgaagaccactagtaagctatttatttgagtgaagatgatggatccctccaatgagcttttcaggtgtcattcttatgatccaacgtataattttacatgtttttagagcattttgcatgccatgggacttggttgcaaaattgggttgtctttaacaaaaataggctgcattgtaggaaaggtgtcagtcataaggggaccagcaggccgtcacccttgcagaaattgtattttaagcctagacaggccacccaagaatgattggccatttgctctctactttctagttttttgaatggattcttaaatggtgattgtgactgttcaacagttggttgatgcctggatgggtagtctgctcatttttaatgcatattttgactgttctagcttcgtttttcttcactttataagcctcttttgttcatttctctgtgagaacaccatttttgagctaggtaccttgaaggcattgacttccattgcttagtgcatttaaaactcttcatggggagttgagtttttttaagagcctttagtactcatcattatgagtgttacaacgaggggttggagcacaatattaggaaccttcaaacttggagttggtgaaggataaaagaaggtttacttggttgttttctcacatttattggctcaaggaagtgttggtaacatttttttgcatatttttgttgaaatttttccataggaaatctccctaatcttaggagatctcattcgctctatgattttgcatcttttcttgtatgtattgtatcctaaatggtagcgatcttgtatatataggctatcattcaccctagaattatgcctacacaaaatatatgatttcctagaatatactcccaactttgtatatatccccacctaatctcaattattcattattgatgaaaatcagttttctccacatgttatcagagcaaactgaagtctgaaactcttctctgattttgcttttcctctagccctattctctcaaaacttttcataacctcatccatatccttcattggaaaaatgtcagacgcatgtaaaattaccttcctgccaatagcacaactattgccaattcagggctcttttctttggagaatcccactctaaaggttacaacttcatagttgaaaggatcaaacttcatggaatggtctgaatcagccaaaatcttcctcaaaaagcaaggggaaaatgaagtttatgttgggcacttcctcttctcttgctgtggatgatcctaaattcggagcttgggatgctgagaattcaatggtgatgttctggtagttacactccatgcaaccagaaattagcaagacttatctcttgttgacaaactacaagggatatttgggaagcaacctatttgacctactcaaagaaaggtgtggcagaccagctgcatgacttgaaagtgatgattgtctccaccaaacaaggtactgaatctgtcactgaatattaaaatgttttaaagagactttggctaattagatctctatcaaaatgtggaaatggaatgggtgaatgacccaaagaaactaaaggatatgattgaatgagaaagaatgtttgattttctagttggacttcacctgaaattcaatgtggcttgtggtagaattctgggcaaggatcctcttccatccataagagagccttttcttatgtctgaggacaagaaggttgaaagggagtcatgctcaggaaactagaaaatttgatttcaacctcccagaattctgcactggtagtttccaagaccacccctagtttgaggaaacatggagatgaggacaagctttggtgtgactactgcaacaagcctcaacatgcaagggaaatgtgttggaaactccatggaagactacaacccagaaccagatctgctcaatagggaactggaaacaaaattggagccaaaactgggcaggcttatcaaacagctgttgttgaggaatcccaagaggccttactcaacaaagatgacattgataggctgaaaaagctcctgatgaggtttgagaatcaaaacacagcaataggttcttgttccgtggcttaaacaggtaatatctttgccttaaatgtctttgaaatgaattgttctatacctggatcattgattcaggtgccttcaatcatatgaccagtttttctaatttattttctacatataccacttgttctggacaacaaaaaattaaggttgcagatggtttttcccccattgttggtaaaggaacagtccaaatatctccatcattacttttaaaatttgttttacatgttcctaatttaacctataatttgttatcgataggcaaactcacccaagatttgcaatgtcttacgatttttacctcttctggttgcatttttcaggaccatgtgacgggaaaggtgattgggctttctaaactaaaggatgggttgcactactaggatgcagatttggagcttaataatccggaccctcaaggcttgatttttactactaaaataaattagatatggctttggcatagacgtttaggtcattcctcttttgcagttctaaaaagactcttttcctacttatttacaaatattgatgtcaagaatttgcattgtgaaagttgtggacttgtgaaatgtcattgcataccttttcaaataaatactccaaataattttccttcatttagtttgatacattctcatgtatggggtccatcctgtgtcaccaatatttccaactcacgatggtttgttacatttatagatgattgtacttgttctacttggatatatcttatgaaatccaaatttgaagtatcatctattttttcatctttgcataatcttatttgaaaccaatttagagttaaaatccatactcttatgacagataatgggagggggcatttgagccaaactttgattgattatcttcaaaatggggttgctaaaaggaaaaatagacacttattagaagttgcccgtactctactttttgaaatgaatgttccaaaaacatattggggagaatccattttgacaaccacctacttgataaataggatgcctactaaggtccttgatttcaaatcccccatagaaaaactttactctttgtttcctaatttttagggatttggtaaattgcctccaaagatattttggtacccatcctatgtccatgttcatagccatttaagaaggaaacttgaccctcaagcaatttgttgcatttttttaggctactcatcaacacaaaagggttacaaatgttatcatccaaccacacaaaaaataagttccaagggacataacttttctggaaaaccaacccttttatggaaacaccttccttaagagggagaaagatgatatggaagataggttgtgggatcttgaacttaaacgattccaaaggtccccttcctcaaatagttttttcctcttctgatgaatttattcgaaattccaatattagttttgaaaatcctatagtagctgaaaatggagcacctcctatagtcaaaatgtattctaggagaaagtagtttggagttcctttgcaagcccaattattgactctgaaacatgtaatgaaaaaggtaatcaaaattctaccctaaataatgatctcaatttacttgttgctcttaaaaaaggaactagatcctgcataattcatcctatttctcaatttgtgtccctacaaaggggtaacacacaaacttatggtgttgattatcaagacgcttttgccactatagctaagatgaataccatccagattttattgtctctagcaacaaatctaaattggtcgctgcaacaatttgacgtgaataacgcattcctccatggagacttggaaaaggaggtatatatgaaggttccaccaagtgtttctcatagaaaatacggtaacaaagtgtgtgggttgaagaaatctctatatgggcttaaacaattcctaagggcttggtttggaaagtttacaaagtctatggtaagaaaaggccagggatttgtcttgaatcaagtagcttttttggattccatggaagggactagggttttatctttagagggttcaaaatgccaaaaagtaggctaaggagtgtaagaaatgggagttgacagaagaaacctcttggaggcaaaaatcaagggagttatggttgaaagagcgatataaaaatatgagttttttcacaaaatgaccactacctacaagaaaagaaactccttagtgaagattaagatcaatgggacttgggtatcagaggagaaagagatcaaagatggggaggttcaggctttcctttctcttttgtttgaaaatagtggagacccaactgtcattggttgtctattaaggctttaggaggtgatgatgcaatgatgttaaaggtcctgttctccgagaaagaggtgttttgtgctctttttgatggattttctttggcgttttgacaatttggttaggattttttaaatgaagaagtgatgggcttctttagggactttcaaaagcagggtagatttcttaagagtcttaatgcctcttttctagtgttaattcctaaaaagattggtgggtagcctatacaagttgttagttgaagtgctagctaattggctaaagaaggtggtgtccttttcccaaaatgctttcatggaggaaaggcaaatcatggatgcttcactgattgctaataaggctatcaattcattgctaaaagacaatgattatggtatctttgtaagcttgatgttaacagggtgtatgatcacgttaattggaacttcttaattatgatgctagaaaagatgggttttagagttaagtggatcaattagatccaatgggggatatctatagcgatcttaattcttgtcaacaaaactccttttggtttctttcatagctctcagagaaggcaaggggacccttctccccttattttttttctgattgacatgaagacactcagttgtttgctgaagaaggctaaggcaaaaggctttttatcaggttagtgggtaagaggcaaaggaagagagggcttggaagtctctcatttgctatttgctaatgacactttagttttctgtcttctctagattagttgactcacttgagttggttacttatgtagtttgaggttatgttggggatgagagtaaatttggaaaaaagtaaaatgattccagtgggaagggtggagaatttaaaagagttggctcaagaatttggttggaagattggtgcactcccgccttcttatttaggctttcctttgggtgctcagtttaagtttgtggtagtttgggatggtgcggaggagaggttttagaaaagattaacattatggaaaagacaatatatttgtaaaggggagatgcttaccttaatctgtagcactctctctagcatacctatttattttatgttcttattttatattccaaagacaattaggttgaggtggagcaaatctaaagggattttttttttgggaagaagggcccttgagtggaaacctcaaatggtaagatggcctatcgtttgcttagaataaagaaaaggtggtccaagggttaggaatatgtcattgctcaataaggccctcctatgcaaatggagttagcatttttgaaaaaaaaaaggagctttttggaagcaagtcattagtagtaagtatgaggaaaaggagggtggcactcccatgaagtaagagaaatgaggtagggttgtggaaatccatcaggaaatattttagatattttgagtagcagcatgaccttttttgtgggtgattggaggagggtgagattttgaaaggataagtggtgtgatgatgaacaattgtgcacttcttttccctcctaatatgctatagctttgtccaaggaggcttgggtggaggatgtttggaacccttaagctaatgggggtgtttgggctcccccacttttctaggtggctcaacaattggaaggtgatttttgtggagtattttttttctagggactgcaaaggaggagtgtgtgtaggaatgtggatgataaggtgatttgaacaaatttaaaggatagaaaattttctatcacatgcttctttaaggttttgaagctgaaaagacaagatgcttttctagcaggtgtaatttgcaattcacaggtgccattgagggtgggatgctttgcttgggaggctacttggaataaggtcttaaacttggatcatattcaaagaagagagtgacctttagctaatagatgcttcatttgtctttcggaggaagaatccgttgatcacatcctcatgcactgcgataaggcaagggatttatgacactcattattttctttgtttggggtgtcatgggtgtttttttcctcagttagagagatattgttaggatgatagggttcttttgtgggtaaaaagagaacaaaggtgtgacaagttgctctcctataccttttctggacaatttggaaggaaagaaaacaataagacgtttgaaaatgaggggcgttcaattcaagggcttaagctttcttttccttgtaatctttaggggtgggctaaggtgcatttagtttcaagtccttctactattgattttatggattggttagacctcgattgaaggggtgtagttttcttttgttcccctctattttttgtggtgcttttaggtatcctatgtatacttcttgtgtactttaggacactcttttggcgtttctcttattaaaatattcctctttatccataaaaaaaaaaaaaaatggtaagaagaggctataaacaaagccaaggtgaccacatgttatttatcaaaacattctactcatggaaaggtatttgccttaattgtgtatatagattaaatgtggttactgaaaatgatttaattgagattggaatattgtagtcttatttggaattaaagatctaggaagtcttagatacttcctaggaattgaggtagtaagatcaaaatagggtattttacatcccaacaaaatatatatgttggatttactaaaagaaatgagattattgggacgcaagctagtagaaacatcaatgaggccaaccataagcttatggatgtaaaggaggaacctcctattgatagaggaagctatcagaggatggtggggaagctcatttatctctcacacactagacctgatattacatgggcggttagtattgtaagtcaattcatgcattctccactaaaatcttacttggaagttgtgtatagaattctcaagtatcttaagtcttctttgggcaagggaattttgtaccaaaataatggaaatctccggttagaggtttatacaaatgtggattgggcaggatccttaactgataagagatttatagggtattgcactttacttgaaggtaatcttgtcacagggaggagtaagaagcaatcgtggtggctaggtctagtgtagaggttgaattcaaggcaatggtgtaagggattgatgagttactttggattaaaatagtgcttacaaatcttaaagtcaaagactcaagtacctaggatggtctattgtgacaacaaagctactataaacataacacataatctagtgcttcatgacataactaaacatgtagaaattgactgacacttcatcaaataaaaaatgaatagtgggaaaatatgtaatccttatgttgcttcaactaagaaattggttgactttctttctaagggtttatcaagctcaatatttcatcaattcttggacaagcttgacattaaaaatatatttgcatccaattgaggggggagtgttgaaattctgccataggaaatctccctaatcttaggagatctcattctctatatgattttgtatctttccttgtatgtattctatcctaaatggtagtaatcttgtaaatatataggttgtcataccttgaaattatgcctagacagaatatatagtttcctagaatatactcccaactttgtatatatccccatgtaatctcaattattcattatcattgaaaatcagttgtctccacaatattgttctatggttgttagctgataggatgttaggtgattagggttgctaagttgtttaagacttcaccttaattggtgtgttcttgcgactagcagtagattgtaatggttttgggttaacaaaggaaactcttcaatatagtggattagtaattgtgagagtaccaagaacagatgcaggtggaaggtcaaaccactgtaaaattttgcgttttgtaattgctttactttccaaattaagttttattttttattttttattttattttgtgtgttagttatatttttattagttttcattttttatggtaaaataatctgaaaagcacatcaaaggtttcattgattaaaatttttaaacagtcctattcgaccacccatctttatcctctaagacttttgtaagccatcttgggagtctttttcagctatgagactcctttttctgattaacgaatgaatatatatattttggtaggaggatattgatggtctttacagaataaagctaaaaaaattttagttgagtggcttcagatgtcattctgttacctagatgacatatttaggtagtatactgctagcactctgattggagcacaaatctgggcattttgttaattttcaggtatgttttctagccaagatttcagctgagtgtttgcaatatatgtacactcaataccattataataactttatcttatatttcattagtataagtaatagctcatcaaatatagctacacaatagctcatcaaatatagctacacaaactgtctattttttaagttcctctttttgggggtaggattttgaagaagacttgatgtgctatctattaattggaaaattaagggaccttaattttgttactttcatgttttcagatgaggtttttctctcctttttattgtttggtttgtgaaggggttgaagtcaagagcctgtttttaatttttcattcattacttctgtgctcttccttctaaatttgaaaatctttgtcagagggccatttactaaatatatgctttttgacaatacccaagatttgtttagagaaaagatataacaaatcaaaggatgaggaatccttccaatccacactctttaagaagtttaaactaagagcctccagaaagttatattgtctactccaaggagggtagaaatgccctttaaaatattgacttatctactctaaggaaggattctaatctagaatttctttgttaggtcggtgtatcttcaagatactcatctactcaattagctgaatctccttcaccagttgattccccaatctcaaggaagaagtgtctctgagattctccatgaaagcttgagtctgcttgatttttatagccatcccatcttttttcttttacttttccgcttattctactagatagttgtaactagcaaagcatgctgattcctccagagatacattctaatgatggaattatcttttgaatgtttcatataaatatgcattcttgtaatgtatgtcaacactgctaaaagttgagattttttcagtctgtttatgtccttgggactttatggcctatgcattccttcactcctctcttgagtatgttgatacatttgaagaagtatgttaatattccagctaacaagtatgcttctaaacattttatttgattatcattccaggtttctattctgttacttagtccattcttctctaa

SEQ ID NO: 12808 - DNA, 8040 bp, Vitis vinifera
  Intron number 1 from transcript GSVIVT01006950001 (locus G SVIVG01006950001) derived from phytozome v7.0 (chr-ID chrU n; pos 29251207 to 29259246)
cccaagcattgtgccatctccggttgaggccataggtatgtgtaaaccactaccgaatactaatatatgagatagttccaattatttttaagagatttaacttcttaataattacaaggtatttgcaaatacttcatcatatatattcccactgacagtatgtgattgtcaacttcctttatttggatgttttatgcatggatcatattttcattcaacagattatatcatggtttattgttctatctaaaacaaatatatgagcttcaaataaatttaatcatagtatttattagttaaattggttacattcttgtattcatatcataggtatgattattgaatcatgttagataagattttttgatgcatgtgttacattttatcaggaacatgtaaatggtatcaacatttactgggagatgaatttttaaattccttgttgttagctgtatatatctgtacataccataatttggttgtttccttagggataataccttcctaattcaggactctcaattgtatatataaacaagtattattcatctaataaagaaacgaggaattgagaaacacctcgattcggttacatggtatcagagccacgtttggttcaagggaattttctgggttttgggttttgttcctaacaatctggaacagtaacctgttacgttttttttgtctggattgcgtcaccgccgacccagggaggagcgcattcttgtttccggagcgtgggagcgcttgaggccgccgtttcttcaccgatttgactttccgacgtttcccatctctcgatctgactttccgacgtttctcatccagtgttcgatcaactgttgagaggaacatctccttggcagtttacaatttacgtcgatcgagggatcgcaaagattcattgacgactgcagaatcgctgtcgctagtctggcgaaccctacccctcgattcactttcctgagacgccttcttctcagatcccgccaccctctcacgccttctctccgccgccgaagcgacgacgtcgtccgagatcattgaaagccccggcctccactcttctcgggcccgacacacgacccacgtttgtcagtagccctgatgagacctctgtctccggctcgtgctgccgagctccagcgccggagccgatccagttgaactgctcctcttagcaaccggaccgatctgagtttcttcgcccaccttggtcttggtcgccacgactcacaactttcagggtgagaaagagagggagtcaagggtttgacgcacgcttttgaccctttgacgcttttgacaccttgtaagagaggtacttgtctctttcttcttgcagtggtaaattgcaatttctggtctggctgattactttggagattaaattttattatcatggaagaaagtaagaattctgttgctcatatagtgcctattgtgtcaaaaataactgaacacaaattaaatgggtctaattatattgaatggagcaagactatcaaaatttatttgagaagtgttgctaaagatgaccacttgactgaggaacctcctaatgatcacactagaaaactttggatgcaagatgatgcacggttaattctgcagatgaaaaactctattaatagtgatattgttggtctgccgagtcattgtgaatttgttaaagagctaatggattatcttgattttctgtactctggaaaaggaaatgtatctcggatgtatgatgtatggaatgcctttcattgtcctgagaagggagctaaatccctcactgcatattttatggacttcaagaaggtatatgaggaattgaatgcacttatgcctttcagtccggatgttagagtacaataggctcaaagggaacagatggctgttatgagtttcttatccggtctcccatctgagtttgagactgcaaaatctcagattctttctggttctgacattggttcccttcaggaagttttcagtagagttctacgaactgagaatgtctcatcttctcagcacaccaatgttcttgttgcaaaaggagaaaatgcagaaaatgcaagaagggtgaataacaggggcggaaacagggcatttgaaaatcgtggcaatgattcaagtacaattgtgtgtttttactgccatgaggctggtcataccaagaagaactgcaggaaattgcaaaatcgaaatcggagaattcaaactgccaatgttgctacatctgatactgctacattttcagactcctcagacaagatcgtcacaatgacagcagaagagttttctaaatattcacagtatcaagacgcactgaaagcatctactcctgttagtgctctggcagagtcaggtaaaacatgtcttgtctcctcctcaaacaaatggataattgattcaggtgccacagatcatatgacaggtaatcataaaactttctctaccttcagaacatattctgctcctcctgttactgttgctgatggttctacctatgagattaaagcgtctgggactgtgaaaccaacatcttctattacgttatcttctgtgttaaacttaccaaatttggcctttaacctaatctctgtcagtaaacttacaaaaaatctgaattgtagtgtctcatttttccctgatcattgtgtgtttcaggatcttatgacgaaacagacatttggtaaaggacatgtatctgatgggctctatattcttgacgagtgggtgcctcgaccagttgcgtgtgtcagtactgcctctcctattgaagctcattgtcggttaggacatccttttctaccggtgttaaagaaattatgtcctcagtttgatactttaccttcattagattgtgagtcgtgtcattttgcgaagcatcatcgtagttctttaggcccaaggcttaataaacgggctgagtctttgtttgagttagtacattctgatgtttggggtccgtgtcctgttacttctcaaaccgggtttcaatattttgttacctttgtggatgatttttctcgaatgacttggatttattttatgaagaatcgttcagaagtattttctcatttttgtgccttctttgctgagattaaaacccaatatgatgtgtctgtgaaaatattaagaagcgataatggaaaagaatatgtgtctaactcatttcagaattacatgagtcacaatgggattcttcatcaaacatcttgtgttgatactccttctcaaaatggggttgctgaaagaaaaaacaggcatttacttgagacaactcgtgccctcatgttccagatgaaggttccgaaacagttttgggttgatgcagtttccacagcttgctttctgatcaactgtatgcccactgtagtgcttaaaggtgatattccgtacaaagtaatacatccacagaaatccctttttccacttgaaccaagaatttttggatgtacatgctatgttagagatacaaggccttttttttactaaacttgatcctaaggcgttacagtgtgttttcttggggtactcaagactgcaaaagggctatagatgtttctcacctgatctcaataagtatctagtatcaacggatgttgtgttttcagaagacacatcctttttctcttcacccacaagttctgcaagtgaggaggatgaagaatggcttgtgtatcaagtggttaattcaagaccaactgttgggcaatcaagtgtggttgattctgatgcatctcttgctcatttgggtcctgttgttaatattcctcctgctccagacaaaccaccaattgttcaggtgtactctcggcgccagtgacaaccgatacatgtcctgcaccagctccttcgtcatctgatccttccagtgatctcgacctttctattagccttcggaaaggtaaacgacactgcaaatctatctattccattgctaactttgtgtcttatgatcacctgtcatcttcctcaagtgtccttgtagcctctatagattctatttcagtacctaaaactgttacagaggccctgaatcatcctggttggaagaacgcaatacttgaagaaatctatgcattggaggataatcatacatggaaacttgttgattcgcctcaaggaaagaaagttgttggctgcaagtgggtctttgcggtaaaagttaatcctgatggctctgtggcacgactgaaagccaggcttgtagctaaaggatatgctcagacatatggagtagactattctgatactttctctccagttgccaaactcaattcagttcgactatttatttctattgctgcttcccaacagtggatgatacatcagttagacatcaagaatgcttttcttcatggtgatctagaggaagaggtctatctggagcaacctcctgggtttgttgctcagggggagtatgggaaggtttgtcgtctgaaaaaagctctctatggattgaagcagagtccccgtgcttggtttggaaaattcagtaaggagattcaagcatttggcatgaacaagagcgagaaagatcactccgttttctacaagaaatcagctgttggtatcatacttcttgtggtctatgtcgatgatatagttattacaggaaatgatcatgcaggaatctctgatcttaagacattcatgcattccaagtttcatacaaaggacttgggtgaacaaaagtatttcctgggaatagaagtatcaaggagcaagaaagggatgttcttatcacagaggaagtatgtgcttgatctgcttaaagagaccggtaagatagaagcaaagccatgtactaccccgatggttcctaatgtacaacttatgccagatgatggagatcccttctacaaccctgaaaggtatcggagagtggttgggaagctgaattatctcaccgtgacgcgaccagatattgcatatgcagtaagtgttgttagtcagttcacatctgcgcctacaataaagcattgggcggctttagagcaaattttgtgctatctaaagaaggctcctggtctaggcatactatatagtagtcagggacacactcgcattgagtgtttttctgatgcagattgggcaggttctaagtttgatagaagatccactacaggttattgtgtgttctttggcgggaatctagtggcttggaaaagtaagaagcagagtgttgtatcctgttcgagtgcagaatctgagtatagggccatggcacaggctacttgtgaaatcatatggatacatcaactcttatgtgaagtgggaatgaagtgcacaatgccagcaaagctttggtgtgacaatcaagccgctcttcatattgctgcgaacccagtctatcatgaaagaaccaaacacattgaggtcgattgtcacttcattcgtgaaaagattgaggaaaatctagtctctactggctatgtgaagactggagagcaacttggggatatttttacaaaggctctaaatggaactcgagttgagtacttttgtaacaagctaggcatgatcaacatctatgctccagcttgagggggagtgttagctgtatatatctgtacataccataatttggttgtttccttagggataataccttcctaattcaggactctcaattgtatatataaacaagtattattcatctaataaagaaacgaggaattgagaaatacctcgattcggttacacttgttatctaaaatacgtccattgtctttgattgtggattggacaacatgctttaagattgttgtcacgtagtgtaatatagatgataggatttcttaagcaccagattaggatgctctcacttggaagatgaccaatcaccgtaaggccctcttggaggttttccagtaaagaaagaggttctgctcatagttccttgagggttttactcaatcttatgtgtggttatacaattttgatactgtaaacaataaagtcctattggaagttatatatatatatatatatatatatatatatatatatatatatatatatatatatatatgaatggtcatgtgaatcagatgtcaagatttgtagacatctaataggggatccaccactcttatgttaggaaagaacattttgagttgcaccttttgtgattggatctaaaaccagcctgtatgatctagaaaatattgttatccgatgttaacagaattctacacacaaatatgtatattatataaatgtaagctaaatggtacaaggaacacatgtaagctagaagtattggcaatgaacaatggtagcccaaccgtatttagttggaggggctaagatgttttaggcctaggtaaagagagcttcactgataattctcaactccatgggtgaagttttaatttgttggtagtcatggaatagaatattttaactattaagagttggtgctcatgaatcttgaaaatagagtttcagtatgctatcataggagttatatgtatcctattagtgactccaaagaccagttcctatatccttattataagagttaatgaatcttgaaaagagagtccatgtgtccaattaaggactctttataacagtttatatatcttaacataggatttcatttttaaaatggtggtgattattctgtgggagaatttatgtattaatgactcttaaagtaagagttcaggtatcactaatcttgaaaggaagttcgtgcatgatattgaggatcggtatgaatcttttactttctgatataaagattcctgaagatcctatgccacatacttgcttttcgtctataaatagagtttaaggagtttgtatttttctttcctttcttattttttatttgtttgagtaattctgttgcaatttgtaagaggaatgcatcactatctcaaagattgaaggctaaagtttggaagtccaagactccaaggaaatagggaagcaatgcatgtgagttaggaggattctgaacttgtaaaatcctgtgaagcaaccttaaaattgctcttgattgaactgatctaaatacatatatggtactacagtgtgtaaattttttcaatcaagcacaatcaaagagcagtagttggtaattctctcttaaaagctatattcaatatatgaggctccaatttagattttgaggttgatcagatactacaaattgaaggaaatgtgtctatttactgaaattttgaatttgtccaaaagccttgaggagtttcagtgaaagttcttgaaactataaattcaagtgaaacatcaggtgtagaaactatatgtgttgaagtatcaattttcctaaaagtttaaatgtttaggatttgggttcataatgtatattatggtcttcaacatcctccctcacatgtagccactttttgggcttacatctgggcttagtaaattggtgaaataaacttatggtggtgaggtttgaacacatgatttcctaccaaacgaggctttggtaccatgttgtaactaccaattttcctaaaagcttaatcttgtaggatttgggttcacaatgtatatcatgctcttcaacaatatggacgccttacttgggatgctttaaaacttggatatggtttaaagtcttattgtcccaagtgtcagcacaaattttataaattcagaaccttgttactattgtggaatcaatattaatgttctccagttatcaccaggctgcaaacaacatggatacatttatatgaatataattggatggttcacttccaatgacagattcattcttggtcctttcggattccattagctagttgagtctatcacaaagttaataactcactcaaatgctccttaccttaataataatttatgactagctttctagttataacatatacaactaatttttgttgttgcacttgagtttgccatcattttaatgcatcgttatatgtcatgcatattgcatttgcttgataaatttacttattagattgttgtatcttcattaagttatatgcaggaaatgatgtgatgctattattatggcagggtcag

SEQ ID NO: 12809 - DNA, 3065 bp, Vitis vinifera
  Intron number 2 from transcript GSVIVT01038534001 (locus G SVIVG01038534001) derived from phytozome v7.0 (chr-ID chr3 ; pos 11188621 to 11191685 reverse strand)
taactagggtttcgcatctgatttcaccgatttcggtactcctttttgatccccaattttatttttttattttttatttttttgcaatctgttatctttttccttttggttttcaagattgatttattgaaatgaaggtgtttcttttgggattgattggagaatttgggatattgtttgcttttgtttttgttaaattttgcgtttttggattttaattggattatttgctttagaaattgtaattaaacagggatggcgtatagaaaatgactatggattttgaaggttgagattggatttgataataaacgttggaaatcataaacaatatttgcatatttgcgccaaagaagaatggaatttagttttatattaagcattgggtgatatttactatacacatgtagattgatcaaagcttcaagggggccttgcttttcttgccatgaaaggcttggtgggtatgtcaagggttttcagggatcttccccgactagattggttttgaattgaggaaagtgtcattcccctgtatctgggttcagttggtgggaccatttttttgtggtcatggacttttatcatctgcttagaagtttaagtcctagaatagagttgtgtgatgcccctttcaaagcgagggaacactccattgataagggtcttatggactgatactatgcattttcttgtctagggtggacatattggtttctttgctgtctgatgaatgattggctatccactgaatcttgttccttcttaatggggaccaactttgggcccttgaacacaattttcttatattgatcaggaaaaatattggcctttgatactataaaccgggaaagtttaggaatttggtgattgctaactgggaagcaagagttgaaccaaaagaatgatggactcttaagaattgattattgttggtttgccatgacagtcaagaggtaaattctgctactctgcagttcagagaaccgtctgctgattctccctgaaaatcaaattcggtcccttataataagtggttaacattcaaggcaggaagagagtttgagattaaattttgtttacatgtttccacgtgggacccacctgttgggaggaaattagaatcaaatgctggctggtgcaggagcttgagttctgctaagcttaactccttttcttttctttcaattttggtctggggagtttgttcagtagcccaaaccctattctattctactaaatgaaatatcagtatagagatgctggatcatttagttgctaactcaattgagcctccctctctttctctctccccctgcccgccccctcccccccttcagtcagtcagtcagttgggttcatgcaattcattaacctagagaatggggtggaaggaggaatactcatttgcagatgagtacttgccagctggagtttaagcataataggtctttgtgctttagttttagaatttgaccctagaatgcacttcttggtttttgaaaggctaaaaactttggttatagaggtgcaattcatcaaagttgtttcaggacattaataggttgtcatctgcatccatgccccttttgactgctgattgccattagatcaaagagggattgcataaaaccagttaacggctggatttaatacatctgtatgcatgcattaggcaagtgagcgatgatctaaagcccattggaaaccaaataagagactgcctactatattgctggctgcaactctaatatgatcattgttaatgtaatttgtgttgaacactatgggatgctataagctccaaatctctcttaggggattggctctattggttttcaagaaacggggaaagaagaaagtgaacaaataaaaatttgattactgttattcctatattgtcacgaaatattaaaactattatttcaattaagtgaaatggttttattggttttagttattggaggtttttgcttttgatcaaaattttggcaggttaaagccaatatttgaagtctcttttggcccaaaagtatcaaaggcaaggtcaaattcaaagggttggatttcctagcccaaaaccacccgaaacaaaaagcttgatgtcgtgaggacatatctggggaattgtagtttagcaagaaactatggccaaattgacatattttccattgcaaaataggtatttaggtgaagcattggttcagattcctagagcatcaatagatgttgtttcaagtgtatctggccttgttgagctgtaaatagaataggagaattattttcctattatgttagtttcctatttctgtaaatagatagttttattagttttctatttctgtaaataaatagtttaatgatttaggaataagttagtttcctattatgtctcttgtttcctatttcttctcttgtaatctcctatataaactatgtgtatagtcaatctaatagatagaacttattatttttcatcccatattttgtgtcatggtatctaagttgtaggtttttaagacctgggcatcattctgaccttcatcgccatttttctggccttcatagttggatttttttttattcacgtgttctttacaaacctactagaacttgttcaatagtgaagaaatggagaagctgagaagcttgttgggatcctttgacaaacctagtggaacttattctttggctctttcaggtacaccttcactctctttttgcataaatgcctcacacaaggtttatgatgactcttggataatagactccggtgccacagaccatatgacctccaaatctcaacttttccatacctataccccaagcctaagtaacaagaaaattgtagtggccaatggctctttagctaccgttgcaggttttggagacatatacatcacacctacccttattcttaaaaatgtcctccatgtaccaaaattgtcgaccaaccttgtttccattcaaaagcttaaccatgatcttaaatgttatgctatttttttcccttcttattgtgtttttcaggaacaaggctcaaggaggagaattggacttgctaa

SEQ ID NO: 12810 - DNA, 1896 bp, Vitis vinifera
  Intron number 4 from transcript GSVIVT01016417001 (locus G SVIVG01016417001) derived from phytozome v7.0 (chr-ID chr1 3; pos 4115851 to 4117746)
gagtgaaggtgggtcctcctactgtaactttagccgtttgattgagagcataaggttgatgagcgcctgataaccactaggaatttgacgtgtgttgaaacgtgtgtggtgtgttatttaatcatatgcctctagcatctcacgttgcaacaagacaagattttcagtattttagtcattttggggtttcgagccaatgaaaggaggaaaagaccttgtcagacagggatgctggaggctctcacatttaatttctctgtgttttgtacatttttcgaatctaataagatgctcattgcaatttaatcaacagccacatacatggagatattaaagggtcaattcgttcatcattcacattacagcacggggatcgatcgtaaccagatacgtgtcacagtattctcccacatttatatgttgcgtttaaggctgctttcctgtattttgagtggtagttctcggagacaactagcccccaggggaaacatacagcgtaccaatccccatagaactgagttatatatatatatatatatatatatatatatatatatgatgaattgtaaatcttaataaactattctattctgaagagtttaatcttggtcaaagattaaatctccatcaaaagtctcaagcggcaggcaagataaacaatcaggtatttagtaggactctcaataggaaacaagccttctaaggattggtctgaaaaccctcattgcttcggacaaatgttcacccttttatttcaaattaatgcatatataatcctctctatttcctgtgtctccagtccattttccagctgcgaacccactctccaaattcggtgatatacgtacctagcatttattttggtcaccaaaaccaggcagacaaatccgttgtgagtccaaaaatcatccagtggcaggatgagcaagcacttcctgttgggagcccatttgatagtatggcggtcccttccacccctcatctctaggaatccttttggcaatgattcaagccaatctgagctatacgtactaacccggggtcgaaccgaccataacaaggactggttaatatattggctaggctccaggctatctccaaaaattcagtttcatccacttccacaacacttccaaagctcacacaaatgatagatttaggtgcttgttagttcagccaggtaaaagtttgatcacgtactagtgaactagaagagtatatatggaaagtatttttgaaatggacctattgggaaaataggaatggcagaagtatgcactggctaactggccagttcagattcttcaaggtcttccaagtagttccaaattaatcctaaggaggcccttgtttcaaatcatgctagttatgtgatcgaaaaagaatgagaaatatcgaatggaattaagggacttatagttcacaacatagatataatgtgtgatgtttcaaaattcattatcttttatatactaatattctttatagtactataataaaataattctttcaattgtgaatataagcatatttgacgtcgaatctatgttaaaacctcatagatctttgtgcgggttattttatgtttgtgtagttaaacaaatattttatacattgaaacttggatcggcacaacatgaaatgcgataaaatatctataatttagcaataataggctcctcataagcctctaataacaatcgagacaagcaatcctggaagggcgtgacgcagttgatattaaggagttggatgagagctatgacatcagtcgaggtggcatggctttttaacaagccatcaggaattaaatggaaggtgaagtgaggaaagttggaagggttgggagagttgaagtgggtgtggatgatggtgactgagaagcctctgtcgtca

SEQ ID NO: 12811 - DNA, 4886 bp, Vitis vinifera
  Intron number 1 from transcript GSVIVT01017250001 (locus G SVIVG01017250001) derived from phytozome v7.0 (chr-ID chr9 ; pos 5895031 to 5899916)
ggacttcttcttggtgatattgaggtctctcttctgattcttcgaatcccaagttttttgttttttcacttctttgcatagatatatgtgtttgtttcgattggttggtgggttgggaactttaggttctatttggttgctgggaaaattggagggcggggagaacgggaaaattttggattttggaactaagcccagctgtgtcattaggcagagttggggtgggtggggggagcagggggggcgcggtggtggtattgggtttcggataatgggatgtgcaatgttgagaattttgattttttggtttggtttccttggttttctcagcagccaaatgaagggttagtgttagttgagatgaaatctgtttgtatttgtgggttttgatttggattgcttcttgaaatggattcttcaaattattgttctctttctgttttgatatggacttacattagattggattgttggatgttgttctttcgaaaaatcagaagtggatgtttataattattttctgtttggctctctttgactagttttacttgggttttgtgcatttctacgtgagaatgcgacacaattttagttgatagacttgactattgtgctgagatgtagttggaatatttcaaactttatgggcttgattgttttctgaattgggtttttaagattttggttccgtttcatttatttagtgaaagttcgttttttttcttttttgataggaaaacagaggttcccatagaaagtgcctaacaaaagggagtgcaccttctgtacacaggtggtatgcaagagacaccaaagaaagaagaagatgcacaccactccaataatagcgaacctgtaaccttttacccacaattttttgactatcaatgaagctcaacaatgttgaattagccaacccaagtggaaccttagattatttcaaaagggacttaatgaggttctcctttcgaatgctctgcctcattatgaatttgatcattgtgctctctacaaatgcaccgaagtgggtaaggggtgggggggcactcacgaaaccttcctctttttgcttatccaagccttgcaccttccagcacaatagaagctccctagttgactctagaaatacccactgcaaccctgagatattcaacaacaacaactcttgccactgtctaatgctatttagtgaatagagtgtggtttactaatttctgaccaattttactaaggttggacctgtttgcattgacctccctgtcctcatgagaaggtctattgttaaggtttttccctttcgctatcttccatgcaaaaaaagaaaaaggaaaaaaagtttcttatggaagcacaagttcctcaaatgccatgaacagagaacaaaatcatgtcctcacaacataaatagttatgaaaagatttcaccttagaactcctctttttatccgccctccaccatttttttttgatcaattttatcctccctccaccataaattgttctcatctgctgcttgtaaaccctcagaattaatgatatcaagaactgccccacttcctctaattcccaattctaaaattgccttagaaactgcaaggcctagtgactaccacctccctcatcctccaccttcctcatgtccttgaccctagtatttctggaggaagctagactgaacagaattggaaagcatcttttagaggttgctctttcactgctctgtacctcaaaaaattagtcctcaccctgaccacaatagaagtcatggggttgaactcttcccacccaatttgaatatctttatacaaccccacaccaaaaagcctctctcaatcttgtgatcaccaccccctctcgacctctctgaattttccaaaaatgatccttctccacaaattgtcatgttcagcagcatattgctcagtagcacattgttcaaagggctccagtttgcttactcctcattgtccatacttttcgtccttgcaaattgttgccattcagtaggtggatttttcttccttctagatgatttcctcacaaaaactctttttggattttatcaagtttaatcttcacttttttggggattacaaataaagacataaaatacatttggaggcttggaagggtgctcttgataagggtaaatatctccctcttagacaaagactacttcttctaagagcttaatcttcttttaaatctttccttcattgaatctcaaattacacaagatctatgaaaagtaaccaagggcaaccataggtaagtcgaaagaagacgactgccttacaaccaaacaaataggacaaactctctacccccaccatctcatcaaagttctgttttggtttcagtgttttgtaggcaaataagaattaaacaaaaaggttgcaccaaagtacacagagggtataaaaaaggcaccaaaatgacagaaatacaagagagaaagaaaaacaactccctcccactaagtagtatccaaccaatcaacaaggtctaatacaagcatagaggtagaatctcataacttcctaatccaaagccaaaaagaattcagtagagaattggtcaagatcttaaattttatttgttactttttaggaaaggaaggaagagtatgtacaaatgaggaggatatatacaccctatgctgaagaaagagtgaaaagtaataaaaggcataaacagaaaggccaactacctttatggagttagtcgcctaggaaaaatctcctaagtaggtgctcccctcttagctagaaaattgacattacagttttcattcccaacataagcacaattacataggttaacaaagtgaatgattgctctggataaatgccgctatctttaagaaccttttcaccttgttttagcccatgagataacattggaacaacctacttcaataaaaaagttagagcttttctagatttgaattccttaaagatatgtaagaaagcgaggaacttagctttagcgagtcattatgaggcaggtttagataaggtggtcgggaacaacattggaaatatcatttcaagacttacaagagaaggggataggttgattccaatgcctaagctttgatttgggatactaatgatgatttaaaaattcatttctcttgggatttatcatggtagtgagagaggagtattgggttgagttgtggaaagcaataaggattgtttgatcttgtgagaactaggagtctttatcttctttatttgctttagctagaccttttaatgattaggaggtggattgtgtggggacatttctagcatgtttgcatgggaagagggtgtgtagggatgtgacaactactatgctttggacggtgagaaagagtgacaagtttatagttaagtctctttacaacgctttggagccaaacaatttcgggtcttttccaatgagaggaatttgacttttgtgggtataacttagagttagcctttttacgggggaggcaacatggggtaaggttctaaccttagatcaaatttagggatgaggatgttctttagaaaataggtgttacttttgccatttgcatgaagaatccatagatcacttgcttctccaatatgaaaagacaagggttttatgggagttgctttttgcgctttttagggtgtcttgggtgcttccctcgtcagttagaaagatacttttggggtgacatggttcttttgtgggcaaaaaacgcaagaaggtttggagtgtaggccccttatgcatattttgaagggattggaaggcaaggaacaaaattgtgtttgatgattaggtgttttcaatccaaaggctaacaaatacttttgtttgttttctttggtcagagactaagttgtttatagatgattgtcctttgagtttagtgagtttatttgattggttgggcacttattaaggctctaatacttttggtaattttttctcctatttaagccttggtggcggtgggaggtttgtttctcgtatgccttgggtcttttttttggtgactctttttaatacaatttgtttctttatctatatatctatatatatatatatatataaaagtttctgttttattttttttttaggtttttattttaattagtggttgactttttgtcaagtttttgtttcttttagtgttcttattatattagaaaattttgtatttcttttaatttttagataatttttctttcctatatcttttcctattcttgcaaggaaggatcaggaattagaaaaaagttttattaggcaagagtcaacatctactatgcttcctttgagggtgtgattgccttggaaccttggtgtgattgcttttggcttctttcttcttttccatccatattttattttattttattttaaaaatttttcacctcattctatgacctaagataatcctatagtgctgaaaattttaatatctttcattgtaaagtaaagctaagcatgagactgttaggtgatgaggacttgacaaggttgagtggtctgattctatctctttaccatgtctttgcaaatttgatttgcttggttttttgttaatatcatgaacaatccagctattttgcaaagtgggcagggactgtagagatgtgaatgttgaatccaaagtttttgatatctgggattaatagaaagttgtttaaattattataatttatccggactattatactcattacttgcatatatgaatcttttactgccttggttactaaatctcagattgcacagttattcaaatgctgtgattggctattttaggttaccaataactgtttgttttgttttgttaaccttgtttctttgtagtgatggtttgatttagctttgtcaatttcagtactcaaaaa

SEQ ID NO: 12812 - DNA, 2181 bp, Vitis vinifera
  Intron number 13 from transcript GSVIVT01029707001 (locus GSVIVG01029707001) derived from phytozome v7.0 (chr-ID chr 12; pos 13478856 to 13481036)
aaaagtatatatcctgccttgattcccatcaattttttaaattattgatccttcctatgactatgatacaagcaggtcaaatttatatgtgcttattggtttaagtttgaaactttcatggtgctgttcatccaattgaataatcaacttctgctgattatggatggtggctactcttggagtaaaacatcaaaatatccattggtgacagttgcccataacagttcaaaatatccattggccccacatccataaggggagagacaactgtaaatagatgaggaaagcagcaataggagagacacaaagctataaatagatggggatggtagcagtaggacttaaccttgagacctcaaatcagcagaactggataatatgtggggcaataagatagatggtaggagagattcgaacttgggatctctagttaacctgagctttaacactatgtcaaactaccgactttcttagaagcttatgttgttaggatatgggtctacaatgtatattaggctatcagagctaatattttgtagtgataggaaaagttttggcaaaattaagaaatcaaaatggactttcacagttaggttttagtagatacaaaaatccttatgtaattgggaatttcaccaaaatattggtggggggcgtgcgcagggggagggagcgcttgggatttgaacctggccctcaggtgtgaaaagcctgcaccttaaccatcaggttagtttgacccttgttataatatatgtatataacaggttttttgaattgacaaattgaccaatcttcattctacaaaataaaatattaaaaataaaaattttgtgaataaactaattttaattattttatctttaaatttgaataaagtgatcattcaaaatgtaaagattgataatcttcttactaagcctttttttctatcttatcgtaataattaaatgcaaaagaaagcataaatttataaataaaattataaacattgttaaacaaaaatcacacacacacacatatagtttcttttatatttttaaatatatataaaccagatatatcaccattttagtattaaatgtgtttccaagtattgtatattattgtccaaggttgaatatttgtcatatagtctttttgaaaataacttgcataagtgtattattacttatttgatcatttcttgcatttttttcccaatatttctatgagttttgatcaatgcccaactcactcatattttgttcaaattttactccgatattttttgtattttacataaaatccaaccaccgatattttagtaaatttccaatattttaatccttgaactccacaaatgataaccatatatctgaactagacaagttaatgggaaaaactactttcttatgggatatgtactaagttattatcgtccaaaataaactttataatcttttcctacataagttgcagagattccaggttctattctatatataacctgttataattgtgtacaacatagagttttttggaaaagtttaagctattgtagtaccattatctagtttagaagaatatgtagcatgagaatcttgttctgctaattctttgaagttatttatttcctcagaaaagatatggaatttggtgtttggatgccggaaaaagtgtagaaggctttctaagcattcagaatttcatatttgctaaaatataaagtacgatttcttcataaggaaagatgcagcacatgatggtttgtacttcattctctctacttgcaagtaaataacaggttgactagttgcctcaaagtacaattttatttctgcttgaacttaggttattctggatatctgctggaataaaatgttgaaagttagtttattttgtgtattaaaaccttaaaaaaaatattaatgttaacccattttccgccttttgtgtttgtgtcgcttcaattgtcgatgataaaaaatatcagccttgtcatgatttgtgaagaaaagagaacatcaaaattgttatttctttctctgcaaacattactagattgtatacttgtgtttgggatggtcagcaattcttgcaagcttcttcattcttgtgtgcatctattgcttgccaactattatttttaactcattaagctttgtactgatgtatactcacttagtaatatcattgcag

SEQ ID NO: 12813 - DNA, 5290 bp, Vitis vinifera
  Intron number 1 from transcript GSVIVT01018360001 (locus G SVIVG01018360001) derived from phytozome v7.0 (chr-ID chr1 5; pos 10394965 to 10400254)
tatgtaataatgtaaacttattatttcatttaacattgtagagtttaaactacatataactaaatagaataagtaataaattgttaatctaatcctaaaattttatgaaacttcctagctcattctttatggttatgtttggttccgaaaagtaaatattaagaatttttttttttttttttgtttagttttgctatgaaaaataaggaagaaagtcaaatttaattaaaattattaaaaaaattcaataaattgactaagatttgaagttttgggggacaacatcaagcttttatacattatttcaaaaattaataaaaaccctccaacatctacttgcacaacgttttttcaaaactaattttctttgaagttattagtgtcattccaaaattgcctattggacttgttatataaattcatccaactttctaaatgcacttgtacgcacaaattttgtaaaagtcctgtgaaattagcaaaataatagaaaaataatgcgaattaaaattgttggggtacaatctcaaaaataatattttttttttataaaatgatatttttcctttgattccttcgtttcgactacaacttgaagaacaatgataaacttgtttccttgaatttgaagatcaatcgagggcttaaatgactttttcttgaatgaacttgttaaataacgaagaacacgtatgtaatcctttaaccatttatcaaatttgtagagagatttgatgaagttttttattttgttgtgaaacttcttttcctgtgcaaagttgcctttgaatttttctaatttttgaattttctccctcttgaaagaagtcacctctatttatgggtgaaagtagggaatttgaattccgaattcctaaattttagttgcttaattcaaaagatttagttccttgattttagcaacttttcttatttagaggttttaccaacaagataataataataataataataataataataatatattttattattactattattatctttttgtagttggaggttagtttttttttaggaaagttacctataaaaggatatctatttttatttattcacttatccatgcattgtcatgtggaagctttaacatttcatggatactaaaaagcgagggtaagcactgtaggtttgctactatctcatcatctcctttggttttgctcaactctacaccaagagcactttctccatcttcacttggcccatcttcttccgaagtctcatgacaagagaccatatgagttgatgtcatcatctctctatcaaaaaactctaaagggaagtattctcctaaggtgataggggtgatgagcttttgtaccaagaggtcatcaacctgtacaatcttttgttttcttttgggtttcttttcttatttctttttcaggtatcgacaaatattttgtttatattgttcattcctagaaagatttgggtattgatgagattcttgcttcttgtgaggtcttcttcgtatcaccaatgtccaaccttcttcactatatgacattgattcattatcaaagcaaaagtgaagaatggtgtcatggcatgacacttgtgtttgcttttgtttcgatgacttgcattggatagtatcggtgcatgcccttagtgtcttaggtggaacatgtaatagaacaggatcgaaagacccaaatgtgactatagcatgatttgactctactacttcatctagatccaaatgaattcttccttgctttataagtttcattatgagatcttttaagatgaaatgtttctccattgggtgattgatgattcgatggtaatgatagtagtttggatcattaacacgacccatttttttggatccttgcacttaggtagctcaagaacttttttttggagtaggtcttccaacatgctaggcacatcagagtcaagaaaatgatacttcttctcctctaattccttcaaggtgaaccgacacctctcattttcttgggttgccagcctcttttacttccttcttttgatctcatgttgagattttgatggacattgtatttaccgtcattaactattggatgggttttattgaggtcttgtcatttgttttcccatcgtgtctctttctttgccggtcaacgataaggtctttcttagcaccatggttggctatgttgagctccatgtcatgtgctcaagtagctaattcttcaaaggtatggggttgtatcccttggaggatgtataggagaccccaatgcattccttgtatacacagctccacggctgatacctcggataatttatctttgcagtcaaggcttaaggaatgccaacgattgatgtagtctactactggcccgtctttccattgcctagtattggtaagctccatcatgtttacaattcatcgggtgctattgaaacgattgaggaattcatgttccatttggttccaattatcgatagacttaggtgtaaggtttatgtactaatcgagaagagatgcaacattcgaaaggtggtcgagtccttgacttgacttacccctattttgtacttttgcctcaaccttgtttatgagggaggctatttgcatatccttctccttgaccgtcttggtgagtttggcaatggtgtgagtcatctctgctaattgttcttctacggatgtagtgtcggttgccattaccagcatagtcatcaagaaaggagaagtaaaaaagtcgaaacgattagagtaattttcctcatttgacattctagttggcgatccggagtgtgagctggtgctggagttggtattggtaacagagcaaggagacttatccccaaagttctttaatgctaaagggagttttcccttactacgaggactatggttttttgcccttggagaagccaaagtgatgtgtgctcatcatgtgtccttaccggttttaacaagcaagtagagtcacttatatgttttgttgaaggtgaatatgttgattttgctttgctacgagttatggggcccataacggtgttgtgtgtcgattgcgcaatgacgatcttgtcactacccttgttgacatgcacaacttgaattcttttggatgccattgatgtagtagtgatcatttttctaatgaaagagatgagagatagagaggtcctaccaagcatgccagaaatttgcacgcacaaatttcataaaagtcatacgaaattagcaaaataataggaaaataatgcaaacaaaataattattaaaattaaaattcttggggtacaatctcaaaaataatatatatatttttttacaaaagaatattttccatctaattctttcgtttcaaccacaacttgaagaacgatgacaaacttgtttccttgaatttgaagatcaattaagggcctaaatgactttttcccaaatgaacttgttgaatagccaataacacatatgtagtctttttactgtttaccgaacttacagggagatttgatgaagttttttcttcttttcttgtataaagttgcctttggattttctccttcggatttttctgatttatgaattttctccctcttgaaagaagtcacttctatttataggtgaaagtaaggaatttgaatttcgaattcccgaattttagttgcttaattcaagagatttagttctttgactttagcaacttttcttatctgaaggttttatcaacaaaataataataataataattattattattattattctttttgtagttggaggttagttttctttttcttaggaaaattacccataagaagaatttttatttttatttattcacttatccatttatttattaattttgaagaccaaattagtggtaatttaatccactaaaatttttatgtctacaacactatttcatgttctattttttgaaactttttcatcgaaaattattctaattgtcaattttaaatgaaaagtaggattacatttttcattaaaaatgaataataatattgttaaacatttttgctttaaaatggataataacatttttgcaaaatgagtatataaaaaaaatgataaaaaataaatttactatatttgagatattcatatctcatatcttagcattttattttacaaaatgagtatatacaaaaaaattgatgaaaaataaatctatgatacatgagacatgcatatttcatatcttaacatgaaattaacatattccatataaaaggaataataaaaaaaaagtggatgatatatttcaccacttatcttatttatctcatatttagttgaacagaagatacggtaagtaactagataacttatcagagcttatcaccaaccaaacataaaatatgatataatattcatttcatgttatatctgataatcaaacatgttctaattgtttaaaatcactttgtagattattcttaaaagttattagactcgttcaagaatccaaaacgtcaactctattttgatttgaagtctagttgttaggacaatcgaggttaatgcaaagagacgtaaaacatttatgcagttttcatgtattgaagtgcttctcaaaatcatcaatttgtcaaagtccaattctttaagcaaatgattatttccatgaaaacaattgtagtcaatgccaaattcaaacaaagtgtgccactaatgtcaaagccagagcatactccattccttatttataaataaatatttatgtaaatggtattaaataaaatattgtttcttcaagaaaataattgcttcaattggaaaggaattttattttaaagtcaacttttgtcctcccataacttttattagaaattattttttatttttataaatttatatttatccaaaatttcattgaggcctttccaggtttggtataaatacactcaattattattggttacaaattctttcgattaatatctctataaatttaattcgtttatcaaatttattttttagagagattttaagtaaaaatattttagatttgggtttttaatagttcattaaaaatgaaattaaatgttttttaaaaataaaatttatatataaaatagatttataggggtgttaactgaaaaaatttaaaatatgtggtggattagtgtatttatactcaactttggggtgtaaatgaaattaacttagaattaattggattgacataaaatgggaaagcgcgggactgagagaagataatatcatattatttgataatttatttttgtttgagtcgttcattttgtggaccgcttgagttgccaccgt

SEQ ID NO: 12814 - DNA, 17856 bp, Vitis vinifera
  Intron number 5 from transcript GSVIVT01011337001 (locus G SVIVG01011337001) derived from phytozome v7.0 (chr-ID chr1 5; pos 8798728 to 8816583)
atctcttagaagttattaaaaaggttttcccttcatcctctcaaaactcagtagttttatttcctcaagttttcccctttattttatctctgttatatagcagtagggtaaattagatctcactttagttcatttgactaataacatggtccttctttggattgattgtttattcatggttaataataagatagaacattccatttgcagggatgaacaattacatggccagattggattattagatttacctatgagctgtatagttctttagtctatctaatttcatgttcttggactttaaatgaatagctgactctaagtagttgaaattggggcttttttgagttgagtagaagaacatttggagaatgaattaaagtaagactgctattgttattactttgggcatcatcatcatcaatactgatattctttctattattaattttaaatggtgactccataaaatatttgaaataagttggaagactttataaagtgtttgaaaaattgagttcttagatagtagggagagagattttatgatggtgttttatcctcttttttttaagtcatttacttgctctatttctttgttatttataacacttaatggtaatgtttcttttggctttggagaaaagggatacaccattccttgttagaatgaacacaagtaggaagttcctataatatctagattctaactccacctagcaacattgtctcaacatggcatggttgtgggtgttggatgcttattggtactaaaagcaaattggggaaaaacttaatttttattgatatgaataaatgaacaacaattgacacaaaatgtatttggactttataaccgtataagactagatttgttataatagttatcttaatttgaataggaaactaatttaaaataggagataattatttatgattttaggcctatggaccaaacttatcacaactaattctcctagaaaatagctcctaaaatggttagaatatttttacactccccctcgagttggttcaaagatattgtggaaaaatgtgtattcgtgtaaatacagaaattatagatttagaatatttttgtattaattgaatccgtgatttacagggatatagttaggataatttgaatccctgatttatagggatgcaattaggatagtttccttatttttgtaaaatgcagtgtaaataaactaagggctggatgtaaatgaatgtgagttttcaacatgttctttcacatggtatcagagccttgggcgttttttctgggattcttggccttcattgctgtgaatcaatctgaattttgtggccttcattgctgttttattttacaaaacagagtttgtgaatctctgtttttcttctgctaaggagggggagtctggtcaagtctctattactgatcctttcttgtttcttttgtcttcccttgggcttgtttgtgtcttaagatctcgtaattgttttgatctattatttgccttcaacgatcatgtcaaaaatcgcacaagctgcctctgagacacaagtgactgagaatatgactgctccatccatgggagagttgcagaacctgcaagcaatgtacaagattgaatggtcagaattatttgaagtggtctcagatcgttcagacatttttgtaaggaaaaagaaagttgtctcatctccaaagtactggacccaaaccgggagatcccaaatttgatgcttgggatgacgaggattccatggtgatgtcttggttgtggaactctatgttgcctgaaatcagcgacacctgtatgtttctaaccactaccaaggagatatgggaagtggttggacaaacttactcaaaggtctgtgatgctgctcaaatctatgaaattaagattaagatttctgctactaaacaaggtagtctttcagtcactgagtatgccaatctcttgaagaatttgtggcaagagatggatcattatcagtgtattcaaatgaaatgcagtgaagatacagccatgctcgagggatgtggaaaaaggataaaatttatgatttccttgctggattaaacattgaatttgatccaggtagatttcaagtgctgggtaaagaatatcttccaccactaaacaagactatttcgatactctgagtagaataaggaagaagaggggttacgatcaaactccaatcagtggaaggctcaaccatggtcacagaaaatgcaaacttgaagatcattggttctagtcaacaatctagtggtgataatgaaaacaccgattcttcaaagttggtgaataaagagtccatatggtgcatccattgtaaaaagccttgacacagcaaagattgatgttggaagctgcatgggaagccacaaatggcgtagctatctattggttgaaaaacaactatgatatttgattaaagaatagtacacatatatagtaatgtctaagagggaagcacccaatttacaactgtcctaatcactaatttacagctatcctaatcaatagttgactgttacaattatcttaatttgtacattgattgactaattctactagctaatattgacagctaatatgtaccatatataggtcctttagagctgatcaggcccctaaaatcaggggattcaattgatttcccatacttcccctcaagctggtttgaagatatttttcattcctagcttgcatgtcactgagttgaagcttggattagacactcctttagtaaatatattagccaactgcattttagatgaaacaagaggagtgcaaatgagaccgttatcaatcttttctttgatgaagtgtctatccacttcaacatgattagtgttgttgtgttgaattgggttatgtgcgatgcttatggttgccttattgttgcaatatagcctcataggttcttcaatgtgtacttgtaattcttttagtagtgttttgatccacatgagttcacaaatacctagggccatggctcggtattcagcctcaacacttgatctagcaactattggttgttttttactctccaagtcaccaagttgccccctacaaaggtgcaataccctgaagttgatctcttgtcggttatagatctagcataatcagcattagtgtaaacctttttccttggtgaacatttgataaacaatgtgtggtctccttggctttgttgatatccaaaccccacaagggactgagcaaatctttcaaaccaggcccttagggactatttcaagccgtataaagacttgtttaacttacacaccttcccattcttaagttgcccctcgaatccgggaggtacatccatgaagatttcttcttccaagttcccatgaagaaaaacatttttttacatcaaagtgttgaagtgaccaattgtgatttgcaacaagggatagtaggattttgatggagttcatctttgcaataggtgcaaaggtctcatggtagtcaatcccgtaggtttgtgtgtaccccttggtggccaatcttgctttatatctctctacaaagccatcaactttaaacttgatggtaaacacccgtttacatccaactagacgctttcctttaggcagatcagctatatcccacgtatcattcttgtatagggccttcatttcttcatctattgcctccttccacttagggtcaacaattgcttcttatatattttttgggattgaatttgaactcaattttgtagtaagggcgttatagctattgttcatcttgtgataagacaagaaattcaacaaaggatatttggtacaattcctaatgccttttatgatggctataggaatgttcaaattagtatcaaccacttggacaacattgggaggatttaaaattgttgaatcaggaggattaggagatataccttcttctagggtcaatgattgattgtgctttggaggattttgaccttgttccaacctagtttcctgaggtcttcttaagtaaacaaacaactctgaattctgaggcttcccttgatttcataactctgattttttaggctccccctgaattccatttctctcatcctcccaagtaggcattggcaaaggtagggaccaatcttgggactgatcttccacttccgatttctccttctgaagattagtctcttgataagaatttatggctggtcctcaaagaatttacaaccattgtaacaaatttctttcgagaaggaggatggtaacatttataacccttttaagtgggagagtggtccaagaagatacatttagtagctctagggtcaagtttagatctgtatttacttgggatatgaacaaaaacagtgcatccaaatactttcggagaaagtcccaagccatagtatacgggaaaaataatttttcaagatttcaatgggagttttgaagtcaaggacttttgacggctgtaaggatagcatcctcccaaaaagtcattagaacgtttcttgcaaacataagtgcccgggctacttcaaggagatgtctattctttcgttcagccaccccattttgttgaggggtatccacacatgtagattggtggataatgccattgtgagtgcagcatgtacttagactttcattgaagttcttagttccattatcagaactaatcacttgtatttggacaccaaattgtgtttgtatcattttgtagaagttttgaaagatgggaatagattcagatttcccctttaatagatacatccaagtagtcctgctacaatcgtaaataaaactaataaaccacctagctccaacaagacaagttacccgtgagggtccccacacatctgtatgtataatagagaaaggaacttcacttctcttattacttataggatagggaacctgattattttttgccaattcacacccttcacacttgagcttgagttatctaggttgatacaatgttgtaggtaagcgaaacttggatgtcctactatctcatgcatcaaccaatagctttcaaaaagtcctttagcagtcccctttatttcaaaaaatcttttagcagtcccctttatttgataagcctgaacttttcctcctttcttgatgtccaggtagtataggccatttctctccttagcactgccaatcatcttccccgaagtaagctcctggaaaacacaatgatttaggaaaaaagttattgaacagttgtaggtttttgtaagtttgctgattgacaaaaggtttcaagacttttttggaacatgcagtacagaaatgagggtaatatttggtgaaagagacacatttcctttaccactaattagagtaaaaattccatccgcaacctgcactttttgtttgctagaatggggtatatatgataagaaaaaattggattctttggtcatataatcactagctccttaattaatgatccgggagttagaattagatacaacagtggttgtaagagctttatggagtgtacttgattgtgcaaaagcacaagaagtggaagtgggagtaacctctgactttcccatgatcttatacaaaagatcaagttgttccttcgtaaaagatagattctcatgagctgatatatattcattagtagtagcggtgaggcttgatactgtttcatcttggaaactcttgctaggcttggaaaatttccattcttgttcccttgttgtggtcttccattcagtttccaacatgcctctcttgtgtgtttaggtcttttgcaataatcacaccatcttgtatctttttctcctcccttgtatttggattgttctccacagccacattgagagcagaattatcatgatatgatgttttcattataacaccaattctggattcttcactatgcagaacacattttttttcaatgaaggaagaggaacttttccaaggattcgactccttacttgatctagctccggattcaagcgagcaaggaattcaaagatcctttgtcttttcaataaatcagcaatctttgcaatgtgttgataaatgtccacctcatgctataataccttcaatgtattatagtatgttgtgactgtcaattctccttgtttggtcacttgaatcttgttcatcaattcaaacacttgagcagcatctccttgctttgaataggtatgtgtaagagcatcccaaatctctttcgctgtagagagaaataagaaaggcttagccatttccggttgcattgaattcaacaactaggacattattaaagagttttcagcttcccatgattcaaagttaggatccgaagtttctggttctgtaattgtcccatgtagataccccattttcccttgacttaatagaaagagtttggccaatcgagaccactcaaggaaattatgattattgagtttttggtggtgatttggagagtaggattatcaagttgattggagactttaaggaatatggtagtctgattggaggtttgttcaaccatgaggagaactgaaaaatgaagaaaaaagtttgagaaggggcgaaaggagtagacaccaaagttaggagaaggaagggtgaagacaccaagaaaaaataaggaagaaaggtaaggcgaagtcgctagaaaaaattgagcccaaggaactaaagtggctttgataccatattgttgaaaaacaactcttaatatttgattaaagaattgtacacatacatagtagtgtctaagaggcaaacatccaatttacagctgtcctattcactaatttacaactatcctagtcaatagttgattgttacaattatcctaatttgtacattgattgtctaattctactagctaatattaacaactaatatataccatatataggtcctttagagctgattaggccctaaaataaggggattctattgatttcccacaatatccaatcagaattggaccatgaagaatggacaacaaaaaggacaagggcaagcccatatgaccagcacacaatctggtagtgagctcccaaagaacaaagtgagtttaacaaagatgaaattgagaagctgagaaatttactgggaacattggaaaagcccacaagtataggtgcttgttcctttgcactctcaggtaagtatactacttctcatgcttttaatacctcaaatacaaacctgttgagctcttggttcattgactcaggggccagcgatcacatgacccactcatcttataaattcagcacctatggtccttgtccaagcactaagaaaattgccattgctaatggaaccttaataactatggctggccagggagacaaaaaaaataaactcatccctcattttgaaaaatatccttcatgttccaagattatctactaacctagtttctattcacaaacttacaaaagttttggattgcattgtggtcttttacccttcttattgtgtcttttaggactaggatatggggaggatgattggatgtgctaaggaaaaagatgaactctattatcttaaagaatcgtgtgcgcaaagtgggattaagaaccagttacccctattatttctttctgagtcttcaatttctaataaggataaggttttgctttattattttcgtcttggacacccttctattaacattcataatggtaaagtgggttctcttccctcttgttatttgagcctccctttaggagccacttttaaatccctttgtgtttgggatgtagtggatgagagattttagaagcaactcttgctttatgaaagaggtaatacttatcaaaaggagggagttgactttggtaaaaagcactctttctagcctcccaatctactttatgtccttatttgtcattcctcacaatgtgtcttgtttgtcattcctcacaaggtgtgcttaaggttagagaagatccaaagagactttctttggtggagaagagtcagagtaggcctcatttggtgaattggtctattgtttacatggagaaaaaggacaagggcttaggcatcataaacctttccatgctaaataaggctcttcttggaaaatagtattggagatttgcttttgagaatgagcctttatggaaacaggtgattgctgggaaatatggagaggaagagggaggttggtgttctagtgcttcaagggaaggccatggggtgggacattggaaggccttcaagaatgggtggacgcagtttagcaaaagggtgcttttaaggtggggaacgacacaagagtgcggttctgaaaggataggtggtgtggagaggattccttgaaagaggcttttccaagcttgtactctttatcttcctttagagaagcttgggtgctcagttgtgggaacggataggggaactagaaccctgttttcacatgacacaacaatgattggaaagtgagagaggtggaagctctatttagaagaatgcacatacaggtgcttagaagggatgatgaggatgtcatctgttaagtctttttacttctccctaacttcttgcaattctagagagttcccttcaaacatagtttgaaacccttgggtgccgaaaaaagtttactttttttcttgggaacctatttgggggagaattctaactctaaatcaactaaaaaggaggggttagtccttatcaagtaggtgctttctgtgtaaagaaaaaaaggaatcaacaaaccatttagttcttcattctcccaaggcaactgtgatttggtagcttacttttgctctttttggtgttcaatgggttatgtccttttctatcaaggaattcttacttagctgatctaactcttttgttgggaagaaaaggaaaaaggtgtggaatgcaaccccttcaagcttatttcggaccttatggaaagagagaaatataagagcctttgaagacatcgaactagcggactaagctattttacggtcccttttgtacatgtttttggaatgggtcagggtttaagtaggttttaggttgtgttctttatttgatttcattgattggttgagatgtaagtaagatgatggtttttatgttttttttttttttttttttttttttggcattttgctttgtatacatcgtgtatactttcaggtgtacttctttaggtcttcttgatacaattgtttttagttaaattaaaaaaaaaaaaaaaagaatttgaacctactcccaaaaatgagacaatgactcaaacaaaaccttctttgaacagtgccttcaattatcttgataacaatgatcttgacttgcctattgtacttcaaaagggaaaaagacaatgtatccaatatcctttgtcccattttgtatcctatgaaagattatcaccatctcatcaagccttcctcactcacctaaatattgtatctgttcctaaaaccctatctgaggcattcaaaaatgaggagtggagacaagccatgatagtggagatggaggcacttgagaagaataattcatgagaaatagtgaagctacaaagagggaagagtctagttagttgtaaatgggtgtatactattaagtacaagtaagatggatcaattgagagatataaggctaggttggtagccaagggttatagaatgccttcttgcatggagatcttgaaggggaaatttatatgaagttaccccctgggtttagtgtgaattacaaggaaaggtgtgtaaactcaaaaaggctttatatgcttaaaacaatctcgacgagcctggtttggaaggttgtgaaaggtgcgcctaggcttcgagcggcgcgacgccaccctccggcacctcgcctgaaggcaagtgacgccccttcacgaagtcgctgcttaggcgtgcaaggtgctcgcctctggcaaggcgcgacgtggtccctaggtacacctcgatcccttacctcctccttctccttctcttcttcttccgcatcaggttgcagagggcagagaagccctattttttttttttttttttgattttttgggatgaaaacgacgctgttttggccctttttattttaaaaagaataggccaaaacgacgtcgttttggagcctgttccttttaaaaaaaaaaaacaggccaaaacgatgacattttggccctgttttcccttctagccccattttctggttgttttcaactcgacaccccttccaaatcttgccctagcctcagtcgtgcagtggagaagtgaagaagacgaagaaaaagaggaaaaataaaggaaaaatagaggaaaaatagtcacataccttttcgggacctcggtatttttttctcttttcttgacttttccgcatttttttccattcttgtctcataactctcattgacattttttttaaaatataaatattgtattttgacatgaaaattttactaaataaaaataaacaaacaaaaaacacttatgtgcatattttttgttaatgtgatatgcatattttttttttcaatttttttcttaatttaattataattatgttattgtagtatagataatttgtttgcaagatgaataatgagagtgaaactcaagtggactctaatgcaagtgaaagaagagatcccagatggaactatgctcgtttggttaatgaaaaagatttgaacactgtcatatacatttttttgtgataaagtaaccaaatgaggcatatatagacataaataacatcttgttggtggatatagaaatgctaaaaagtgtagaaaatgttcggaacatgttagagaagaaatggaagagtatatgagttccaagaaaagtcaaaaagagcaaatgaatatggggagcgaagatgttaatgaagatttgttggtttggaagatgaagattttggtgaggagattaatagtagaatgaatgtcaccaacatttctagtggaggtagtaaccgaggaggaagtggtggtaggatgttttcttcaaaaaaaccaagacaaataggtcctatggataatttttttactcctaatgtagagatggttgttcaaaatcgaaggagtgggaagatgaatcaaactacaatcaatgatgcctacaaaaaggaagcaagagaaagagcttgtatgcttatcacaaggtggatctatgaggctgctattccatttaatgcagtcacatatccgagtttccaaccaatgattgaggctattggccaatatggtgtgggtatgaagggaccaactcttcatgaggtaagagttaccaaccttaagaaagaattgactctcacaaaagatttgatgaaagatcatatggtggaatggaaaaaaaatggatgttcaattatgtcggatggatggaccgataagaaagagagaactttggtgaactttttggttaattgttcaaagggaaccatgttcatgcaatctattgatgcttcttcaatgattaagacgggagaaaagatgtttgagttacttgacaaatgggtagagcaagttagtgaggagaatgtaattcaagttaaaacagataatcactcaagttatgtgatggcaggtaataaatactatttcttgaatttttatttacttttaaaatttgaattatttattttgagaacttatgtaaatttattatctacaatgtcacatagggaggttgttagaattaaagcgcccgcatttatattagacaccatgtgctgcacattaccttgacttgatgttggaagatattagaaagctaccaaacatcaagaggacattggagagggttatatcactaaatgggtatatttataatcgctcaggactactcaacatgatgaggcggtttactggacaaagggaattgcttaggcctactaagactcggtttacaactgctttcatcacattatcgcgattgcttgaacaaaaaaacaacttaaggaagatgtttacaagtttagattggttagatagtaaatgggcaaaagagcagaaggggaaaactatagccaacatagttctaatgcctttattttgaaacactattgtgttttgcttaaaggttttgggtcccctagttcgtgtgcttcgtttggttgatggtgaaaaaaaagctcctataggatacatctatgaggctatgaatagagctaatgatataattgtgagaagttttaatggaaatgaagagaagtacaaagaaatcttcaaaatcattgataagaggtgggagattcagcttcatcgacctttgcatgcaacaaagtactttttgaatccggaattcttctatgataaaccagaaatagagcatgatgcagagattatgagtgatttgtataaatgcatcttaaggccaacaagagaccctgttaagcaagaaaaagttgtggccaaagtgagtttgtacacaaatgcccaaggactattcgggaatgagttagctattaggacaaggaagactagagcaccaggttagttatttagttttgtttatttaaatgattagattctatttttgctaaaataggtgaatcgtttcactaaattgttaatatctatactacaactgagtggtgggctacatatggagcttcagctccaaatttgcaaaggtttgcaatgaaagtcctcaacttaacatgaagtgcatcgggttgtgaacggaattggagcatctttgaaaatgtaagtgaccaaaataattacaagtaatagtctaatagagtcttgaatgtaacttaaaagttaaaactttaaaatatatttatgaacttatgaatttttgcagattcatagcaagaggagaaataggttagaccatcaatgcttgaatgatttggtatacattaagtataatcgagccttaaagagaagatacaatgaacgtaacaccattgacccaatttccttgaaagatatagatgataataatgaatggttgatttgaagaatggaagatgaggattctcatggaggtgcacaagatgattttgtatttgatgatgataatttgacatggggtgatgttgctagagccactggagctgaggaggtcaggtttgatactagagctagagcaaacttaagcataataccaccaatgagggggatagcttcaagttctagaactttgccttctcattcaccaatagatgaagatgaagattgagacatggctgattcagcagctgaagaagatggggaaggctacaaatgtgatgatggaaatgatgatgatgatgattttgttgatttagttgagtgatgattgctttttgtggacaaatttgttatttaagtgttttttaatgatgtctttgaattgtggacaaatttcatgttttggtttggaaactttggatttggatatgtattagactattagcaatatggattttgatttgtttttatgcttggagttctttatttttatggtttttgttgattaaattgaagttttggatgatatttgatgatttatgtgtttaggacaaataaatgattgttaaatttgattatattatataaaaatatatatgtaaattagggtgcgcctcacttcactaaagtccatgccttaggtgcgccttgcgcctcagctctaggactactttgtgccttggtgcgccttgagccttttaaaactatgagaaggttttctaaagtgatgatttccaaggggtacaaacgaagttagggtgatcataccttgttcgcgaaacacttgggttcaaggggagtgacaactcttttagtctatgttgatgaaattacggtgactggtgatgatgttagagaaataaaagaattaaagaagtgtctagcccaagaatttgaaataaaagatcttagtagattgaaatatttccttggaattgaagtgacacactctaaacatggaatatttgtctcttaacaaaagtatatcattgaattattacaagagacaggtaaacttgggtacaaaccttctaacacactagttgatcctaatcaaaagcttggataggcaaatgactttacattcgtggacagaggttcctatcaaagattggtgagtaagttgatctatctttcacacaccagactggatatcgcatttatagttagtatggtgtgccagttcatgaacaatcctaaggaagtacgccttcaagcagtgcataggattctccgatatcgaaagtccatgtcgggaagaggaaatatgtttaacaaaggtatgggtcttactttagaggcatatacagatgttgattatgcagggttagtagtggatagaagagcaacatctggttattgtactttgtggaaatctagtaacttggaggagtaagaagcaaagcgttgttgctaaatcaagtgcagaagttgaattcagagtaatgacacttggaatttgtaaacttttatggctgaaagtaattttagaagccttaaaggtcaaatgggaaactcctatgagactctattttcacgaaatcatctcttcattatcagcccaatattcaatcctttagtactttagagtacaatctataatggagttgacacaaccaataggtaaccacaactaaaatcaattcacaaaatattcaaatacgataataacaataatcctttcacgttttcatcatgtaagtcaccttaggtgttctaagttaacaagatattttaagacaatccataagtaggaatgtctaacgtaaatcacaactcatttaacatccaaatcatgtatttgtaatttcaacaaatatccaccccgacttgaaatttcaacacattaatttcaactaacatatctatctattggtagcataattggaaagcatacaaaaattgataaaaggaatgccatttattctatatattaacaactttagctcacttcatgaaacctagcttctttttaaaaaaattgtgaagcttgagtctaagatagaaccttccctgtctagcatcaaagaaagcaaccaaaccgtttcagcaatgagcagaattttgcaactctttcttcctcattttctctctagataccgagttgctgctgaggttttcaaacttagtgatgaaggctacttaaaggctaagaaagtggctgttgttttaagccataaattgattcattagcagttgatgatgcagctgcatgcttggtggcattcagtggactatttcaaccacatatactagagtcggcatattactaacctaagatacatgatgaggttgaggcctatgtgaggacttgtttctgtatgccaacaagataaggtggagcagcaagtgcttagaggcttgttagagccactacccatagttgagcgaccaagggagagtgtcaccatggacttcttcattgggttgcctaagtcagaaggccatggttcgatcattgtggtggtagataggttctctaagtatgctaagtccatagcaacccttatagattgtatcgcagaggagacaatgaggctattcctaaaacatgttgtcaagtattgggggttgcccaagcatatcattagtgatcgcgacctatgcttcactgagaagtcctggatggagatcttcaaactaatagggttgaatcttcacttctttactagctttcacccatggacggatgcacaaatggaaagggtgaatgctttattagagctatacttgaggtactttgtgagtgccaaccaacgggattgggcaaagttgtttgatgtggcctagttctcctacaacttacaaaggagtgaggcaacaaacaagaacctatttgagttagccacatggtagcagttattgactcctcatacattggtgatgggctacacaaggagaagttcgacgactctcaagtttgctaagtgatggcaagaacaggctgacatagctcgctcatgcttggataaggctgctaagaaaatgaagaagtgggttgacaagaagaggcgacgcataaagtattaggtgggaaacttagtacttgtcaaattactacctcagtagtttaaatccaaaaggtcagtgcacaaaggccttgttaggagatatgaaggcccctttcttatactgggacaagtcgacaaggtgtcctgtagggttgagttgccttaaatattgaagatccatcctgtcttccatgcgaactacttgaagccctatcatgaaagcaagcatgatctaagccgagggctatcaaagagagcgcctacaaccatcgtgaccttatacgacaaaggtggagcatatcatcgtagatcaagtcatcaggagacaagggatgcctcttgcaatggagtaattagtcaaatggaagggactactagagagcgagtttaattgggagcctgtggacgcattgtgacagttccaagagtagatcgagcggttctaagtagaaggaatgttggaggaaacttcaaaataatattaaagaaagcaataatacacatattaaagtttttttattgaaaaaaaaaaacttgtaataaatttgtaacatatggtaataacatgcaaaatttgaaaacacattaatactaaaataatgatgtatttagtttgaaaatattcaaggatctaaaagaaatgatgatatatttatgagtatttttttttaatttaaaaatgttgataattttctttgcaagtttatatttatctcgtatttaattattgtacaagagacatagtaaggtaattaaaattaatttattcataataatttatatatattatattatattatattgtttgtgcatatataacacaaaaacaagcttcgcttagtggctagggtcttctgtgtcatgctttagaacttgggtttaacccttggttgtgttttagttgttttatcaagttgagaaaaaggcatcatccgagattagaaacttacaagaagaaaatgatgtatttaataacttgtgccccattcaactatcaaaagcaaaatttgggttgggcttgggtcggctgtatatcaggcccattagcttcatgcattaaatttttaatggaaaagcaatgcgtttgatgtgaccttttaaaaatcgttgagtgcatgacaaattggtaaaataatcagtaattcattgataaattgacaaaatattggtgatttgtggaaacattgaacaaccaagatatttgcacaacttattgggttggaggcgtttgataggtgatatttctgaaaaaaatgtgacatttttgtaattgggtaaaattatgtgcattcctttcctgtttaggggatttgtttgcggttatttagcctcttatggattttttagatctacgaagtttaagggaaacacaataggtggtttttttccacgttaaatctagtgtccatttatgcaattgattttacttgtgctagggattgataaaacttttaattgcaatcattataacttttgagatagttaaaatctaagtaaaaatttaaaaatttgtggatatctcacttggactacctattcatccctagataggtctcttaattaagataaacacttttggaaaagaaagctgatacttagcctatgctaagccaaccaattactggagtctaggaaggataatttaagctctaatagctctataacatttgtatttgggtatgcatcttttcaagttggtttttaaacatatgaggggcttgatctagtgttagtttttgacatgcatagaggattggatgtaaattatattaaaagtgaagacaaatgggtttgttattgaattctcttaaatatttcatttatttggctatgcaaagcaatttaataagttagtagaccataaatactcaacatttgattatttacactttaaattatctccaagcaacgccaatcatgttttcttctttggcaggccttttgtg

SEQ ID NO: 12815 - DNA, 2146 bp, Vitis vinifera
  Intron number 5 from transcript GSVIVT01009455001 (locus G SVIVG01009455001) derived from phytozome v7.0 (chr-ID chr1 8; pos 8520715 to 8522860)
cacagaggaaagaagagaggagagccaggttgcaggtagtatatcagggaaattatttcaacgtatttttttaaacaacaaagattttactgaaaagtgtttaagcaagggtcataccctatgtaaacaagaggtatacgatgggtgtcaaaggcaccaataatcacttaaaccccacctgaacagttaactaaatccataaaagtatcaaagctacaaattgacatcaaacttgactacaaaagcaagttacatgcaaacaggttttttaatatcacttctgagctctccacaccttcaaagcatcttttatcatgttattatttctaaatagaccaaaacaatgtggagcaccctccaaaactgctcctccattttcccaaaaaacttccatgccaacctgaaaacttcttgacagaatgaggtaagagatgcacaacataccaaaaatagaaaataccaagggccctaaactgcatgtaatgagaacatggttgcctgattctttgtcctaattgcagaatgatgatcttctttggagaaaagtgatcttgtaaaaggaaaaaaaaccataaaaaagggactttgtgactgtctttggaattgatttatagctcctgcaactgcacaaaatgcagattcagtttgaataactgatatttttccttgttgaataaatagttcttgtacttttgagtgcctgctgtgtgtttattgagggattgatgtaggacaaccctaggatggttgcctacactcaagggtaggtgggctagggttttattttaaggtgtaaggagaggaacaaggaataaattttatggaagagaaaattataagataagaagtagagagaaagaagaaacaatgaagaaaggatggaaaaccttagagtctccctaaggccttctaggagtctcacctagaagaaaatcaatggagtctcaccattgagggttgcaaccttgcaataaaagaaagtataatattattcatcaaattcgatcatttgatttacattgattagcctatttataggcttctctaagaaattcaaagtctactaggactctaataacctatcatgactcaaattctaattatattataactcaactagctaatcctaattagactccaacaaataccaatcccaattaaattctaattaatattaatcctacttaaagtttacttaggtcttcactttcttccttgaataaactttaagaggctttcccccatcagggatgttcaatctaaattgacctaaaataatgttgggagggaagatttaatccacgtgctgtatattttatgattgtactggtctttgaacataatttattattaatgcttcaacacccacccacaccaccccccaagaacaaatagtatttacttaaacaaaaggatcatttcatgttgctcacaatttcatcatgtagaaccatgtatttgaaaactacactcagtgttggtgtaaatgttaagagtgaaagacggatttctgcatttatatgcaaacctgtcattttacttggaaaaatgtatacatgaacatgcttaaaatgatataaattttttttttcttttaaatacaatgacaatatcaagttcgaaaagagaatggatagtttcattcttcaacttgacgcccaatatttggagttaagtgtccctaaattataattttctctccttctaaggaaatggatggagttggaaagtcatggttgaatttgaagcacataaacatggtttcaactgggatttatcaaaaaggtctagaactcttagtgctgatcttaagattttctttgctattaggtttcaaattgcgattgcaaagaatatgatatcttggtatattgaaggttttcttttcaatatggtctcttgctatgttaggcggaaaggctaagatggagtgaatgtacgcattacttacccttgttgttctcatagaatttgcattttccgttgttttttctctacatttttttcgtgcctctttcttttgtgtttattgtgtgggcaccatatagtttcatagaataacgtaactagtggttttttttctagctttgtttgccttgcctttctctctttacttgtgttgattttgcaggcacagttctctcaa

SEQ ID NO: 12816 - DNA, 9452 bp, Vitis vinifera
  Intron number 9 from transcript GSVIVT01037485001 (locus G SVIVG01037485001) derived from phytozome v7.0 (chr-ID chr6 ; pos 12886966 to 12896417)
gcactcatagtgtgagaagtcccattgttatctaccaactttcctcaacatgaggagttaactatttggcctctcagggattttgcatgttttccttgtattttgatttaaacagatgattaacttattcgtggatgaagtcattttatactttgtgtctatctaatttttatgattaatgcaaccaattttgtgcccaacagatttactctagaagatcctaaaaatttaaatgagctactaaaataattcatgaaaatatcatatgaaaatattgattatttgattttatggaaaggtggaaattaaaaacaaagaaaaatcatgactaacaagtaataaataaaaaaaaaaattgaatagaacttaaaaaaatgataaaaataggtaataatacatatattaaattaggttttgaaagaaaacaaaatataaatatatgatatagtaatatttaataataaaagaatataaatggattgtatcatttctttgcactacttattatgaataatttttttcagcatttacctttatgctatatttaaaattgtatgatatttatgggaaatgataattaaatatccatgaaataatattcatatccctttgtgccctaaattattgatatttgaatagaaatataaaaattattaggtgttataaaataaatgtaaaaattaaaagagaagaagaaagaaataagagagaataacttaattgctaggtctttctttattaattcataaacccttatttatcgttaagggataataccaagatggtaagagtacaaatatggcaatggtattgtcatccacaaactaccataaatatttataacactccctcttggatgacaaccacttttagaatatgtatcattaaatccttaccaggaaaaaccatatgggaaaaaccctagtgaagaaaaaagagtattaatattcttttgggttactacgactaatttattaaaaacctagcttactagtaaacccaataggacaaatcctagatgaagggaaaaagagtacaacgtagtgataaaatttgcttcccctcatgttgacatgattatatgttctctagttgctcagcatagagatatttgagttgatgcatcctaatgcgcttcttgaggaccgtagttgataatgcctttgtgaataggtctactaaattgtcacttgatcttactcgttgaataataatttcaccactcttttggagttgatgaatgtaaaagaacttgtgcgatacatgcttaattctatcactcttaattcatcattctttaatctatgcgatgtgtgcaacattatcttcataaagtattgtcaaattgtctttaatggaagatagtttgcatgactctcaaatataatggattatagatctcaatcacacatattcccaacttactttttgcttcatgaattaaagaagtaattaccattgtctgctttaatagaatcattaggaaggtggcaaattagtatacaggctagtagcaaatacttactcttttcctttggactccaatgtcttctagttgatgtagaactatatctttctagtaaattcatagaagaagatatatctaattttgtacaatttaccagatatgtcaatgccctcaattacactaaaataaggtacttttggagcaaacagttcttcattatcctctttaggatgaaaaaagtccttgttcacttcaagtgaatgagtaaccatgggggacttagtggatatgatttatctatatgaaattacttcgagactttccttgtatatgttgactaattaattaacactttatttggaaagtactcattctacaaactgagacaaaattttgtttttctaagatctttcatttcaaatttatttttcaaatagtcaactattcttatgagctcttcaggagttccaacaaaattaaaatattccacatatattataacaattgtaaatctaattgttgatttcttaatgaatatgcaaaggcacatatcattccctaactaaatattcagtaaggtgattgtgccacatgcctttggattacttaatccataaaaggatcttagtcacttaattgagcatatgttgtaatattttgaattacttgcttcaagcatttgaaatccttcaaggattttcatatgtatgtcgttatctaaagatcgataaatatacagtaacaacatccatgagacgcatatccagaccttttgagactactaaataaattaaatatctaaatgtggttatgtccatcataggagaatatgcttcctcatagtcaacgataggtctctgcaaaaaaccttgagctatgagttatgctttatatctcgtgatttcatttttctcattgcactttctcacaaatacccatttatatctgatgagcttaacaacttcaagcatttagactataggtctaaatacttcttgtttttttaacgtgtttaattatgcctggatacatttcatctattttgaccaatctttaatttctatgttggcattcttctacactttgtggttcatggtcattatcatttcttatgatatcaatgatcaattagaaagagaataaaggtatttcaattccatttttttcttgaatgtaaataactaattgagatctcatcatatttaggtacatctaattgtataatatgtgcctcttttggggctaattgtttaacatatgtctcttcaagggctatttgttttatttgagcctcttcataggctatttgttttatttgtacctttttaggggttacttagaattgataagtcattttgtagccttttcgagagtaccaagttttcaagtgttttctttgtgttttcctcttatggagaattgagtcttttgagccgacaggtctacaatgctttaggtgtgccttagagtactcattatttaattttcttttagggacatcaatccatgctggaatatttatagttaatataaatgactttgttgctttctttccattagtgaaagcatatgatagttgacttgcaagtccttgtgaatgaataatcttttgaacttctagttcacactaattagtatgaggatcaagacaagtcaaagtcaatgcattataaataatttcatgtcgttcttttggaattggcttttctccccctaacagagagaaaattgtctcatgaaaatgaaaatctgcataacatgtcattctacttttcaagtgtagaatgaactagtcattagataaaaaaaaattggttttataatgtaactccataagactttacaatgaatttaggcatcattgtttaccttgagggaccaagttggtcttgcaagattcttcagggtcatgcatagtacaaagtgtcatttgcatggactcaaataatactagtgacatagtatgagctattttggagtctttaataaggtttttattacctaatataacattaacatctttattatcaatgttgtagaattaataagataagagtttcatcaaaataacaattcatagaatatgtcacaacgaccttgcccttataaggttgaagaaatcttattataaagaaataattgaagtcaacaaaaaaatactagtcattgatgatgacccaacttaacaagtgtaaaggcaatgagaacatatataacacaaaaaaaaaaaggaaaagataatttaaatttatatatttcttaaatatctcacacattttatttcgtacgcgtgaaataatttatgcatgaaataactaaaaagattgcaataatcaaactaattgtaatgatagatcaataattttttccaaatattattataatctaaatcgatgtgcaaaaattaattcatagatcaaaatttcaagagaacatatcatgatgtaaagcatcttgcaatttttctatgtctcaaaactttaattgaaacaccataaatctatctaaatatatatgtaaagatataacaaaatatatttaaaacaatagttaaacctattataatcttaaaattattcttagataataaaattattgcattaataaaatattatatatgcatgacgataacaataatatatattactttatataactcaaaattttccaatcacaaaaaaaagaagaagcacaccttaaagaaaatcaacatatgaaatcaaattattaatcatatgaccaactaatatatttcacatagacccaaaaaattatctaataaaaaatttaaaaaatttctttggaaaattgaatcataaatcaaatatatgcatcatacatatttgtacaagtttccatatatttcaaatgtatcaaaacaaaattttcattttgcatcaagcatgatactaaaatatgtgtgaaagaataaaaaagctttctttacattcatgtcataatatcaaaataatattattgtattaataacaaatctccaaaaattataaaatatgttaacatagatattcatgtacaaaatcttatgaaatgttatatattttttctaagatataccaaaaagtaattacaatattcaaaatgaaatctttccatatttgaataagtgtcttccatattcaaataagaaaagacaaatatggtaatatttatctaaaaggagactagattttaaaatatctccatatgaatataatatttatgtccctattttttttttaataaacaagatatcttaaaaataatatcacatcataataaatgatgtgttaaaaaaactaattttctcatgtaggttcctatattttcaatacataattttagtattaaattctcaatgtgtaagtccaaaccttttttggcataagataaattcttatacatgcttctagaacatttaaaaattgaaattgtgtacaaccaaattagaatatactatctagaatttttaaaatataagtatatatgctatccaaaaatctcaactttctatatgaataacaaacatattttactctagatattagaaaataaagattaaaattaatctcaattattatatcatatagaaagattattgtgcaataaacaaagagaatataaaatattctaaaatatcacctctaacacaagaatattaagtataaataccatgccttcatacaacctaaaatttcacttctaaatgcagatatttctaccaatgactctatattggagttcataaaaaattatcaaacacttacccatttgtatagcttgatgtacaaaatatccacatgcttgttatcataactttagttcataaaagttttttacctaattacaagaaaatgtaaaaataatagttgcatagctttaggcgataaaatatttttcttataatttttggttatgtgaatttcttaaagttgtataaaatagttagttaataatttttttctctatagcttttggttataagaagatacatattaacaactttgacatatcatttgactagtacaaaaaatattaattttctcattttcacaacttcaagttataattgatagtaattatatagcttttggctatatataatataagtttataaccaaatattttttcatatgccttttagctatacgagttttatcatttattaatttataaagattttgttcatagcttcaagccatgaatagtcaaaatttgaataatgttataataacataaagtaattgacaattatattgtaatataacttctagttatacaatagaattaaaaattgtttatgtagtttctgattatatagttgttaattgataattttttttatgacttttgattatacaagagaattagaaaattgaaactatagattctggctatagagctgttaataaacaattttgttttgtataactactagttatataaaagaattaaaattatgaacatagtttgtagctatgaagtaattgttaatagagattgtcttcataacttttggttatgaaaaaaatttctatatagcttttggctattataagattaaaatatcaacgactacaagcttctagcttgggtatataagacatgacttacataacttttgactatgagataaagtaaataaaaattataataaaaaatagaatataatgatataccactttcatatatattttgaaacaagagtacttaaagaaaatgaggtgctatacctataaaaactcttataaatgaattcttttctttctttacctaaatcgttgtgctgataatgtgtaagaaaataaatgtgaaaattaaaaaagaagaagaaagaaataaaagagaatagccgaattgttagatctctttttattaattcataaacctttatttatagtgctattacctatcaagattaccttttaaatccttgagttacaaatctcacttattatgtgatcaattgacatagtttaactccaaggagcatatgtcaaattccactaaaggaattactatgaccacaaatttcatgatcacatgtcctttggattacctaaggggacacactgtcctaatcccaagaaatatcatggtgcctctattgtgtgaaaattaaaaaagaagaagaaagaaataaaagagaatagctgaattgttagatttctttttattaattcataaaaatttatttatagtgctattacctattaagattacctctcaaatccttgagttatagatctcacttattatgtgatcaattgacatagtttaacttcaaggagcatatgtcaaattccactaaaggaattactatggtcacaaatttcatgatcacatgtcctttggattacctaaggggacacactgtcctaatcccaggagatatcatcgtgcctttattgagaacacctattgccactaacttccatcaatagtaatctaatccatagggatatatggccacatcaaggtctcacccataggtcaaagtttcttgttgattttgacacaagctcaatatcctttcaagattgagagtctatgcagcatagtagcttggtgaatcatgacaattaatagccttgcgttatgattcaccataggtcctatccattgtgcatcacatacactagtgcactcaccatgggaaacccatctcgacgactaagacaagtcatccctccaattaggaggtggtgcactgcagtctctattagattacccaaatccatgaagcaactgtggacaacttatctacttataaggaacccacaacttatatcttttgtacaactcctaatgcacgtaactcatgtataatgtaagagaaatgagttgaatgctcaaatcaatatcaatatactaaagagataacaagaggatagttaagtctaactttgttacatcatgtcttgcttttttaggattaattattttcacttatgttttgagggttgttttaaaaaataattgttcaaaattgtagaatgattaaaaataaaacactagatataaatattattttggagacatattaaaaacatgttacaaatatttcaagtttccaaataaacttttgttctacaaagcatcaaagtttttaaaacttgttataaaaaactatattttagaattgtttttgaaacagttatcaaacagggccttaatcttcatctctctagaaataagtctattattcagcattcccaagttctaaggaagaactagctctacccttctctgttgccaagatctgaggagttaggagataaaagatctttagacctttaagatcgttatttatcaattagaaaaatcatttaggaatatctaaatttgaggtgtggattctaattttagtcaccctagaatgaagtttaaaaggcttattagtttgaattatttgattaaaaggtaattatggaaatttaacccttcatccctttttgcttcatttgaacaaaaatgttatcactattttcttgtaaaaataaccttttcctttaaaacccatgtataaatacttgaaatggtaaaagacatttatattaaaaatgggttattttttgagtaaaaatataaaaaatgttaaattcacaaatttgaatattatttgatcccttttaaccaattaattctattagtttctactacatttatggtctacaagttcatgcgccccattagagaccagggttaggatttttgtttttttgttttttatcctagaaatcccacaaaacgtgggcccgagagtggaaacatgggtaataggtgttctcaggtactacatcaccattagcctccattgagcaatgacaagtttcaagtgatcaatccatccctataatttggcaacttgtaaaactaagagagtgagaattttgatattttctttggaaagtttgttttattttttaatatatttctattttcttgtgatttttagttgagaatacaagtcttctttggaaattcttcttgaaaatagttttgtaattgaaaaaatatgtttggcaaatttttgatggaaaacaattttttgagaattttttttataaacaattttttttgtattgtagataagtgctactaataagccaaaaaaaccgttattcatgtttgtgttcgtaatagaattatgctctaaaaattattaataattatttaaagaactaataattgcttttaaaaactattcttgaaaactattttctaagagccattcttaaaaactcttttttaggagtcatggttgtaaatgttatcaaatagaaccttaaatttttgagatggtggactaaaatatcaatcttttgcatatttgtttagtttccaggagcaataacctttttattttttattttttttttaatttcaaagttttagtttgaaattgacatagtctgactttctattttttctttttttcctttacttatttatcagcatccaagaaaaggcattatgaaaaacagaattgagcaaatggttatagtaaatgtttcaaactatttataagcatccaaaaaaggcattgcgacaaataaatccatcttcatctctaaccttcatctcttcgctcatatatatctataccatacagaaaaggtttctttatgggatcatgattacaaggggagattcgtgaacaggagaaatatggctctacaaataggaaacaactgatgaggagtagaaaccagggttttaatacatagcatctttacatatattgtagcttgtcctaaaaaagacatagaagtcagacttatgtacaatctgataacccagacccaggattagacaacagaagttggcatcttaagcacatactaatatcaatatatatggtaagaagttttgcaccacccagcagatcactaattcttgggatcctgggaacttccccaactatcaaccgggacatctacatcaatcagaacatcttctccagagaaggaaatatccagatcat

SEQ ID NO: 12817 - DNA, 2794 bp, Vitis vinifera
  Intron number 8 from transcript GSVIVT01025275001 (locus G SVIVG01025275001) derived from phytozome v7.0 (chr-ID chr6 ; pos 2536659 to 2539452 reverse strand)
ttgatcttgtttgttcaggattaaaaaaaatagaggtattgtaaattccatacttcctgtttcattatgggaatctggtcatatcaggatttcaatatcaggctatcattgaatttttatttttatcagaaacaagaaatgtattcattacttataaagagttaatgagagggctgaggaatccttctcataaaaatacaaacctgatccagacactaaaaaacttcattatacaaggagatttgtacaaaaagatatatcacaaaagaatgtacaagggaaacctctcctgaaaagaatggctaggctcctctcattggtggcccaaccctacaattttaattaatttggaaggtgttccttaggtggatggaaaagtcattcactcattggtagtatttggttttagagttgctcaagtgactctccctccccctcctttcctcacacttcttattttttattagggaatacaaattggatcatgcctaaagtaatttctttttctaacttaatatccattggggtcatgataccatgacatagttgactcttttgaggggtgtgcagagctcattttttattttattttttatttttattttttattttatagaaagtggggatttaattttaattttaattttaattttataagttttctacctcttaataatatttgatgggaagtgataaaatttagaacctttttcaaagtaagttttgctctgtttggatcaacttgtaagaagtcaaaaactctttttttaagatcaacaagagcttttatagttgtttgattacttttattctatgagcttgtagcttaaaaaagaacttagtatggaagctagaaaaatgttgcttcttgtagaagctctattttggcttatgcaagaagtaatttcatgtttaatataacttttacaataccactattgccctttaaaaattgtgacactgactttcgcttcaacttccaacaaaaattttaaaaaaagaagctatcctaaatgagaactttgaagtttatcaaaatgtgtgagagggagggatcctataagattgttatcatcaactcgcttgctaataaaatgaaaaagcattttgagtaaaacttgcaactacctatccttttctaataaaattataatctgttaaattattttcacatgaatggattttgatatgctttttgtgttgatttgcggaagtcattttcattcaacattttttcttatatgcactttgtttttcttttgacaacaaacttggtctaaagtagcatttttttagggttttcttgattcttttgttttaaatagaggaatttttatttattttctatattttaaaatgattcaaatattgtctctcgccccccagtattataattatatcatttttttcaatgtttttagaatgagattggttattaaattagaaaagtcatcgcttcaaggttcaatgattgaattgatggttaaactgtggtcaaaccggtgatatcataaatatgtaatttatattttactaaaataaaataattataaaaatttaaaaatatataaagaaattaaaaaccaataatatttgttttttcatctttgatattatcaaatcaaatcatgaataaatataaatacattaatattttaaattttataaaataaaataaaataaatatttaaatgtgaaaatatatattacaaaatggaaggattattctattatttaattttataatccttccattatttaattttatttgcattaaaaattacatatcatattattttataattttaaaaacattacattattttacttataatattttcatatttattaatataaatttttttgaaaaaaaccatgttattttatatattgttttgaaatttttaacgaaagaacataagcaatcttgtggttacatgatcattccttgaccttggagtccaaggctgaagcccccatttggcatactatgttggacctttctctaaattatccatcctacattggaagcatatggaaatgaagaggggtttaaaatgcacattcaaccattgtgagttgtggtgcatgatatcaagcggcccaatgatatgggctcaatgttttgcccccttgcccccacccccacccaaaaaaaagaaagtaaaaaaaaaaaatcagaaccagcagactagttcaatgtccttcagctcaaaagccgaatcagacaaggtctggtggatggttcgattggttgaactggtcagtctatctagttttaaaaacattgcatttttttatatttcgtttttcattcttgattcagttctacaattcagggttgaaggtcatctgtatggttgagtgaagtgatttatttattttgtttttttagaatccaatttagaagtattaataacatatgccaagtttgctttagatttgattttctaactgatcttaaccactcatggtaaatgctcctatgccattcccatttcttgttatgatggtccacttgcacatactgaaagcaattatcttctagtttgatttacaatctttgattatgatatatatgtgaatttgtctttaattatgtcaaaatgtgatgattgtgggcattcattggtttatttatttttttggtctttgtgctttgtgtaatctataatttgttctttcatttcaatcatccataagcatgcccatattttcccctattcatctggattatatacttaggttcttgataaattttttcatgctaatatataggatcctgagaatcttg

SEQ ID NO: 12818 - DNA, 4540 bp, Vitis vinifera
  Intron number 2 from transcript GSVIVT01026355001 (locus G SVIVG01026355001) derived from phytozome v7.0 (chr-ID chr4 ; pos 14745735 to 14750274)
ctccactgaaagaggtgcaacccagagtccaattggtatgtatttcgaattggcttaatatgaaataactttggttcaaatagaaacttatactctccaggattttggagagcaaagcataattttcatcaatcttgcttgctaggaagagtatcattaattctgtatattgaaagtttgtgttttatttttgttaattttccatggtactgttgatatatctgtgattaagtaactgtttcctaaataatacaaacatctacatcatgcaaggtatctagcttcttgttatgctcttgcaaattcgtgatgcttttgttgaaatctattacttaaaactaggatctatggaatgctttgtgctgcaaattatgttctcacttcttcaattaattagagaataattataacctatttatacacgagttagctagactaaaggcaaagatacaaagaaaattaaggtagtataattacaagatattctgaagtaagaaaatattatacaaatcaggaagaattggaaagaaatagttttttgggcgttctgattgtatacttcgtgtgtactattttcgctgcttcttggcgctcctaatacatgctctatttacctataaaaaaaaaaataaaaatggaaagaaataggaaataattgaccaagatcttggtaagggaaaaaattaagacaactagagattctctcaataatttggtggctagctggaagactatttcaggatcttcaacactatccctcaagctggctcatagatactgttctttcttagcttgcttattatttcttggaatttatgttttggtagtccctttgtaagagcatcaactagttgcttatcagaggagatatatatcaggcaaacaaggccattctcaagtttctctttgatggaatgtctatctatctccacattcttggttttgtcatattgaactggttgtgggctatgttaatagctgctttattatgacaatagactaccataggatggttgttagctatcttcaactcttgcattaaggatttgggccatattagttcacatattcccagagctagagaattaaattttgcttcagtacttgaccttgccacaattgattgtttcttagttctccattttaccaagttgtctccaaggaatgtacagtggccaaatctaaacctatgatctctaattgaacttgcccaacttgcaacagtgtagacctcaatttctagcatgtcaatttttgagaatagaagtccctttcttggagtttctttctgatatttccaaattctaaatactgcattcatatgatttttatttgggctatgcataaactgactgacaactcctattgcaaaggctatattgagccttgtatgagacaaatagattagtttgccaaccattttttgatagttctccttatttgcaaccttgcactcaatattcactcccaatttatgatttgtatcgatgggagtgtcactcagtttacatcccaacattcttgtctcctttagtaaatctaatgtatattttctttgcgatagaaaaattccctgtcttgatctgacaacttctatattgagaaagaatctcaagtttcccaattttattttatttattttattttttattttttgtatctcaaattcacaagcaagggactctttcaacttatttgtctcagccacatcacttctagttactataatgtcatcaacatagacaatgagaatagtaattttacctcccttcggtttacttatagaacattgtgtgattgatttgactttgcaaatatcccattcttcgaatagatctagtaaaattttcaaatcaagctcttggtgattgcttcaagccataaagagacttctttaatttacaaaccttcctttttcccactttttctttgagtcctagggtaactccatgtagtctttttccaagtccccatgaagaaaaacattttttaaatccaactgatatagtggtcattactaatagcagctaaacatttttgactttgctggaaacttctttctagaacctgccaagcttcccacaagaaaatgaataccaataggaatctccaatgctgaaggccttacaaagtgctttgtttggctttttgtgtcatgtcccgagtttgataggacagtttatgcactctttgtctcactgttttggttcttcaatatggtcagggatctgctgagttgcctcatgtaaattcaatagtatgatgggaattccttttcaaggcttggatgatagtcgaggggaataatcctttaatcttgtattttctagccatcatttcactgatttgattggaaaaagaactgaggatcttccttgatatgaagatgtctgtggaagccttgggatcaatgttttgtagcccctgacaggtgttggttaaaaaagaattttctggggcttccttagagaaatatcatgctttgttagtatatattatgcaatgtgtccttatgggcaatggatgtccttgttgtacatatggtggtggggggtcgtccaatgtcaaggtttgcaaactaaagaaggcaatttatgacttaaaatagtttccgagggcctgatttgataagctttttatggtatggaacaaacattttattaccatgaaatattaaatgtaaagaaggataagaaattcttcccctagattcaaccactacataactcagatcaaaagtgagaagtatcaatggaagtcaaaagtgaatataactatgaactcaagagttaggaggttagaaaatcccctacaaaagagataaacttattggcttcccattttgcttacctatccaccatatggttagctattgaggaattcaacaaaaggagcacctcaactctaaagcaagataaaaaaatttggggcagccactcttcaaacctctacaagcttttctccttccaatttatccgagataggactattggagactccctcatctaaaagggtgaacagactgttagctttcgctaactttaggtcttccaacaaagttaatacctttgccttgatggctaagcccaccctagagtttctggagaacgctgtcactaatgtttcatggtgatctatgttcattcctctagttcctaactgtattggtttatccaaagaaacgttaaaatttaacttgatgatgcccactggaggaggcatctatgcagggagtatttcctaaacaaaccaacctgatctacataccatgttagcctagtttgataagttgagcaatatcttttggatttcaaagcattcaggtcacttagtttttcttttgaggagagaaaatactattatagttcttgtcatggatgtggatgacactatggtttctggaagaacactgcaagtactgagcaggtaaagaaatatcaaaagggaaagttttgaaccaaagatctttgggttttgctttattttctagggattgaagttactcatggaaaagatggtataattttctcttaagggaagtctatacatgatttactcattgaaactggtaaattaggctctagacttgtaaaaactcctatggaattgattgttaaacgtggaggtgaaagccatcttgattttcttgataaaaagtgttaaagaaatcatattggaaaactaatctatttgacaattaaaaggcttgatatcacattctccatcagtgctataagccaatttatggaagcttctaatcaaattcatttggagattttgtgcagaatcttgaggtatttaaaaggtacaataggtttagatgttatatatataaaacacctaaccctaacttagacttaattagttttcaggtgttgataggcagattctgttgttgatataaaaccactactggatctctacttttgttagtggaaacttggacatatggaggagtaagaaataaaatgtagtggtgaggtctggtgttgaagcagagtacagagcaatgactcatatagcctctgaactcatgtggcttaagaagcttctgcaggagcttggtttctcacgtgataaatccatgacaatgtactgtgataatcaagctgagtaatctagttttgcatgagagaaccaagcacattgatatagattgtcattgtattagggaaattgttaagagttagaaacctcatgtcaagtcaaaagatcaagttggagatatattcactgaagccttgggaaaatgtgccttctttaatgtgtgttctgagctatgtcttagaaatattttagccccagcttgagggggggtgtgaaatataataccaagggtatttatgcctgaggggtaacttgtaatttatatattctatctttttaatatataagagagactcatctagcaatggatagtgacctcatgtttgtttacgcttatttttttcttctattattcagttattctctttttcaacaagtataatatattgcattgtagtacaaagatgattctttcctttcacagagtacactg

SEQ ID NO: 12819 - DNA, 34112 bp, Vitis vinifera
  Intron number 1 from transcript GSVIVT01000669001 (locus G SVIVG01000669001) derived from phytozome v7.0 (chr-ID chr1 3; pos 20613862 to 20647973 reverse strand)
tttgattggaacgacgaggaggtacgctggtttggaattttgataatttgttggagaatttgttgagttcgtgagttgcttcatattgctttggggaaaaattttgtgtgtttgattaggagtagctgagctctcctctgaattgcattcaaaacgcgctgctttgcttgcttctttgttttttccaaatgatagtttctgaagaataattagagtttttcatggtttaggatttttggacattcaaatgcattgaacagaacaagttgttagagtaaattctgaaaaatttaaattttagtgtttgcgttggaaatacgaaatgagtgatttttaaggagtgttgaaaattgggtgggatgtgtggttggtgtttaattagagacttgaagcattgacttgcttggacattttttagttaagaaacaagaaagaagaaaaaatgggaatagatcacttaattgaattataaaaatacactcttttgatgttatactaggggaggacttgactgtaaaccatagagtagtggcattagatgtttacatttggagatggagaggaaaaaaaaaaaaaaaagagagagaaatttggagtgaaagagaacccaaaaggagaaaaattaatgttgtttggaaataaatgatgatatcaggaaaaagcttatggatgaataagcttatgttgtgcagaataagatgattgattttcaagaaagctagggcctgtaagcacatgttggtggataaagaggttgagatgagaggaattgaaaattgagcattatgaaaagcttgttaaaaagtagttaggaggacatatttggaagagataaattacctaaagggttgaaagaaaacctttagtaaggctcagtttaagctatgatggcctttattgcaattatctacaagagatggagaacgatgcctgcatgcaagtttttcctccataaagtgtcaatattcctctgtctacttaattgactctgcctaatccatcaacatgcctcaaaaacctgagaaagtcttttcctactaataaataaataaataaatagatacgaatctgacaaagttttcatctcaaaaacattcccacaaggaatctgtatctctaaagctaactaggaatttacaggctttgagtaagcctttattatactacctttgtgccttctaagtacatcccagtgtttatctggtctgaatgctccaaagagtagctgtcaggattaagttttgaactctttaaggaatggtgattccaaaatccaaactactgaagcctcagcctaggccttagtcttgctgctctgcttacttttgtctcaaacaaagctaaaaggagcaccactaaactctgaggaaactgcccccaaacaagaggtaaaatagtttacatttcccacaggaactctgaggcctactcttgttattggaagtccaggcattttctctaaccaaacatgtagtagcaaacatggctttctggaaaatcactctacctctttggctgtctgccgaacctctaaaagtaatgaatgtcaaatctgcaaccgctctgggagagcctgagaaatccttcctactgaaagagtctattccataaccccaaagcaatggggtagtggagtaaagataatatccaccaactcacttcagtgaaagtcaaaaaataaaaaatataaataagaataatgttcaagacagaaagctttaaggtcttatgatctgtaacaagtgttagtatttaccctttttcaagccactaaccatacaaaagctttaacttttggcgaaggtttaactccccaaataaaattagcttgaggaaaggtggtaagggatcacacttagaaagggcacaaaaatagaacttaagaggagaggaggcctaagggaacctaggtctacatcctctcattgaagtctcaattatcaagttataaattaatgatttattttttttttttttgataggtaaaaagcaaaatgtattaaaaggtgcttggaaaaggcgccctaagtacacacagagcatagaaaatgcgctgaaagacaagcaaagggaaaataaataaataaacactgtgcaaaaaaaaaaaaaaaaaacacatgcgtccggcatgcacctaaaccagaactgctaatgactaattaaacagagcctagacctgacccaaccttcaagtcacttttcccaaccctagcttgaaccctcagaaaccactttccacccacttttctggctccttctctcttgtctgcttgattgaaagtaattaaccgagctctccaacttccaaagctccctatcaaaagagatgtagacaaagatctccttttaaaatctgaggcccccctgtgcgaccctttctagcttctaacttcctcaataggaaggcaacttccttcttaaaaccatccacaggcaatctcaaaaacttactgaaggaaacaaaattaatgaatattgacagttcagattatatggaataattgtctagaaacatttctttgtatgttttaaacatctagactgttattgtatatgatctgagctgtcgatacacaaggttatgacctggtaattgggaccattctcaacaaaagtttctaggaaaaatgaaaaacgtgataaatatattatttattatttttggacataaactttagaaaaggtttgtaattctagaaattttttatcagacttgagtgatggttaatcaaacattttctgggaatttatttctttacctaatttgcctttctagaaaatggattcagaatgctttgtaactgtgtaattagcttaattacaaacaaattacctcataaaaatctttgtcaaaattgtattacctaccccaggattattttatcaggtattatgtgttataggattttaaacaactgcaccaatatggattaatggataaatcaccaaaaatttaattttttgcaatagttttctgtgaagtgaattatcagtgaaagcttactgaaaaaagttctggatttttctccagcacaaggatagcattatggaaattaacattcaatcataattatcattgtgatgatcaatgctaacttcggtaatagtgagcacttaaaaaatttgggagatgttgtaagtatgtcccacaatttcaaaacatgtcagagaattaggtcagtattttaatgagagacgatagaaagttggattgcaagatgtaattttgatattagtttatgaaatgtctaccatgattgaaaaagtttctgctttcaggttaactgaaacaataggtaaattaaaaatacagtacataccaaaacatactcctgatataaaattatgccattcagtatctgaaaaatagagaaatcccaacttatttgggttgaatatgtccaaatcagataaaatttcatgataaaattcatgtttatcctatttcaacgtatcaaaataaatacaaatatctagaacaatctatagacttccagactttgctacatccttgactttgtattttcacgaaatgaatttggagaataaaagggggtaagctgtgaagacctaaagggaaaatatttccattcacacatcaattttgatgcatgtattacaatgtcaatgtccaataacatgatgaatgcatgataattttttttttcttttttaaaataatgaaacattttagtcatggtgttcaataatagcaaaatgcttaaagcaccattcaataaaatccaagatacaagaaccaacaaaacctagagcaaagaatgtgtgtacttttacatggcttaattattccaccagcttggttatgccctcaaaagctaaatccacatcatgtagtcttccttgagggttttggggcctttaacccaagggtgtctagcctaccttgctcatttgggattcttacctgagaatctccaccttccattactagatccttgcaagctagggtctctaaagagataatccatggatatgaatccaaatattctttaactcaaatgtggtatgcacaaaattcataaccatggcattgcaccaaactcacaatatcatggaggtaggagatttaacatttattatccggtaaggaacaccaatgcaacatgattttgattaaattaataaaatatggatccaagaaatcaataatcaataataggattgtgaactgttttcaaagacttagatctaggcacaacaaatcatttagattttttcaacttaaagtgatttaggaaagataagaaggaacaacaaaataattgttgatgagtgggcagaaaaccttcctaaaccaaagaagaggaaaaacctgcctctttttctttatcagaaaccatcattgtagttatattgaataaacagaagatgtaagaaaggagaaattcccttcatctatggatatgcatatgactaaacaataagagctccccacaaaaacaataatcccccttgttttcataaaaactacctttctgtgttccttgttccaccgcggtcctggattcttcaagtttactctcctccttgctttgaaagaagactcttaacagaaatcaagatttttccagattaaaattaagtggagggaagctgcgtcttatttctcccttatctttttgaaaaaattctctaattattaagttgtttaatgattcaaatgttatgctacttatcagcattgcaaatcagctatttggccaacatattagggcccttttaggagtccaaccaagtccatacaatcaataattggctctttagtccatatgaaattttagccattaaacctattgaattcaaaagaattattttaagtaaatttttaataaaaatgaattgtttagttctgataaaaataactaaataactaaataaataaaataggttttaagctcttatccccatgacctacataaaagctcttataatgctccatgcacatttatgtaggtcatggcacagggctaagttcttttattggaagagttttcattttatatttttatgatattcttatttggaactcatcatttgagaaaaaagttaaaagctatcttggcattggtataccatagggttgagaagtgctatgttgacacgaaaaagtacaccttcaccttcaggagttctggtgttatatattgggctttgttatgtcttctgaaggtgtaaaagcagctgaaacaaatctaaacttctgattgatttgcctattctttcatgtatatacatacatacatacatacgtataaacacacacatgtgtgtgtacatgtgtgtatgtatatacgtatgtaggcatatatacgtacatacatataacatgaaacaaggaatctattgatacggaagcaagaagtgcaagagttcatgacttgttatttgtaaagaattcatctctaccaataagattatcagccttttcaagtcttccagaagtgctatttgttcaaccttagtgacctaaaccccctccaactggcttcataagagcctggaccaaggctttcctatgtttgtaaaagaaactgcagtgctgaatccacttaagttgctaagagggacatccatcaaaactaagtctgttactgccaaaaggaggagaacactaacaactagtactctttctctccatggaataggagtatcctgccttccaatgcctctaaatcaagaaatttagcaagtctgtgacctcttctaccataaaaccacacagataaaattctgttggtccatagaatgggagtatcttagtctatatcttgggaataaagttccgttgatcctcaaatattagtgtattcctctctaaaaggatttcctataaagtgtctgaccaagctcaatgtcatagaactttactcctcagtttactgccaaacctggaaaggaggtagttaagaactctaggtgtctttctgttaatagtcttcttatttgcctacgaaaaaaaaggaccctgggtctctgttgggaccatccacctaatgcctgcaggctgcaagggagaagatgctgcaaaggcctataagtgaaaggacactggaggaacaaatggttagttttctcatcagactctctgcataaaacatgtttatctaagcaaggtgtttaaaaaatctcctgatttaaagttcattagtatttcatatcaatttgactgagaaaaaactagtttgatgctttgacattcagagaaaatttaaaaagggattcagaggaaaaagtgcctaatctcttcaaaagaccaacatctcttagagcacaagtatgaggaagttaaatccccttgttcatgatcattaagattcctataaggtcaaattccatatggtgaattgtctgtgagagaggaaaaaagagatgtggggcagagctgggggaatgaggagcacaaaggttgacctccccatcaaaggtgttctcttagtctgactctgtatccatctccaacaatatgattggcatgccaagaaaagtccaggaagccttaagagaatgactttccatggttagttatgtgatactttgaccactaggttggcagccttacccatttgaatgctaaagatagtaatatttttttgataggaaaccacacatgaatatattgatagaagaaaatagtacataaggaggatgagaaatcctcctgccaaaagtaaaactaaacaacactaaaaaataacatgacactataccgtcccattggaactacacactgctagccaatctagttgtaaaacattaaggggaatgcccttaaaacccgctgagcaaaaagcccaaaacgaagcgaggaaatgaatggagtcccaaagattctctgaattcctagctttgtcctcaaatattctagcatttctttcccgccacacaacccaaattaaagctatgcacacgttttgccacaaaaccaaccctttcttggacttgccaaaacctttataattgatgaacatcatgtctgaaatgcttttcggaggaacctaatccatcttggctagctgaaatagtctgtgccacaaccccaacgtcacagaacaatgaaggaagagatgatctgctgattctccttgctccatacacaacttacaaatgtcagggctaagagctttgtggggtctcctcaattgtagcaagtcattggtatttaccttcttgtgtgctacaagccagataaaggccttaactttgaaggggacttgagatttccatacaaacttagtgaggaaaaaaggagatgaatcaggcatttgggacaaggctgtaaagaaagacttgactgtaaacagtcctgaaaacaataaggaccaagatctcgcatctgaagcagaggtggataaattcatacaatcgagagagcgcatgaggcgttctagatcttctatctcataatcggttagattatgacggaaattaaagttccatgagaaagggcgagccgaaccgagaataaaagatataagaatatttttatccgttactactctaaatagtcttggatattggtctttgaagatttggtccccccaccacaaatcttcccaaaagcgaattctttccccatctcctacgacaaaccgagtatacttggaaaaatcctgaaagacttgtgcaatggccttccaaggacaacgatgtgaccacctgactaaagtgttggcatcccaaccatttgagtgtgtctcgtagatgctaagaatgacttgatgccacagagctgtactctccctaggatacctccacaaccatttccctaaaagagcgcgattccttaaaggaatattcccaatccccaaacccctttttacccttggcttacacactgcatcccaactaacaagatgatgtcttttaccttccccaagccctgaccaaagaaagtccctttgcatcctctcaacttttgcagccattaaagcaggaatcttaaacagagaaagaaagtagctagggatatgggataggcatgagtgtaggagagttatcctaccgcctaaagataagtaagccttttgccacccgtctaatctcctagagattctcccaatcactggatcccagaatccacaagcagttggattccctcccaaaggaagacccagataaagtatagtccaatctaaagccttgcagtcaagcaacaaggctaacctaaagagatgattctgatcaaggttgatgccaaaaagattactcttgtcaagattgaccttaagcccagaaacttgaccaaacactaacaataaactcttaagagtttgcaattcttcctcactagagctagcaaagaggatggtatcgtctgcgaattgcagatgggacaccctacacctatttctacctaccctgaagccctccagcaaacttctttcctcagctttcaacaacattctactcaacacatctgcaacaatagtgaacaggaaaggggataaagggtcaccttgccttaaacctctagatgccttgacccaccctttagcattaccattcactagaatagcataagagaccgctaaagatagtaatatgccttggggattctccacagccatttgctaataaggcccccacagcacccaacaactttccatctcaatagatggtctctactctctctatcccttctagtatccaaaaattatgcagtttcaatgggcagaccacattctatcagttgtttatttgaaatctcagcacctctatgaaatctagcaattatatcagatctagggtgatggtctctatgccctttattcctttgagcatccaaaaagtatgaagtttccttggacagactacattctatcagcagtttttttgaaatctcagcatcactatggaaccaatagcaagtgcatcaaatctgagatgactaaagcttctgttctatgcttattggacttcaggaaagtttttggtggcatgcactgcattacacatgagcattctagctgttcctaacctaaaacaaaattcagtggctcactttaatgggaactcaatgacaccaaaaaggagataggccacattccatcagcggcttattagaaatctcaggactactatgataatgatttcttgtgtatcatatctaagatgatcaaatctcctgttctacacttgctggacttctagaaagtgttgggtggcaatcaatgcatcacaaacgaacattggagctattattaagctgaaaactcaatgatacaacaaagagacgctccatatatagtgctaagttctatgcagctgtgaagggctcaaaaaattttaccttgtccacagaaattttatatatattctcctcaagaatctttgtattcaactcccgagcactttatatcatacaaagcatggagcttgtgttgtctatctgttgttctaaattacgagttattttggaacatgctgtgggctatgttgggtatgtgaatgaatattcatatgctcatctccaaactgatgtttattggaagttgttaaccgtagtcatgacactctcttccatgtgccttctgagtgactcaccagcaacttgggccaacatcttggcattgttttaataaccatactcctggtggttctccttttgaaattgcatgtggattgaagctcatgatgctttgctaatcttgtgttttactctttcttggttagtgatagctgtgattattttgccttgcatgtacaaagtgtacatgagtgtgaacgctttttaccagtagatcattttgatacttaatgagaaagattatgccatgtgttcaattcaccaggtcctttaaaattgggtggagttaatgagattaatccttaatgtataaatatatggaaggtggcgcctactagtgaggggtgtatttattaatttatatttttatatcttgtcatggttcaaagtatcaattgattctaagaggacttggcctagtcatatttgaaataattgtacttgatgcaagtttaaaaattgatttgaatttttctacaaattgatcaagacaaccaatcaaggttgagtcacactgagagttgcaacaccaaaacaaaactgagaaaatataaggatttctgtagttcttagagatttgctgtagtaattaaaaaaaaaaaggggggaagtgtgattggattatgatggatagtaaagaaagaaaatatttgaggggaaactcatttttcctgactttttaaaaaccatacttgctactcgagttccacctacaacacttccatgattaaaacatgagatttggtgtttgatgttgctaccaaaagcttgaagcaggagtaaaaaagtctccctgtagcacatctcttctcaaatcttctcttctcaaacaagtgaaatgaaaaaaaaaaaaaaaaagggaatgaatgttttaatagttggataggtagtggcgagtcggtacggatctgggtctaagtattaggtattggacataggagatatttaatagaaaaagaataatggatatgagttagtgataatgagtacttatgatatattaatataaaatgggtagtatatgtgtttaatgtttgatacaaaatggataataaatatgcataattgttattaagctcaattggctttccgtttgtaatttaaaagggttggacaacaatgagtggagctttgttcagaattgatgtatatccttaagtagactaaactttttgtatagatctccttgtatggtggagtttattcatactttgatcaacttcttgtattttatggggaggacccctcatccttcttgtgttctttttatctataattaatacatcttcatttgtttataaaaaaataaaataagtttggataatgttttaatacaaaattagtaattgactcatgtttgggtccattacatctatttaataaataattgtaggttattgttttctaattttcttatttcttaatatttaaattgtattaaacttaattgagttgattttagcatgaacttctactttgatgtttttagcataaatttatgttagaaagaggacccctcatccttctcgtgttctttttatttataattaatacgtctttgttttttataaaaaaataaaaataaatttggataatgttttaatacaaaatgggtaattggcccatgtttgggttgattatatttatttaaataattataggttattgttttctaattttcttattcctaaatatttaaattgtattaaacttaattgagttgtttttaacatgaacttttactttgttgtttttagcataaatttatgttagaaattctacaattatttaaaaattaaaaccaaagtcataattagttttaaaagattatgattggttaatgttaaaaatggtttggtaacttaggtatttttgtatttggaggattcttgatatctctcctaatacatgagattcttaatattttctaattatctaggattcatggtacttctaatattccatatttcctttatatatatagttgtaaatcaaacacttataaagggaagaaaagttgaattttgtttgtttcacaagataagaatatcactagaacttattgcggaaagctgttagagatacatgttcacaagataaggatattcctactacttaaaatttgtatacaaagaattttaaaaacaaacattatggaagatctctacatgagtatttcattttgcttagatagatgtaggagaggttgaatataaatcaacatcccttgaagactcaaagaaggggattacaatttcaagtttttccattggttggctagtggaaggaggaataggaagttcatctagttcttggtgaatgtggaagggacaactttagatgatattgaaagtatctttgaggagatcttgagtttttttaaaaagttaaattccaatctcactgatgatttttaaaggttagaaggactggattgatctccaatttcatgagagagtgttaatcgattgaatgggtttgtggttgattttttttttttacctaaaatgcttgattagttgatggaaatgatttgtaatttaaggcagatgcaaaatgaattattgaaatattgcacaaaaaatggattaaacaaaaacatacttattagttatatatttacttagtaatgacattaacattgatactactagttgcaactactattatagatagaataattatttatttatttattaatattgtgataaacttgagtgcaattgaatggatgaacaattacttgacattgttcattgataaagacttgtaataacattgataataaggcggccattgtgcaacacttgaaaatattgaaactcataaagaatgggtataaatgtgtttgatacaagtaatatttaagtctttttatttggtattgcttaaaatttttcttccatcagcaaaagttttgttttctttaccttgagatgatgtagacattttatcatcttcaagtttacaagattttctagtttatcctaaaaaggcaacaaattgtaggaagatgcttgaacatgagtacgtttgtgattttttacatagttcaaatttaaagtgtgagcaagtcaggacttaaatactaggatatggtcctttcatagcacttcaacatgcttattgttaccttaaagaggaagagagtcgtcctaaggtttttttttttcactaaaaaggcctaatagatcttttcattaattaaaaagatcaagaaagaggagacatccttccataatgtacgaacttagatcaagacaagggaatggatacctttacatggatccattctcttgaacaaacaagaaaaattataaaaaatgaaacaacattcaaaacaaacattagatagacttaaggaggagcatgatctctaacaaaagataccaattgctttgctcctttttcaactagcccatctaccacctaattagctaagcaaggaacccatcaaatggagcatcctaaccttgtaaagatgttgaatatttggcacaaccacccatcaagtctccataaacctccttctcttttagccacctatgatataacagtagcaaaatcctcctccaccacaaaactagacaaacccaaagctttgcttatataaggctctagaagttctataaccttgatgttaatagcaaaactatcaccttcaggtttagagtatgctttgattactgaaccttgatgatccctaagtagatcaccaatcccacattgtcctaaggtgcctaaagaacatccatcaaagttaaatttaactactccttcaattgatgccaaccaaacttgtgaggttttttttaccaacctccttaacttgcatataaaccacaaatctaagaatataaggctcaagtggtgtctctgaagaccctactagtataggcaaaaacaaaggaagaagagtaaaataagtcccaaactacatccgttgtccttctagtatcttataaaatcctcacattcctttccccttaaatttgccaaatcatactaaggcttgcaatgccctatacaatcttttcttttgcatgattcccaaaacctttgaaggaaaatggtcatcatctccactatcgaatatagcggtatctaatctattcctacaagattgaatagtctgtgctttccttgcacataataaaccactctacatttagagtcctaagaggcctttatttatggagcatgtcattagtattaatcctcttactatccacaagctaatgtaaaagcctttactttagagggggttatagatttccaaatgaatatagctagattgaaaggaataaaagagtatgaatgtgaaagggctttgaagaaaaactaacttagaacaatcttgatgagatcaaaagaccaaaccctcacattagggtagggaagtgatagatacacgtgctttagaagacattaaacaagctaattcctcaaattcatgattcctgagagttcggcgaaagttaaaattttaagatgaggggaatgaaggtacaaaaattgtggaaatagagaagtctctttacctcaccattgtaaaaaagattcaggtattgactacagaatggtgaatgttagcatttcattgtagcacacctatggatcacttagatctataatttgtgtccattaaaggtaatcaaaatggggatattggatattgaggtgtcaaggaatatgtgcttactcgtgataatcaaaataaacttgtgttatgaacattggctcgacctaagcatacaaggataaatgttcgaatttatatctagagtttcaacctctacatgcaactcaaccttccaaaggtacttttcctttgagaaccaattgctaatggtgttttttcttccctatcatttgatcatagatctaaaaggttagtcaatctaccttagagattgtgttatctataaaagagtatgagcgactccatagctatcgtgcacaactagaataaaccacttctacatcttcctttgcacatttaggtattaaacgtgtactcttagttcttttgtattttttcaacctattggatcattaagtgaagagccacttatcaatgataagtatgctcttattttcttagtgttttatttggtttgtttagggtgaacttggagtttgaaatggttcattattttcgatttttgattggcctcttacctacttgggtcttcctttgagggggtaatcctggagtggcttctttttgggatctagagttagataggattttgtgtcagttagatggatggaagaaagcttttatatctttaggaggtggaaaaacccttgtgcaatcatgtttatcatttattcccacttttttcctttcgatttttaaggtcccaattacatataagattgataaattgtaaagagattttctttggttgggtcttggggaaaagaaaagagatcacctagttggttgggatgatgtgtgcaaaccaaaaaatgatggaggatttttgttatggagaatctccttgaggaataaagcccttttaggtaagtgattgtggaggtttcctaaagagagtaatactttttggtgtaaggtcattttaactatttatgagttgcactctaatgttggggtgatgaagtttgagacgattcgctaatacgatatgtacccaacatgctttttacgggtttgagttgagtataaatggatttgggtcaaattcatgtcaacctacataacccttttaataagtaagtgatttttgggtcaacctgcataataggaatttgaccgaattgacccatctaataatcttgctattaacttaattatatttttaaactatttaacctatatttgactcattttaaatttgtttttaaataaatagatcgattaagtcataaatatgtttggttgaaacattagtcatatagacatatataagacctaaatcaacttgattattaaataggaggacctgattattaaatgggttgaatgggctacacaacgtgttgcctatttaataattaggtaatatttgggtttatgttttgacattattattatttgtgttgggtttgggctgagcaatgtaatagaatacctaggctttgacatgacacaaacatgacccatcaacatgaattgccacccctactccaatggttgggatgctaacactattgttaggtggttgcatccctacccttggaaaactatttttcaagtttttaatgatttttctatatttacttagtacttgttgggagatggtactaaaatttgtttttgggaggatatcagttgggcgaatgacctttcaagcttcaatttccaaatcttttctgagttgtaaggtgtggaaatgtgcatgtatcatcatctgtagatcgatcatctacccgtccatcttggaattttaattttcatcaaaacttttctgattcaaagattgaggacctaaatagcttcttctctttttgctacatgtgtacctatcacctttctttttagatgaaagggtttggtctttgactccctcataacttttctttatgagctttttctataaaaatctctcaatctatctagtttatcttatcttgactcctcttgctcttactaagttaatctataattcaaaagttccactaaaggttagagctttgcttgacttgtggctaataagaaggttaataccaacaacttgctttaattgaggagaccctaaaagctatcaacctgaaccaatgtgttatgtgctcaaagagtagtgaattgtctgattatctttttctacattgtcccattgcactagaactttggcataaattgttctacatagtcaatcttgagtgtattcctcctagaggcataacaaagatgttgggaatctcctttaagggcattggcggtctactcaaaggaaagactctttgataggaggtggtcttatgtttgatatagttcatatggttgacaaataatgcaaggatatttgaggatagatagagatttatggatgccatttgggatcatatttttctctccctcttggtcctttgttaccgagcctgttgtggatattcctctgaatattttaatgctagattggaagaggacatgctacttgaataattcaaagaagaaagttatgactcccttcagtaggttcaattaagttaaactttaatgaatgttctttaggtaattttggacagacaggtattggaggagtgattagagattcttcaagtacaatgttgagagcttactttaagcatgtaggagtagggttggccattgaggcataaatggcattagtggagggtttactgtagactaaagctttatgttgatctaagctaattatagagggagatttttttgttgtaatatcttaggtgtctaataaggagagaagctcatggaagttttacaactggatgtacaaaatcatagaggttgctagtgtaaaaatgttgtttctttagggtcttaagagttttgttacctaattaaaggaaggtaatatgtaaaagcatggtagctcttgtatggtaattaggagttgttaagggacaatttttttttatttttttttattttttttagtgtagacaattcttgtctaaggttgcatttgataatatgaataaccttccacattcaactcatgatcctattgtaatgaagattgagatttcaagtgcaagttcaacattaaatcaacctaagcgtacaaggataaatgttaggatttacatatagagttttgacctctatgtgtccctaagccttctaaggacactcatccgttgagatcataacaccataacatgagaagatgctaaaaaactaattgaattttcttatgtgtttgaaggatgagacataccttttacaaatgggcccattgctttcatatatggagaaagattaagatagggttcctaacttgatatgatcatgtagtgattgtcgtggcctttgcaaactatgaaacaaacatttacaaggagtgagctaagaagaaagtgagtgagccccatcgagcggtgtagttgtgagtgctaggtggtttggagaatacttaaaggatgagaccttagaatgagaattcgatcacacccaagtgagtgagctttaaatcctaatagcggagaatgcaatgttgtgaagaagaatcgtatcaaacttagaacatacgaggaagtgttgaccatcattggcataaaaataacaggcatgacattgaatcaacctaagtaaacaagggtaaatgttaagatttacacctagagtttcgacctctatgtgttgctaagccttttaggggtgctcatcctttgagaacctattgttgttgttttttttttttttttttgataaccaaggaaccttccttgggcaaacccttaggactcattctttcctattacttgattctagatcccaggttgatcaatctaccttaaagattattcacaaagtgaagggtcatttaagttacaattgataactttttatgcatatttattttgtaatacattgttgttgtgtttaatgtgcatttttaggttcttaatgcatagtgtttcaatattgtaatatgaaattgggcatgaaacaaaaaagataaaacactacaaaaacataaaccataaaatggaggttgcttatcttatatttttttccttcaatacaagcagatttataagctaagttttgtaaccacaaccctttattttaggaaagaaattatctaaattaaataaagagaatcgaggatattcaaaccatatcacaactagcaattagaaataaaaccaggtgacaaaatatcctatatttagaaaacaaaccaaatcttggattttatccttatcctttgaataaggaggatatgcgattctctacactcccccctaagttatactaaacacattgaatagacctagcttgtcaaccaacttctcaaatactagcttgaatgatcccttagtcataaaatccccagtttgttgtgataaaggcatataaacaacacaaatgctcccttcttcgatcttttccttgataaagtggaggtccacctctacatgttttgtttaattatgatgaattgggttatgagagatggcaataacaaccttattgtcacagtaaactttcatatgctcatttgtcataaatttcaattcatcaaacaatatcttcaaccaaagtacctcacaaatcccatgtgctaaagctctaaattttgcctcaacactatttttagccaccactatttatttcttactcctccaagtcactaaattccacacacaaaggtgcaatatccgattgttcacatcttgtctttcattgatcctacctaatctgcatctataaaagcctcaacactcctctcttcacttttcttgaagaatagaccttgtcctggagtccttttgaggtgtctcaaaatctaagacatggcttccatgtgttcttcacaaggagaatgcatatactggttcatgaaacttactacaatggcaatatctagtatgggaaagatagataaggtttcctactaaatgttggtatcgacctttatcaactagtgcacttttagactattcccttagcttcaaattaggatttatgggggcgtatctgtaggcttagaccctaacatgcttgtctccttcaagagatctaagacatacgtcctttgagaaattgaaataccgtttctatttcttgctacttgcacactaagaaaatatcttaataagcctagatctttaatttcaaattctaccgcaagaatatttttgagtctttccatctcaacaatgtcatcactagtcaagattatatcatgaactagattatgagtcttacccccttgctgacaaatagacttcatgaatctaccaagccaaactcgtggggactgttttagtccataaagagattttttgagcttgcaaacctttccatgaattctaacctcgtcgaatcccggtggcaatttatagacttcttcctctaactcaccattcaagactgaatttttgacatcaagttgttggagtttcccatcgaaatttgttgccaaggataggagtacttaaacaacatttagctttgccattggtgcaaacgtctcttgatagtcaactccatacgtttgagaaaaacctttcaccactagcctcgttttatagtgcttagtggattcatgacttatatttaacagtgaaaacccatttgcagccaacgggagatttttccctcaacatctccacaacatcccaaattctattcttctccagacataacatttcttctcttattgcatttctccattttgatattgataaagcttcctatatagtttttgaaacttctatttttgctagattagttacaagagcttgaatagatggtgacgagtgattgtagaccacaaacttggagcttggatgttaagtacaagatcgggttcctttcctgagagctataggaacattaagatcatcacctcgagaagtaactcgtgggttagaagtttgagtgcctgatattggtttaaaatcatggttttgtaagaggttcattaggtgctccactttttgggtattcttttgtcttgaataaacaagtagcttgggagattggagttgcaagtctcccgtcattgaacccttgttcatggtcatagtagtttcgacaaagggtgtttgtggttgttcaaacttaggtggtagtgtttgcggatgttcaggcttaggtggtagtgtttgtggttgtttaggctcgggtaaagcaactataggagcaatgataccccatatatttctgttctcactaacttctccccctaagggaaatttttggtgaaaaaaggtcgattttcaaagaatgtcacatccatagaagtgtaatatttgcatgtttctggtaacatttataacctttttgtgtgggaaagtatcctaagaaaatacattttcaagctttagggtcaagtttgctcctatcattatcgtggttgtgtacaaaggaagtacaaccaaagactcttaatggaagtggagagataaattagatgtgaggataggttttgaggaaacaagttaacaatgtttcacaattgaggatccaagttggcattttatttattagataacaggcagtaagaacaacatccctctaaaggtattttggtacattatttgtgaacataatggctctagctatttctagaagctgatgattctttctttcaccaataccattttgttgtggggttattatgcaagagctttgatgaataatgcatttctcatagagaaaacttttgagaatagatttgatttaaaatattattttctattgcttgttatgagaattttaatgtttgcattgtattaagtgttaatcatggaataaaaatttttgaatgcttgttttgcttctgagttttttttcaagagacatatctaacaaacccgagtgtgacaaacatgcttggctaattgacaaaattcacattgaaagaaatctccattatgaaatggtgatgtaaacaaagtttgtaaatatgaaaaacttgggtggcctagtctacgatgccataaaattatttcttgttctctagaaagagactcacaactcacaatttgagcttgtttattcaattcagcttccttctcaaaatagtattgcccctcatgttctttagcattgtcaatcgtcttccttgaagtcaggtcttgaaacacataagaacactcaaagaaatgagcaccacactttaaatctctagtcaacttactaatagagagaaggttgctagacatatttggaacatgcaaaacaaaaggtagttcaattttaggactaattctaattgttctagttcttgccactgatgaaagagattcatctgctattttaactttgaaatttcctgaataaggactgtatgaagcttatcatgtaatttgtgactctagagtctatcacccacggtttcggatcattgttgtaactactaaggactgagaaaaaattacctctctgtgctagtaatgaagtattggtgtcctgtgatggtttgagtagcttgtaaagctgctccatttgctctttagtaagcgagaattgtgtaccttctctagaaacattctgctttgaactaggactagattggttggagatctcggccgaaatttgaaaaccaaacggatcttgagtggtggaataatacaggtaagattccttaatatcttcttccattgagttaacaatccaaaccataaccatagagttttgtgcatcccatgtcccaaaagagggatctcttggatcgggttttttcattgaaccatctacatagccaaggtggccttgtcctcttatcaccattaaagcagaccaagaccattgaaggaagttttgattattcatttttgtggttgtgatttgaagggaagaattattcaaaccatattacaactagcaattagaaataaaattaggtaacaaaatctcctatatttagaaaataaaccaaatcttggattttatccttattcaaggaataaggaggattcgagattctctacattatatatatatatggtttttggatgcataaatgtgggctttttgtcagtagcaaaatcatacttgttttgcatgaaaacatagcttcattgattgagccaatgtgtttggtcaatcgaagtatgaaatttgcaaaaggtggcttttaaaagcttggttgatctagatataaccttggatttatcaaggtgagtgtttgttcaaatctaaagtttttttaagcttgaaaacattgaagttcaatcttagatcgatcaaagcttaggttcttttttgaaaaaattgatcaaattgttggatttatcaagccctacatttggatctattcaaccatgtgctttttcaatagtaaaattcttttcaggtcctttgtggcatggatctttttttctttttcttttttttttttttgtgaaaaattaaggtaggtcatatcttagtggtttttgagtataaaatgctattttcttgaagaaaagtttagagatttaatttagagcatagagtttcttgtattgtatttttgctcttattcatctttgtcaaaactagcacaacattctcattgtaaatgtattgaaatcttaatgaccccaattctctcaagttgcaactgtttatcatattgatgttgtgatctatgtggggagaccttgtcccttgaaggaattcaatgatgctgaagctacttgccttaaggaagttcaaggtttacctactaaagtgcagatagggaaagattcaggctttgtcaagggtgacaaagtggttgaggtctagtgcaagaaccatgaaaggatctaaggattggattggggagtagattgtttggtagatctttgtacttgatatatattttaatggatttgttcagcagctttaagcttgtgcttttttgtcttgtgaaggtttccatgtaaaatctagctttaaatagtttagttaattgtattgggatcaatatattacaccagactaataattaaaagttggtagctttaaaatttgggggcactacctatttaccaccctaggtagttacatttatcaagaactggttttttgggagtattttttgggctaaactgcaatggtgggatgttaatacttaggctatgtggtcatatcattatccttggaaggctgttgcactagtttttgctttttattttctttgtcccaatttttcttgctttatgcacttttttgttgttcatggcaccaagattcatttcaagaagatactagtggggagatcaacctttgctctttcaatttcctgatctttatctgatttccagatcaagaattttgactattccagttcttaggaattttaatttctattataacctattggaccattaaattgatgatctgtccttgttgctgctcttgttgttgcatgtttatctcttgcctttttttcctgaaaactgtgtatggtccttttcctcttctgggttattttcctttcatcccctttttctagctttgtctagtttattgactctagtctcatttcacctggcaccattcagagagctaaacctttgtctaaagctaaggccttcacatgattggtggcaagcaaaaaggtcaacaccaaggacatgttgtagcttagaaggccttacaggggattgaactatgagtggcgtatttgtccttcattgcatagtggcattaagattagggttcctcctacatctgcgattgatatgttgatgatttcactgcagggttttggaaggactagcaggagcaaaagttctttagagagtacctacatttacatcctggttttggtgatttggttagagataaatggcagaatgtttgacaataagtggagactagatgagtcattatggggcttcatttactttctttcttctctttgggtgttatttgagttttgggtaccttggttggtttgattatgtcagattggaggtccaagtgccattccagtagaaaaatagactcagtagctgtgtggatacctcattcaccaggtcatctcaagtttaacattgatggagtcatttgggactatagtaggaggctggttagtgcttttcccaaacctataggggtaggttggctattggggcagagttgttgacattatttacagtctcatcttagtttctttgataggttttaatgatgtcttagtagaagatgatttaatcttggttttcaactgggtttctccgaaaaatgaagtctttggaagtgggataactggatgcacaaatttttctctcttttccaagctgagttgttctttcagttgtatctgtcactgggccaaccaaacagtggatagactagctaagccaggtgtgtatcataagatatacttgagggaatttttacctccccaagctctgtattatagttttagcatcagtcttcagttggtttttcaggttgcagttgtcttgtttatgtttcaatggcatcttggggtttcagttgatactcttggtttttgtttctgaaggattgcttgttcttgttccttttgatcatgattatgtgaatttctgttttttctataaagaaaaggatgatagctcctaaaataaattggaacttaggaaaggaaccagaagattgcaattgggtgtttaaaatgaaaaacaactcatatgatgttagtaagacataaattcagattggtagctagagggtctatacaaacttttttttttttttttgataagtaaacaagatatgcattagaaaaggctaaacgccacaaagcatacagggagtatacaagatagctaaagcctcaaaaaagaaaaaggaccacaaagaagctacctccccttaagtggaagctatccactccaaaaaacctatgagggagaaatactcctcacctaaatacactttggcccagttccacaagttacagacaaaagaattctttaatttctgaatattcaactcaccccccctaaaggctaacctattcctctccttccaaaccgtccaaaaaatacataacggaatggatttccaaatctttttccttttcttccctacaaatgagcccctccaggatattaaagtctcctttacagtttctgggaggacccacttaacatctatcaacccaaaaataatatcccatagggctctagttactatacagtgtaaaagaatatgatttacattctcttcttcacaaccacacaaatagcagcaattagggagttgcacccctcttaactggagtctatccagagtaagcaccttcccccacgtagcctcccaagcaaaaaaaacagactttagttggcaccctatccacccatattctccttgcgggaaatactgtggcattaggcttgtctagcagcctgtaagcttctttgattttaaaattaccatttcttccctgcctccacacaactgaatcatcctccaaagagggcctttgacccctcaaagtatgaagcagctccccaaccatatccatctcccaatcattgaagtccctcacaaaaacaagcttccaatctccttggcccgaatcatgatcccacatctcctcaatcgtagcatccctattcacggcaaggacaaagagttgattttggaacccttcccaactataaatgccaaattttcccagcaccaatcagattccttcatgatctccttccaaacccctactccagccgccccacgggccttctttggcctccaaccataatcctcttgcccatattttgtagtgatcacttgtttccaaaagttattcttttcacaagcaaacctccaaatccacttgcctagcaaggctctatttagagtggctattctccttaatcctagccctcccttgtgtttttctgtacagaccgcatcccatttaactagatgaacttttccttccaagtttcctcccccccaaaggaaatctctttgggttttttccactcttttagcaacagacttgggcattcggaaaatggacatttggtaaattggcaagctagccaaggtgctttttatgagagtgattctcccccctttggatatgtactgtctcttccaaagcgcaagtctcctcctaatcctctcttccactccatcccacatagaagtagccctattggggacccctaaggggaggcccaaataatgagagggcaaagaccccaccctgcaccctaactcagctgccaactcaagagtatcctccacttctccaactggaatgatttcgcttttggctagattaatccgaagacccgaagccgcttcaaaccaaaagagaatccagcttaggtgagaaacttgctctttgctcgcctcacaaaacacaattgtgtcatcagcaaaaaataggtgggagatgttcaaggatgttctactaccgccccggatattgcaccctgaaagataacccccctccaccgctctcctgataaggatgtccagaacctccatgcccataacaaagaggtaaggggatagggggtccccttgacgaagccctctagtgctaggaaagaacccagctggcactccattaacaagaatagaaaatttagcagaggagacgcaactccacatccatcccatccacttggtcccaaagcccattttttgaaggaccttcattaagaaattccaattgatgctatcataagctttttctatatccaatttgcaaataagacccttttctttcctcttctgccacgagtctatcacctcattagcaattaaagacgcatccagaatttgtcttcccattacaaaggcattctgagcaatagacactaccttaccaatcacttttttaagcctattagctaagactttagccaaaagtttatagagcccccccaccaggctgataggtctaaagtctccaagattctccgccccgcttttcttaggaatcaacaccaagaaggtgttgttaaggctcttaacaaaggaattatgctcatgaaattctttaaacatctccatgatctcctctttggtgaaatcccatgcgttttgccaaaaggcaacagtaaaaccatccgggccaggggctttatccccattcatctccatcaacgccgagtgaatctcaatctctgcaaatgttaagaaacctttagtctagttgccaagatgacttatatatgtgctttgttatcattggctactggtctaggttggcttccttactagatggatgtaaaaatgctttcctacttggtaatcttacgaggaattgcatgatatactaccctggtctggtatcaattttgtactttcttttccttgttttatttttcttggtagaaaatctttccctttaaaaagtttctgaagggatttagaatattaggcatctctataggagagttgtaggattctattaatcagtcgataaataatgagaattctcttacatttttgtgcccttgttgtggtgaggcttcatctttagacaagacttggagaagaggatgagaaacctaattaattcctccatcaaaacctgatggacaccctttttcttcttttttattctattttttttgctacttgctcgtgtataatcagtctttctttaaccttagtcttgagcctctaaatcctaactttttatcaatagcttttcaagctatttgagcaaagatttctttatccctcatcacagactcaaatactctactgagatattctttatacctctctgtggtgccatgagaaggattaaagaaaacctatttaccatcaataacaatggtgctttgccctgtatatcattttctgagaactcattcctgcacatgtagctccatcccagtaaggaatttcgaagcttatttgtaggagaaatgttaaaaaaaagtgagcataacaatcaatgaatgagaaacaagcaaactaaattggtctgatcaaaaaaaaaaaaaaaaaaaaaaaaattgatctgcttctcctaggttgggggacagctagggtagggtaccatatagtgtgaccacactagctctactgtgggttatttgtttggtgatgaaatgccagtatctttgagaataggtaaaaggccttttaaagttagtatgggatgtgatacattctccttatctttctataccaatttcttcagagttgttgggctccccattgggtttatgttggattaggaggcaacatgtttaagagaattggagatctgtagcagtgcactctcattgagttcctcctgaagcttaactttgatggttattctcttgagaattagaacaattaggtatcagctgagtaataaggaaggattggttgaagctttcttcatgcctgctggaatctgaggtattagatggaagggttgacctaggcaaattcaataagcctcactaacatgttcatggagaatgggtcttcaacagttatctcctaggtaagagaaaaaaggcccttgagttgtgtcattggttttgccattgcacaggatttcagatctgtctacatatttggggggctcgtttttgtgggttacatgttttgccaatcaatcatcagattctttagctgcctgtggagctattagtttacaagcttttgcagtggatttcaagcctctctgagttgtatcattgctgaaagtattgggctatcgtaaagattcctttaggcagttctttcatgcattcttttattttggttcgaaagataactcatcattcttgtacttttctgctttgatgccatgaaagtattgtttctgatcaagaaagagaaacaaattctattgtttgtagataaccctgtctttattgatgaatgttgtgttataatttagtcatttctttgttgttgatacacatgaataagttttttcaatggagaaataatcatatttggagcattaagaaaagtagttaaccaagcaagttaaagttaaggtaggagaattcggaaatgccattttatggaggggtattggcaaaaatccaggacccaataaaaccctagatgtgcttgtgcaaataaattttattgtgaaagaacaattttttatttttttaatcagaaactaacattttcattcattaatcaattgatagatatgagaaggataaacaatctttcaaagatgtatacaagatgttagaaagtaaccaagaaatataaccacaaaaactagccacccctcccgcatatatactagagaaaaaacattggacactctcaagggggaaggagatctccaacaaaggaggccataggctttcctccttgtttggctaattgatctgcaacttggttagctaaatgagtaatctaagagaaataacaacctaactcatctacaatatctatgattttgcgcatccaattgttaaactttcatgaagaaccactttccttattattcaccaaagatattacaatagcaaagtctccctctataattagattggatagagataaagcttttgcctacatcaaaccctgtattcacaagacttaacaatgattgggaaatggaagaggtggaaacttttttcagtaggttacatggtcatgcgcttagaaggggtgatgaggatgtcatgttttggagggtttcaaagaaaggtttctttacagttaagtctttcttctcatccctagttctatgcatcggtagagagttcccttcaagcttagtttggaatccttgggttccaaagagagtcaacttttttgcttgggaggctatgtggggaagaattctaactatggatcaactaaaaaggaggggttgggtcttaccaagtaggtgctatttgtgtaaagtggatgaagaatcagcaaatcatgtgcttattcattgtcctaaggtagctatgatttgacaccttatttttgctctttttggtgtccattgggttttgcccaattctatcaaggaaaccattcttggttggaacggcacctttgttggaaagaaaagaaaaaaggcgtggaatgcaacccctttatatttattttggactttatggaaggaaagaaatagaagaatctttgaagatactgaattagcggatcaagctattttacggtcttttttgtatacgttttcagattgggttagggtgcatgtagattgtacttcatggtccattttcgatttcattgattggttgggttgtaagtaagggttttctttttcttttttttgcttttttcttctccctttggccttgttgccttgtatacttcgtgtatactttcaggtgtacttcaggctttcttaatacaattgcttttactcatcaaaaaaaaaaaaaaaaaaaaccctcctataatgctaatatctctaccttaatggctaacccaattttagcatgcttagagaaagctctcaatactataccaaaatgatttctaatcacaccaccaatacctatttgtccaaggcaacccatcggacatccgtcaaggtttaacttcatcaaacctactagagtgggtaaccagtcaatcattaccttttgattcaaactgtttgagtagcaaggactctttcaatctaaaattaaaagatacaatggaatatttgcaaaaggcttggtgattgaggcccatagggaagagaaaaagaaaatcaagtctcaaatagcatccacaaatctccatctttacaaccttcatcttgatctttgcaaaattaacttgaacatcaaactttctctttggacattctttagatcaatgcccaaattctgcacatctatagcactttgtaaaaaattttccttgagcattgttgtgtgtttgaattgtttttccacatgtgccatttgttcttgcagggattgttctctatcctccttgagtaatattatttgttttactagctattgcactagtacatttaggtctagatttctgggaagaacctcgattaaattgggcttcaactttgacagcaagttggtaagcatcattaaccttgtatggatactaaagtctcacttgatcctgaatggccaatttgaaatcattgatgtaacaactaacttgttgggttgtagtttcaaccatattgcttctcaatgtcaatttgatagaaatcttgcatatactacttcatagtcttgtaatgttgctacaaattttgccccctttgatacaatggttgctcatagtttcactgtaaaaagtccttgaggcctgactcaagtggtaaaaatggttggggagggcttttgggaggttccaagttcaagtcctaatgaggacacaaatttacctatttaaaaaaaaaaagtctcaaggaaaaaattgtgttctcaacttatccttcatcttgctccaatatctgtttttttccattacccctcatttttctatcattttgataatgtttccaccaagtcggagctggtcctttcaacttagctctaagaagcttaactttcctctcctttgttacttctttccagtcaaaatagctttcaatgttgtcaggctagtccacaaactcttctggttccatctccccatcaaattctgaaatttgaacttgtacaccatattcctttgaattttgtagagcttgtataatgcaatcttttgactaaacttctctaatttacaaaagttgactactcctatatgtacatataatatagctaggaaatctctagaatctcgacaatatttcagccgagatattcaactttccaacacatgtcatacaacactataatcatatctatttccattatagttcctcactcaactatgagtaatttttggtgctataacacctcattcaatatgttttagatgctttttataatcacaagctcattaataacgattgacttatcttcattatactgtcaatgatagcacttgaataataatgaaaaatcattagtttagtcattctcataattataaactgaacactagacatctatcaaaacataatcaaagtgctggaaagccaagtatgttttgaatccattattgccacttcaatcatgtccttttgggatttgttgtttgtcttttaaatcttcaatctcaccatagagtggaatctcataggtatttctactaatattctctatatatgactaaatttacttcttcttaccaacattttcgaaatagaattggattggttaattagatcggtcaaactatcaagtggttaaccttctggttcgatttggttattgggccagcaatggactaattgattgccagtcaaatcgatgaatcaacaggcccagtccgttttgaaagaatcaaacaaactcttaaattttctttttcactaggtgttggggggatttgacagtaggaccttttttttattgaaaaaagagggagaaccaaccaatgagctaagctattgttttgttatattgctaacttaagttaataaaatacaatgttagttacttgcttcagaatgacactacttataaaaatttagaataaaaggctatatatattaatttctaatataataattgatggaaataatataggtaaaatgtcataagaatttttaggataataaaataattgaatgtataactattaaaatgtggataaagttaaataataattttttttttcattcttggatatatgatatcttttctttacaattaaatgttatagttctattatttaagaaaattaaaatattaatatatttatattttatctttatcgtgatttaatctattaacgttaaagataaataaatctttagttataaatatatataaataacttcttgaaattattttttaataatactaatatataaattatatatttataatgtcaaattgatatcgctatttgattgtggttgagtcattgattcaaccaatcaaccatgattaggtaacttttctagttcaatgatccgtttggttttgaaaacaatgtttcttacttatatcttagttatttctgaatttatagaaactgcagctacatttattgaagacctctgatgatgcatctttgatataaaacgtgttttgattgcttagccattcgctttttcaaggttaaaaaggtccattttcagtttgggaagaagttaacgactttcctactccagtttagattttttcttttttaagctttttaatatgcaatacgaagaatgaattccgtattcctgagttatgatctatttggaaacactttatgacttttggcctttcctctcaaagtaagtaaagtagtaagactatggaattttaaataggatctatatactatggcaccaccttaactaaatattttgcaaataaaatttaaaatgtcaactgtgacccaaaatttatgcctgaactaaagtttctatattcttactcctgtcaatttattaagggcacatatgggatgttctttggcattaaattgtgccacatattaagtcattttgcatataaatgcatccagaatagggtcattacaaagaatagtcacataattagaaacattgaaatcagggatccacatttcccttacatcctatgccaccagttgcagtgatggttcccattttatttatacatcaactctacatgatatatttgaaagttgaaatgcatgtaagacacaatggagccatgaaaaatgggagtttctatcattccctacacttttgcaattggtttctttactctaatgctcctgtatagcatgttgttctgctctatctttttctatcatacacgctctcacacacatacacacgctcacgcacatcccaggaacataggactgagttgacagggttattattttgtggacttattcttgttaactggtcaaagattctctatttaattggtctcttttctttttatctcatgttatggtgatgcttcatatgttgttttattttcagcttgcaaatataat

SEQ ID NO: 12820 - DNA, 3571 bp, Vitis vinifera
  Intron number 2 from transcript GSVIVT01014282001 (locus G SVIVG01014282001) derived from phytozome v7.0 (chr-ID chr1 9; pos 2297745 to 2301315)
aacattctttcgaatccagagtcgccgtgagttttagttttttttttttttttggttttatttatgttttttgatatgggaatgatgaattttggcgtttatatgtgaatcaagctctgtttgtttcccggtaaaattatttatttgttttttatgcatgaacaataaaagttgacttgtaggtaacaatttctcaaggagactgttttggagaagtgaatagctggaaaagcttttgcaacgtgaaacacaatttgtgtgtttagttatttatttatttttgagttgtgattttattggggaacaattgatttgattttgatatctgtaagaggaaacataaaacaaaaaggacaaaaggggttagattgagaggaggaggaattgagctgcttttatgaggattttcatagattgatagctattatgagtttctttgggcggaaagattgaagagagctgattggtttctactgaatcttaccggcaagccccacaagttccaacagttgaatgattgtgcgcagttgatacttgattattctaggacagcaataagcaattcaatgcggtttcctaccctttatctatgaacacccccttccatcctagtgaagatcaaattggagccttggtgtttgatacaatcccttagagactttgtcaaaaggaaagtcagcacgtttgatccattaatttttttcgtgtcatgagttgtggaagtttgtggtctttgattgggattggaggagggcctcttgatttcattggtggcagtgtttataagctccatggattaccttgttgctgtttaatgcaatggatcttgtgttatgctgaaatatgtgatcttgaaggtcaccttccagggtggtattgagattgaggagtcttcatttgggtaggatagaaggacttttgaattccctttaagtcttgaagggaactgaagtcagagatatgaccgaccatctggcctgtcgggtgaagttggggttggtttatttggagaaacaattaaagaaactgtgttgagcttggggcctaccctagggtctggatggtggttcttacttcttatacactgaagattgtctcattagagtgagtgagttttagagagagatatggaatagatgagggaaacttggtgaaagagtgctaagaggaaagaggggtccctatagttcctcttgggggcctatttgtacttttgtggtagcgtatgttacataggttcgggtatgggtgtcaaatgcaggtgtgtgtctaggtgtctgatccttcacagctcaagctaaaatcactttgaagtcaattataaacaaaagataacatattcttttttttatatatataggcaaagacgcaataaagagtatattaaaagaaacagggcgtccaacagcaagcccaaagcatacaagaggtatacaacgggcgcctataggctaaaaacaaaaggaagaggcattcaaaaaacttacccaccctcatctatagcccacccacacaaaaaagttaaataaagaattaggcctgtcaacaatacaacccttggaccaagaccacaaattgctaacaaaagaaaaaaattggaccgacacttggacaaaaaagtttctttcttttatgttttacccttatttttaggggggggaaatcaacacaatgaatatccaaagcaaaacagcgcaaggatttgcaaacccttgcccttgtcgcgccatatcaacacaggttcgttggatgaaattgaaagagtctggatatcaaagttggtagtaacatgtctctccattgatttgctgttgacaaccgtggcaacatacctctagctaatgtcccaggtctcagttaagagtctgaatgctgttggagtgtgagacttggatgttaggtccttggtgaagttgcttcattgatagtgttctaggtgtcccttttgctagattacacagattttgagggccatggggttcatctctgtttgtgcaatgtcctgaggtgtccatatgggtttggtactttgaagcaatatttggacggaactgtaagttgcagcttggaaacttgtgtttgtacactacaagggccattggagttcttgtatcagtgttcttccacatgcattccattccatgtgggtttttcaatgtggaaaaggttctagtactatccaagcctcaaaatactaatacttactgagattgaaaaaacattgtattgctaaacaaattgaaccctacattgtttagtttgttgttatcatttatttatttttaaattttaagtaagagaataaataaaaagaagagaagtgagagaagatattgaactgttcttgtgtgtatttgttgattggctgggtcattaccagattcatctataattaaatattgcatatttgtaggatgatgaagatagttgttttagacattataatttagtttaagatcaactctttgataattgagaggagaattgttttaattacatttgggttatatttggttggctagatatagtatgtgatagtttaagattttatcccatgtttgattgacaatgggataggataagttattttgtcacttatcttatgttcaaccaaacatgacataggataagtagtaagatatattatccatttttgttttatatcccttctatatgaaatatgttaatcctaaactgagatataggatatgcatatctcatgtatcataattttttttaatcatttttttatattttatattatttattttacaaaataaataaaaatgattaaataaattgaataatgtaatatataaaaaattataaattctaaatattttaatcatgaatattattaaatgtaagagatttttctgtattttttttattggcaaatattagaatgcaatacaattattgaacattgaaaaataatatatattcagtttcattttcttatttattttacaaactaaatacaaacatagcatattacatatattacttcaagatttcatgtacattttatatgatatccaaggatatcatatgacattagaaatgatatcttgggatatgtatttcttagccaatgagacatgatatcctagaaatacatattctatcccatcctatcatatcctatgcaattccaccaaccaaacgtatccttaatatctatgttgggttatggatcatgagtttctagttctaatatatacaaagaggatatgtatcttaggattggataagactcaaggcgctgcaaatctaaaagattgatggataactatatgtcatcaatcaaccttttagttaggtgtctttggattctggatagaagttattcaatacattatcttaaatttcatttagttttgaatcataaattcagataagtctgtgacattggcaatttgtttattgctattttttctctctaaattgactaattttcatgatagaagaacatttattgaacccaaaagatacaagactgattctccatttttttttgtcttcctctctttcaggtttgtccaatttgctctgttaagattgcaagaga

SEQ ID NO: 12821 - DNA, 5329 bp, Vitis vinifera
  Intron number 5 from transcript GSVIVT01013472001 (locus G SVIVG01013472001) derived from phytozome v7.0 (chr-ID chr1 8; pos 154020 to 159348)
gaactggcagcttcagtccatcttcctgcactgtagtgatttaccaccagattgaagtcaactttggaacttttgatggaagatttatgaagaaacaagaacctgtctgcttttcgagggagaagcagaaaaactcttatgggaaatattgaacattcgtgaaactactcgagaattgcatcccctatctaaggctcttccagccgttaggtttcatactgcccagggttctgtatacttttctgggtgctttctgatttggcctcgttgctggagcaggaaaaaggagtggtatccccaaaataatttgtcttcgaattattctgagctgtccatattttccggagttattttatagcactgtgttctattggcaatgatgaggtctggactctttttgccctttttctcctcggccgtatgcttgtggtatagctcctgcctatgtggaaggctttagtctaatccaccttcatgaatttcctaaaggtgcttgttttcagtctagtggcagcatccgataggcttattttgggtgatgtcccaaaagatttgtactcgaatcttatgattatttttattcaagtaaacctgaagcggataggttttatttgaatggacaaaggacattttttaaaactttaattttccttttttaactctcttaccataaatgatcaaataaagaaaagttcataaatcctctttttgctttttctcgttttatatgttttattttcttttcctcagactctttggaataaaaaaatagcaataatgtttaatatttagagttgcgtatcaaaataataatattttaaaaaaaaaaaaaaaacctagataaacttttaatctagttggtttggtccatgtagacatccatcgtccaactggataaattttgttcttttgggtgaaaatcctgcagctttagcgatgtgtttttaatacttttatttggaagccgaccatgattacatttttctagcacgttatttatttatttttaatttttttgagtgtttatatttgcattcactagatatctctatacattcacttagattattattttttaaagataaatatgatccttgaaataaataaaatacccttaagattagcagtgttcagaattatacttctggatatctttaaggcatttagaactatacttttggatacattcaagggcgcctagaattatacttctagacatgcttaagagcatccaaaatgacacttccgaatatacttttgaagcgtttagaactatacttctagacatgtttaagagcgcccaaaactatacttctgaattactttcaatgtccggccttataggttcgaacaccatgaaatagatttttttttttttttttctctttcatcttgaaatctgaataacattcattcaaaaaaaataaaaatggttctttcggcattcttggacttttgttgaaaggagtgcgtaaaatttgatcaattgcaaagatatttggaaacattttttttttttatttcacttccacttttttcaaaatttctcacttctaaattatttttaaaatagattcatgtagtacaaatctaatatccacacatggattaaaaaaaatgcattaaaaaattttaaattagcttttgaatttatctaaaatggttttgtactaacaaacaagtttcgaagaaaggattttatgtgaagattttgttgtttagaagaaaaaaaattgaaataagaagataggtgtcaaagaaaataatgataattgtatttcaagtatattgaaaataaagaaacattttctttttccaatcaagggtgggttgagagaggaacataagctaaagagagataggtcatataggaggtattttattggataaagtcattaacagtaaaacataatataacaaaattaaacttaagtttctatttttctatcttttaaattcattaaaaaaaaattgagcattctaatttgtattacttacattgtatatgacttgagtgtattaggaaatgtaataaagattcaagttataagtttcttacaagttgatgagtagtttacaaccgatttaaaaacttaggcaattcatttgagactatagtgtactacctccttattagaaaaatgatttgtcttaatcattaatatgagtttcctaaagtgaatgcactagtatgtatgattacatattggatatgacttacgatgaatcatgacattggttatcaagtaatcatgatttcaccaagttactatgctttatgagctctcaaccttgagagaatattaagtcaatactgaaaattttaatagtttcgacctataagtaaaaaaccctaatgtgattatatattccttgtggattaagtcacacttgattaagataggtaacagtaggtatttttaagaaagacatcatgatatctaatgagtttgagatagtactacatccacttaggtgatctttaggacttatgatcataaaatttgtaggtgttaggatagagcccttaaaagtatgacatgatgtaacaaatttggaatttgttatttatttaatgatattctagtttcatttttatttatctttatttcatatattatattttatgagcattgtcacctaacatcttttgcattgtatatgattcgagtgcattagaagttgtacggaagatccaagtcataggttccttgcaattaaatgacttgttcatattttgttcatgggtctaggcaacccgttaaaagttgtagtgcactatctcttaattggagggatgattggtcttagctatcggaatgggtttcccatggtaagtgcattagtacgtatggttacacatttgacataacttatagcgattgatgacttaagactatcaagtaagctgcttcatttgttctctctcaaccttaagagaatattgaatttgtgctaaagttactagtagttttgacttatgggtgagataataagtttatcatatattccatatggattatatcactattgatgaaaatcaataacaataggtattctcaataaaggtaccatgatatctcataggattaatacagaggtccccttatgtgatcctaaggagatgtgttcatggaaattatagttatagtagttcttcaagtggaacttaatataagctctttgagagttaaaaaatgttagttgaacacacaataggaagatttgtaactcaaagataataaaagtagtcataaaagactgatagttttcactttattagactatgaataccagttcatggggagactaaatgcaattgatagcaaatcacggactcaagtatatagcgtcttgttgttatttatataagatactggagttcagttgattctctataatgggatgttgaatcaactttagatttgaattttaagaaagtcagtactcctatgggtcttagtagtccctgttatttatataagatattggagttcagttgattctctataatgggatgttgaatcaactttaaaattgaattctaagaaagccagtactcctatgggtcctaatagtccccgttctgagctcatataccttgttaacaagagttataagcgtcgaattagctatggtttacttttgtgtataaggatgttttggtaattacgcaagattgcacaaaagtaagtaaataaggtctttaaattaggttaattgattaattagtaggtcatgttgagttaattaataaattaggatctaatttgagctagattaagtgactcaaacttatatggctcaaatcacttaagcctaactagaaaccttataaataccccttaaaggttagggtttccatcattttttgttttccatcatccaaagagaaagagagtcatagtcttcatccttctttcctcctcatcgaaagtgtgccaagattaaggagagtcatcgagtgaaagatcatgggtctatgatacttccgacgacattaatttaattcttcaacactttgattcaaggttagtacttaaccctaaaagatcaatttttgaaaaatttgttattgcttctgttgcttagatctaagatgccaataatagaaccgtagtaattcatttagtagattttgacatatgctcttaatgagttaaaatatgttaattgatcatataataggagaatttaagactgaaagattatggaagtagtcttaaaaggttgatgtaatctacttcattagattatgaatatcggttccaaaagagtctacatgaagtgaatagtagctcagaaatcgaaagaattgactaaattggatttaattaattctaatttcaatgtaatgacacagaatattgagtgcaattaattcactttactggaatggtaagtcaacttcagaattgaattatgaaggagcagatattttcttataggtcctaatggtctctgcttgaactcgcaatctttgttatcataaaggttttagggaaattaaagattttcctatatgaccctatgagttttaggtttagattataaacttctagaccattagtcttccaaatacctaagctccttctttctctcctttcaaggtgtggcaccactctacataagtagagtggagtgataggtgaaaaattatcaagtttggagatatctcctggttaggatttgggtttgggagaaatcaaaccccatgtatgatttttaatactccctttggggccaaagttttaatttttattgcttccattatacctaagatactatatgcatgtaccctaaagggcaaacggatattagatcacttaacgatcttattgtagataaatatagctttgcttaaccaagatgcaagcaaaggtgagttcccctcggaagtgggtagcctagcgggtatgtaagaaaaggtttcaacatttcctgttcatggcaatccccaggtgcatgaaaagaatactcacttataggtagatgcattaataggattaacgttttaaagtaaatgcatagataaggtgaatgtattgagtgatttggtgtatgcaaatatagcttctcatatgtgttttttttttttttttcttaagattgaagagttgtggttttttttctcaatacattataagtgacataaatgtttagatttgatccggtccgctaataaaaacagtataagaactgagtgttctaacaagtgtgatttgatcacgtgaacatttatgctgaatgaagctatactttaagcggaccggattaaaaaacgatgttgtaagctgctcaaaccggccagagccatcatcggtgcaca

SEQ ID NO: 12822 - DNA, 2769 bp, Vitis vinifera
  Intron number 6 from transcript GSVIVT01008357001 (locus G SVIVG01008357001) derived from phytozome v7.0 (chr-ID chr1 7; pos 2904232 to 2907000)
gagaaaagattgcatcgttaaccaataattaggtaagggagaactcttaaattctagtttattttcttattaatttcacacggcactttgttaccctcatttatctagttctgatttttaattttattcttttagtatgaagtgtaatcctcaatgcgtcatttggtttaattggttttttagacaaaatttctattatgattttttataacatttataaatcaaagtttattatttctttagtatatataatcttaagaaagaagggaaaaaaaaaatgaagcacaggcaaccaaataaactttgatgggtatttccatatagagagagagatatataaatgttggaaatattgttaccacatttgtcatttcttgtatctaatcaaatgtggctcttctgctttgattggatgatgcggttggaagttggaaatattgttactagagtcagactagtcatttcttttaagtatctattcatctcgttgccttttctattgagaatgtttaatttgtcgattttccatgatattatgtttgaatctgttgttgatattgagatattggcaattaatgaaaggtagcatatgttaaggataataatttatgctctgaagatgacctctcccggttgcccattctttaatagtgacagaggccatgcattctcttcttctagttgtcaatttctttccataaaattttaatgatattggtctttctatcttgttgttggaaaataaaaatacaaacaggcggactgggtaagaaatggagagttgacctggaaatggaggactaatcaaatatggttcttctgctatgattggatgatgcggttggaagttggaagttggaagagagttgatggagctggaaatggagaactgatcaaagctagtgtttgggtccttgcttgcttaccagtctttttcttgattcttgacttgttgcctcagtgctgaattctggagtggtgtgcttgtttattatttgtcttattttcacatagactcatgtgtaaggttgttttggttgtttggagtttggagtgtgaactttgatttagtttacaataaaagattgatggattcatttatcaatcaaatatatgaatgataatatacgattctaatttagtttacacattattggtaaaatataaatgacaatacacgattttgatttgcccgtattcataatttcctcctccaacattctctatatatatcatgcatggacgcacatatatatgaatacgagattctccgcatgtattccgtgtcctaaaatcaaggacttttttggccaacataggagagaattgaactggaactggagtgactaatcaaggctaccgtttggaatcaaagccacaaccttggtttgggaacacagagactgaattatctatcctactatactttgatgccctgcttggttgcaaaaatttgcctctttgacctggaggatgtttcttacatacatttgatttttttttcctttttctttttctctgctctaaccaataaattggaacttaggaaaaaaaatatatcttccttcaatccaagtctcgatttctggccatgttaagatttttttgtcgagcaacatccaatctttgaaagcatggtcttcttttgattctaagcccctcataatataattttttttctaattaatgtgtttaaaaatgttaaagagaatgatttgtaagataatcttattcattttggtagctattttgaaaaacatgtaaaatatttttttcaaaaataattttataaaattagagatcataaaataaaagaaattaaaaaaataaatatttttttaaataattggttaaaaaagatgaaatacttttcatatttgtgaatttattattttctatatttttatttgaagagtaacttattttttacataaatatccttttttatttcaagtatttataatatattttaaaagaaataattatttttacacgaaaacaataaaggtatttttatcaaaattaggccaaaaaaattattaagggttatattttcaaaattaggtttccaataaccaataaccttttaattaaataatccataattttcccgagatggtatatgactttattagagatagaatttcttatattaagaagaaaatttcaaagtttaaaattacattcgggtgagtatctacaattaagatataaaatgcaaatttctaaaatgatgtaatgagaaccattatataatatcatagcttttctatttttaccccttaaatttgtaagaaaaaattatttattttgagaagttgatttataaaacaatttcaggtctcatgataaaagtttattctttcacattctgttttacaaaggcaagtcccaaatacaatcaataaaatataaattataaaaatatgatgttggggtcaattggaatttcaactaaatgacaaatttttagtacaatttggaaaaaaaaatgttttattctataaaaggaattgaaaaaaaattcaaacttctcataagtgaatggatttaattttatgttttaagaaagaaaaatcataaattgaaacttaattattaatgttccccttgttttaatgattgaaaaagtaacttataatctctagaagaattataataaatttagtaataatttattaaataatatttataaaaattgtatttatttataattaaattaagacctcttaagatttagtgtaaatacactaaaatatcaaaagtatt

SEQ ID NO: 12823 - DNA, 5305 bp, Vitis vinifera
  Intron number 1 from transcript GSVIVT01036109001 (locus G SVIVG01036109001) derived from phytozome v7.0 (chr-ID chr6 ; pos 20575175 to 20580479 reverse strand)
gaacctgaagttcccaggagggctccgagtgccaggtgagtgttttttccatctttttggaaattgggatatgggttttgcgttttttgctgttgtggttgtgaatttgtggagcttgattgatgggttttgctcgattgttgatattttgaagttcttgggtttttgctttatgttggggttttatttgcttttacccaatcttgaattgtggattgtgaactgttcttgtttagttataggaactggatttcttaaagaagagatgttacagagtacaatttgaagttattgcattgctaaaataacaagtttcaggttgaatttgatttgcatttctgcccacccctacgtgtgcatcaaagcaatctgatccctgcattgcaatgaatctcagaaaaggcattcctcaatattactcttacaaatctcaaatatactgcattgctccaataagttggggaaatttgagctagatgttgtagtgatgaagacttgttgtgttcattatgtcatatttgttttaccatttctctttcttgcttcatcttccctgttggctccttgtttttgaattttgatgaatatcgtattcacaattttgtccaattttgaattttttttgtctttagtagattgggttatggttactttgggaatgaaggttcgttggtgatgcatatttgaatgcaaactcaaccaaagcgaagtttggggaatacacgtttttcttggtataaatattgataaggtgtcttgtttttgtgttctgtcggttccttggattctcgagattgtgaatatgttgcatttaatgggtgggcttctgttttttcaatttttggcatgtgaattatttggaaacaaatgttaagagtacaacctgaagtactggcatcacgagaccatgtaaacttcagttttgatgaatatcctttcttatgaacagaaattttaatattggtttttcattttcataatcaggggtttacccaagtcttaaaattgtgaatttgttgactttgataggtaatttttcttttatgctatgtttggttctagagaagtataaaggaaagaaaaaaaatatcaaagacaatgattttcccatgtctaattttattatagaaaatactaaaaaaagtaaaatataattaaaatttgtgtagagacttatgtattttcaaattatttaatctttatgtaaaagagttaaaaataagttaaatgagtttgaagtaacatataaaaataatttattaactttaaatatatttcttattgtccttgatattttttttccttctaatttttcttatgtttgattttagtatagaaaatataaaagaaattaaaatataattaaaatttggccaaaacttatgtattttcaaattatttaatctttacatagaagagttaaaaataaataaaatgagcttgaaatagcatataaaaataatttatagactttaaatctattttttatgttttttcactttttttttccatctaattttgttccccattttctttccctcaaattttccgagttccaaacatagccttaaaattctgttggctttcccattctcagtattatgatttttttttttactttgtgtttttattcttcttttctttttcttcttctttttaaaaattgttaggatgcatattcatgatgtagttgtatcaaatctgaaagaatggagttaggagaatattatagtaattataagtttttaaaccctgaagtaaccggaagaaatgggttttttttccttgtgttccatagaggagttatagtgatcatcaaagtgtacttatttaatcaatttcttgttttagtttgattaccgaatcagtgcatgtcattgagtattgtttttctcaattgatatcatcggtacctgcataactaatgttagacctctcctatgcatgggtgtgtgtcctaaagaaatttaaaacaaaaaaaaaagaccaacaaacttattttggaggctcaaagaacttaaaaaacctgtcacctatcaaaagaaaaaaacaagaacttcaaaaacctgtcatgactcatgagtaatcttgataggaaatgaaaactaaatccttaacaaaaagctccccttttaccttttaaagtaaatgtgtgggaaatgatatagcaaccaatcaaaatggtaaaataggaaaggaaaaactcataaattgttgaacaaatcaaaacacagagggaaagtaggacaaggtattcttcggtatgaaatatgaatgaaccaacaatgagaacttcaaacagtatctcattttgttcccatgaacttccagcatccaaaatgaaaatattactaacctcgtatatattgccattgctgtttttttcagtttgaaattaattttttctaaaagtgatcatggatgaaaactcttttaaatgtgatcattaatcaattagacaaagaatttgaggctgtttaggctagaacagttagatatcagaaaaatggccaccatttcaatttagttttgaaaactcagatccatttggattgcaggaattacaaagaaaagggaaaggaacaagaaatagaacagaaaaggatggaaaaaaataagcttgaactcaataatttttttttttcattaatacttttccagttgtattccttttaattgtaaatactcttctgtattttttattttccttctagtctttgttgcagatcaattaacagaactcaaaattcgttctcatttttgtcccttttcccaattatagtcttcctattaagtgcaagaatggatgtgtctgagacagagcagtaattaaaccaaatcaatcataaaaaattctaaaaataaaaaatcaattataaaaagaacttgaaaatactggtgataagagactcctacatggcatcatgaggtgaggactcatattctattatacatgtatatgggaataggaagaaagagttagttgcccattgatataaaacaaaagttgtctctatcttttcaatcaaaatgtattttggaatgatttaattaattctttttattcgtataaatatcagttaacataaaaacatagtttggaatgaattgcaattagattttcccttgattgaataagtaccaattgaacataaaaggaacgttgtcttccttagatgtttactaatgaagcaccttcatgtaaggtttgccaaaagggataattttaggagttaaaacctgatcaatgtttgaatttaatttcatttgaatttgacattgacttaaatctttctgcattttcttttcctttcatataccttttaacttgtatcatgttcttttgttcccttaaaatggatagtgagcacatatttaaatgcattgagcaagagatgtaaatttataaagattgttttgttaaaattaattgtcaaaaacattcattttgtcaaagcaaccatgttcttgcatttttagaagctatataatcaatgcctgtttcaacctttaggtgttaagttccaatttcagagctcaaattcacaagattttatcaatagtggaaaactccttgtgtttcttcaaaagttaattaagttgccttccttctgttgtaaaatctaaaaatgaaaagaaaaaccaaagaccaaaaaaaaaatgaaaattgccttgattttttttttttttctttaatcatgaacgtaccttaaagttaataaactgaagtcattctagggttttaaggcttcctgtggatcttggaaattttgataaaagtacaacaaaaagaaatataggtgaaaattggaaggaaaggaaaaaaaaaatgaggggaaactaaaaatgggttttaaatttaataatttttttttcacatgctttttcaaatatacctctcttaattccttttctacttaaagatgaagaatttgaagatatataagtttctaaatattttcattgaaaataggtttaaattcaactagatgttttttagatgcagaagtttcttagtctctcttgggaaattgttcttgaaaattgttttctgttttttataacataactcaaagaacacactaacgaacttttgacataaaacagcttttaagcatttgttcttaaaacgtgttgttttttggaacaaattttcagtgttcttagttgttttgtgtagagtgctctgattaacaattgaaaatatggtgaatactttgaaaattttgtattgtacataagtaagtgcatattaccttcatgtagaacaagacaagaaaacagtgtttcatatttaagtttccaaacaaaattttgttcctggaaataatgggaataatttttgagaactgttcttaaaaactattttctaaaaactgcttctgaaaacattcccaaatatgctgaacaattttcattgaaaataggtttatattctataatttttgtttacttgtttcttcaagtcttatttcctcttctacacaaagatgaagaacttttaaatgtataatttttaaataattttcattatatttgattttcctttccttcatattttccatgacaaaccaaataaaagatttatatataagtatacatcttaacttagtgtaaggtcttgactgatacagagaagtataagtcaatatatatatggtcatatctgttgttatggacaggtttccctcataagttatagtctgatgcataattaaagtaaaatgcagtatgaggcaagcattgtccagtatcttgatgtatgatgatgtctatcatcagcatcaattcatctatcatcagctaaattagttttatctatcaattttaaggttctaaaatcacttttttgtcaacaaggctgaagttctattacccttaaacagtaaacacagaatatttggaaaaaaaataaaaccacctcttagcttgtttgtgaatatttgtggagcttataacagtaatgggtcttgggtgatagatataagtttgatcaacaaaggagtacaggtgattaatttttcaagttttacttaaaaattgtgtaaccaaaatgttctatgcatgggatattattactgttctgtatgttgtactgcatacatacatgctacaaaaatgatgacatcttagataatatgaattaggttcttttgggggctccagaagttggtaatcatgacatatcttttgatcagcatcatacatcatgatgacaatgtcttggcccaagtttcagaacctttcttattatgatgatggccatcccagtatactgacttgagctttttcatctttagtgcaa

SEQ ID NO: 12824 - DNA, 7933 bp, Vitis vinifera
  Intron number 12 from transcript GSVIVT01037391001 (locus GSVIVG01037391001) derived from phytozome v7.0 (chr-ID chr 6; pos 14497051 to 14504983 reverse strand)
ggttaagcaggtgatataatcgaagagctctgttatgtttctttgagtaattttatagagtaataatttagttgctgcattgttttatggccttatatgcagtttcttccatatatggttttaatattgcaattcatatagctctctatatatcttagtcaatcccttacaactacaaattaattggaggcaatgtttgttgagttaaatggacggacttgctgtactatctctctctctctctctctctctctctctctctctctctctctcttggatgggtaaagcaaaagtgtaatggacttgctgaattcatttagcttgcaccaactgcatgtggctccagttcacttgtgtagcatagggagattttcctgcagactacatagggcctagagggggcaaatgccccccattgaaaaaaaaaaggaaaaaaactttaacagttggaattgagccttggccaaatatatagaaaggtattgaggtttaccactaggctaaatgtgttagtcatcctacgttttgttcccttggaatgagttttgggctttgccattgctgactcatgtgttccttttccttccttgaatagtgaacttattttcagggcttgagcaaaactgataaaattagatccttgaattaaaatttctgacttctaatacacccctaaacttcttgtggtttaaaaaaaaaacttggccattcttttgaccattagtgtggattttttcaattaaactagagttactcatttctattaaataaaaaggtcaagaaggagacatcctttcatattatacaaaatctgattaaagctgcaagctgtacacttaaaaaggaaacaaaaacaaaataaagcaatgatagataaaagtttagttgttaaaaacttaatacagatatgatatgatgtggtacatttttatgaaaatcgatttgtatcaccagtctttaacatattttaatcttatgagaaatgatacaatatgtaattaatacatacacccttaactattttttattgtttctgaaaattttcaaattgaatttgttttaaagaatatcctattaattgtttaaaatgtattttaaggttagaaaataatcataaaagggaaagaaagaatggtaaataatccttcttatgaagaagtcacatatttgtcaaaattatatgaaatgttgaaatttttgtcacattataaagacatatatatctacaacacatataagtatatatatatatatatctacctaattagaaattggagctaaaaattttaaaaatttgttgtggattttgtgatgataaaactcatattttgttaaattgaacttctcaagactctagtttcaatgttttcatatggtatgacataatttaactctttaaatcctactatctttcatgaaattggtcatccattactctatattttatgcttgaaatatatttgtatttcatatatttatacatattttttctatttatttttcaataaataaaaaaacttatgatacatgatatgatgcatgcaacacatgatatagaaaagtagaaaaatgatacatgataagatttatgacttgcaattgtgataaaagtatggaaatagacatatcatccttcaaaacactttgtttaaatatttccaagtagaattaagttgaatatgaaacttgattttacacaacttgatttaatctgttatatgttgtcaaactaaaattgtaaacacattatgggacttagttgtctaccaagggtggagcttgccctcattaaaagcactctcgtaggtttctttgttttactatgcatcttcctaccaaagagatgacctgtggcctgatagggaagataggaagaagtcttatctagttatggtcaactttgtgttttcataaggaatttgtgtgtttggcaatcctaaacctgtgtgatcttaacaaaggttgattgggtaagtggctttggaggttcgcataggaaaatggcagattttgaaagagagtggtatcagctgagtttagtgttctgcaagggggatattaggaagaaaagctatgggtcaggggctcttgagggtcatcaggtagggtcagaatggacaatgggtttttgtcgtttgcttagttttgggaaatagttaaaggaataggttctgttatgatgtgcactggggtaagacaactctcaaggatcagttttctagtgttttttctattgttaatcataaggaagccaaagtgtgtgattactggagcatggatggggggcaacagcactggagcaccctaactatgtaaaagctttccaggtactcccactcttttcctgcttcagagttgtttcataggataccacctagaatgtattttttgtgtacaaaggcggtttgggacaagattcttacctttggttggtttgcccacaataattggcattgcttggaaacaaagcaaaaattatgattcacaattttgttgccacccaaaattcttgaatatttggggaattaattggagaggggctagccaactgccttgtagactatgttagcagctctagcagttttaggtttaattgtaagtgaaggcttggagccaattcaactcttaatactagcatatgccaatttgtcttgcttttttttttcttttttttttttaaagtgcataaaatatataaattctaaaactgaagatcgaaatcagaattggaaaaagtttcctagtttatcattggaagagttttaaaataatttgggacttatgctaacaatttgagattattagcatctagaatattcttaaataattttcaaattattgttttctgcattgctgataagccaacaagatggtaacatgtgacattgactaagtgaaatgtaaaaaataacaaatgaaagagtagagtgcaagcttggtaagcaaagggaaattgaggtggggaccagtaggaagcatgctttcagggggatatcccatatccaaggtgtctctaggtggttgtcctatgggtgtttctttgggtaccccttttaaatcagtggcagcttaggatggggtgaaagagtggttccattaaagactagtgatgtggacaaggcaatatatctctaaaagggagaggctcaccgtaatccggagcacattatccagcttgcatatctattttgtgtttttgttttgcatctcaaggatggttagattgaggttggaatagattcaaagggattttctttgtggaagtgggggctctagagagagactacatctagtaaagtaggtgattgtttgttcagataagaggaaggaggggcttaggtgttaggtctctctttgcttaacaaggcccttctttgatagtggggttggcgatatgcacatgaaagagaggctcttttgaagtaagtcatgggtggcaaatatggtaaagaagcaaaaggatggcactcctgtgaagtgagagaggtgtacaaggttggattatggacgaccatcaggaaggattgagatctttttaacaatagtctctttttcaatggacaatggaaggagggtaaagatttggaaggataagtggtttggtgataaacctttgtgtgtatcttttacttgtcataattgtgttgaaagaggcgtgggtggtggatttatggtatcaatcaaaggaagggggttactagaatccttgcttctctagacatttgagcaattggaaagtggaaaatgtagagcgattcctttttacattgcaagggaaggtggtgaataggaaaggtgaaaatagagtgatttgaatggagttaaagagtggagccttttctgtcaaagtttgttactttgtcctcaatctagggagatcggttccgttcccaatgggtattatttggaattcatgggtttcatctaaagtgagtttctttgcttaggaggcaagttagagaaaagtattgactgtggattaacttcaaaagagagggtggttgttggcaaacaaatgttttctttatcaaaacaagggagaatccattgatcacatcctctcttttttcaagatgagggttttatgacaactcttatttctctatttggcatatcttgggcaatgtcctcctttgttagggagactctcttaggatagcatgattccttgtggaaaaaaaatgaaaaaatgtgtggcaagtagctcctttatacattgtttgaacaatttggaagtaaaggaatagaagattgtcttaaaatgaggagcattccaatcaaagactgaaaaacacttttctcagttattttttatcatgggctaagttgtatgtaaatgaaggtctaatgtccttaattgattttattgattggttgggttattattgagggagggagtagtttttagcagtacctcttcttttttgttatgccttttgggaacctttgtatatgtcatgtgtactttggtgcactcttttggtgctttcattatattatacttaattaccaatccaaaaaaaaagagttttttacgaagaacatattaagacattctatcccatgggcctcaaataccatatatgctagacgctcatctttctagagtatgtctaagccattagctaaaatgttatggtacctcattactttcagatgcttcaaagtacggaattgattcttagaagttggggctcatatcaggtcccttgaaccatagttctttcgtgctctgaggctgctcttactccttggaaaatttactgaaaacatgtactattaggagtgcctaccttgagttatcacacctgagtgtatcccttaaacttgcattctattattattaggtacttttatgcagtcaaggctgcttgcaccaaagaacaactcacatttaggagagtgtgacctcgaacttgtgtcaatatccttggtccaggtgctgaaaaagcatcatcttgacagaaggcaaggtgatttgaaggccttcacttggtaggtgcatgatggcttatcagaatagttgcacagcctcatagtttggttcattttattttggtcttctgatggtatttagaaagcttttcagattgtgacatgattccaatttggattacttatcttaatatttgtcaaagattcactacctagttgattgcacgagtagtcataaaggaatttaattctggagttttctctcatttgaaaaacaacatcactacatctacataaatatgcatgcttcgttaagaggaggttttgttgctgaacttttgagaaagctagaagagagtgctctaaagtttttcaaaagaaacccctaggaaacctcggttaaagacctaaaaagtgtgttagatagttgacagtgaggaacagacctagagaaggggtaaatagatctctttactttttacgtactttcaaatcacaattaatttagaaattagtcttgcaaaaacttaagttaaaggcctgttttaagattaattttgtctaacttgaatctcaaaatctggagtaaatatctacttgctaaaatttcaaaattaatatccccctgactacattgggcataaggaatactgtaatgtacacatcaaccgacccttttcatgcccttgagacctcgctcaagtggtaaagggttggggtgggtttatgggaggttccaggttcaagtcccaatgaggacaaaaaaagaaaaagaaaaaggaaaaaaacagagccttttcatccttctgttgttatgggaaacagaggattctgcaagatgaaaatgatctaattctttgtaacaccatctaataaccctctgaagatagaagctaataaagaacctggtggatattccctagtaattagaaaatgttttctacagggaaagttggcaaaatctcatgggttatgtgagatattttgtgtatatttataaagtttttaggtcctctttttgttagttgacccttgatcttccttgtgacttttcagggttgtctgattgttgtcagtttcctgattatgtatctttttctttccttttttctggttaaataggatctgaatatatactgtttttacgaataagagattatgattctgctttagaaactaatcttgcgcttcgaataacgagaaggattctgtaaatcttattcatgcaaaccatctttgcggaattctttctagaagtttattctttgactgaaggtgatagatgtgagtgcaggtgtgtgtgtttcatgatggtccattaaaagtaattttataggttttgaatacctttagttgattacaaggccgatttcacagaaaacagaattggatactgattaggattgttcaccattgtcctgggtgagctgggatcaatcctagagtgattatgctcctgggattggtcttggcattatgggaatagatctgagtacctctctaagaacaagctcaattatgtgcaaatttggccccaaaaccttcttattgttttcaacatcttttaaaatgattttgaatgttcaaaacagatcttgtggtctgtaagtcagtaagatattctgagatgctcagaataaagcttgatgattattttttttcatcattattaagccttaatcaagatttttattttattttttgtattttttgaaaaaaccttaatcaagtttttagaataagggttattggatcaataaagtttgtcattacatggcttagataatgtttaaatacatcctccttctggctgggattttccagcacaaatttgacaggagatcctaaaaagacaatttttgtttattttaaactgaaaattctataggcttgagatactttgcgctcttcatgatcctattgccacttcacctttgaacatacttccctcaattgcctcatgctcccttgtcatcttgtcatcctgcacgttagcactcatagattactttaggcgctccatcaaggaaccctataataggcatgaaactagggttttacatccttatacaaccctgattgtctatgctcttatgccccacttaatccccaacttgctgcccaattgaatctggtattggtttggactcggtatgaagttccaaatatgaaataattaattgaatattttaaaaattttgtgtatgttatttttaatttatatttttctttcttttcctaataggctttaatttaatttattttttttcttcatgtcaattcttatctctttatttgatatgttcaagtttcagttccttttctgttgtgtatggtatattagaagccatccagaattcccatacctaaactcaacaagatccaaggaccatattttataatagtggcaagtacaggtttcgagaaaacagattcaaacacaatttgcagacagctctactgaaaattatcacaattgtgtgggatgaatctctactacctactaataattggtcccttttcccaacgaactacgatattttcggccatggattgagttcctacacctgatgcaacaagatccaggactatattttatagtaagggaaagtatcagattcaaacacaattttcagacagctctactgaaaattttcacacttctatgggatgaatctgcactacctattgataattggtccttcagccattgattgaattcctacacctgatgcaacaagattcaggactatattttataataggggaaagtaaggatttaggaatcatattgagtacatttttgtacaaatctattaaaaacttcgcattttggtatggaatatatctaagctacctattgctattgataataaaaacaacctgtggaaattttaactttattaccaccccacatatttttatgtggcacactcatctgatttctgcttatgcttaatcaggataccagggcagaaggtaggggaagagttgctcg

SEQ ID NO: 12825 - DNA, 567 bp, Vitis vinifera
  Intron number 8 from transcript GSVIVT01032740001 (locus G SVIVG01032740001) derived from phytozome v7.0 (chr-ID chr1 3; pos 1138279 to 1138845 reverse strand)
gagccggagtcccttcagcaagtgattgagaagggaatgcttgaaagtatttgtatttgttggtagagatattagggagagagagacaatagtctctaccacgattcttttattcttgaatttcgattttgggtagtgattctgtatctgtatatataagtttgttttagttaattaaagcttgtttttgtctgaaatggataaatttgataccaaaaggttggattcagcttacaaacaaaaccacgacagaagaggaaaaaatataaataacatattcaacaaggaaaaatactaggataccaatatggtacctatcaaacttacagtccttgaaaatgtatgatggaactaatttaataattgctagtcatggaaaaatacacatgtttctaagttcataaatgattaccaataaagtaatagtagttgaattttatgtttatttaaaaatatttttatataaaaaggaataattgtgatatttaaaattaattaattaaataaaaatctacttccaattgagaagctctcttgaacaggccttccataaagcctgcatattcc

SEQ ID NO: 12826 - DNA, 3804 bp, Vitis vinifera
  Intron number 2 from transcript GSVIVT01036173001 (locus G SVIVG01036173001) derived from phytozome v7.0 (chr-ID chr6 ; pos 19828640 to 19832443 reverse strand)
aggtatacggtataccctcatgcaaattaatagcttctgtatatccagtttttcagttgatacactttaatcagatttttccattcccttttgtaattaatcagtcctaatggttatttgaatggaaagtgaatctcatcaactacacctagaggaggtgaataggtgttttttgaacaataaaagaaaattccgacacaacttatctaaccttagacttgttcacaattttcttttctcttcaatagtttttcaacacaaagtagagatcacatgcatacatgaatgtagcaacactccccaatacgattcaaatgcaactcacatgcaaatgcatcaatactctcaacatacttaataagatcggtttttcaataactcaaatttccatttctacagaataattaagcacaggaaatttttaaaataacctaacaagaaaacacaaatatcatcccattgttcttctattcaacttaaaaccacgagcattaaataaacaaaacaggatgaaaataaatcaaagagaagagtgagagatagcaactgtgacacaaaaatttacatagaaaatctccgaagagattaaaaaccatgggcctacaaccgatacaaaatatccactgtgaagaataaacactgaatataaggttttacctaactcaaacctatcagtccttcctagaccacttgactaacacctttcactttcagttgcacaccttcttcttctagagcacacttggagtccaaaccaaactcgattttgtcttcttcttggatcgctataagaagaaaatgggtttcactcaaacccaaatagattagaaattgagagacgaacgaatgaagaatcaaccaattttttttcttaagaaaatccattgaaaatagtttggaaaacaataggaaagttgggttttcttggcaaccaaacaccccaaattaggaaaggaaaatataatcaaaagaagatggttgttatgtctctggtattctttccacagaacaggaagcaaatttacgatttttaaattaaagaaatctttgatccaatagatgaggtatcatcaagaaagtgcaacctgaagttggatcgatccttagtaaaaaatgcttcccaagccttcctaacttcttaaaaaatatttcaagaaaagcaacatttaaataatatggttgatttaattccatcaaactctaatctcaactacaaatcttggtctcttgacaaattcaacaatttgatctttattaggcaagtagttcgaagaaggattggaaaaattaagttaggaagcacttagaaattttgtcaagaattatgaacctagttaaacactcagagaatacatagccaaaataactataaaattgtaaaaataatatctccttttaattttgttaagaaatgacccattttggacacttatctctcttttgtttgtttgcagagacatagcttgtcatttattttattcattctataacacatttatctatttaattgacttaaacttcatcttgatggttccattaatatgtacaaagttcaccttttgcaaagggctttcatcaaacctatggtcttgattattttgagacatttagcccaattgttaaacctaccactgtgaggattgttttaatgttgtctcctagtaaagattaggtattaaaatagttagatgctcacaacgtcttttaaatagtgaacttgatgaagttgtatacatgttccaaccatgtggttttgtgagttctaaatttcctaagcatgtttgcaggttgaataaaatgttgtatgaccttaatcaagcccctcatgcatggtttcataggctaagtaatgcatcattacaatggggtttttactcatctaaggttgattatttgatgttcgtatatgttaatggtcatgatattatagttattgacaataattcatctcaatttcaatatagcttcatcactttgtttcacttggtttattttgttacaacagtttatgtaattaagtaaacttgttcaaatctattatgctattacccagaggttagtatattgttacccaattataaagaaccgtttttagagaggttctaaataataaaaccattttttacctttgcaaccactctattttcttcaaccactttgttctcttattcttacattcctgtaagctcacaatgatgggcaagtataaaagtaatccatgatctaatatcaaaatttaaacttggttggatgtgtggattgtaaaaaatcaacatttggttacttgttccctttaattggaggactcatgaaagagtgcgaggaggctatcattgctccatccaccttagaagttgagtttatgacacaatttaagaccatattttgtggattagggttattttgtgaaactttatttcaaggcttggggttgtcaagaatattgttgagtcattaaaattttattgtaatatttccatcatagtcttcttctctaataacaacaagaatataaagattctaaagacatggaattaaaataccttgtaagaaggaaagaatttcataaacaaataatatcaattgaacaaatatatgattgaaaatccattaaagaaagggttgccaacaacacatttaaagaacatgtcaaagaaataaatcttggatgaaattattgatatttgcatagtgatttgcattaagattatttatttaacattgtgggatatatataattttgtatatatgaatagttttagatgaatgatatatattagtctttcataaagatatttttgttagaccattatttatacttcttatttataggtaactttaagtgaagaactaataatgtcatacatggaaggatctatgttgggataaatgttgaacaactgttatgaatctcattattttatacttaactatgatatatgttgtgactgatcatgtaaaaaaggatttaacattggatttaacttatgtcaagtggaccaagtaagagaatgttggatgtgacccatgcaagtaatgataattattctatttattaaaattaatagattgtttaacataattattgagtggttagattcaattgatcaattagaaaagtgaatgcttagcttaaataattgtaatttgatggaaagtaaaattttaatttgtataagaagactagtccctctctaccctataaaatagtgttctatatataccatcaaatactgaatgtatagaaaagcttaggatcaagcgagagagatgcaatttcttttccatttaactttttgtaaatttggtgttttcaagtgtgccctcatagttcaagctatatatgtaaatcaactctctttatttataggtttgtaaggatcataaagtcttaagatctagattaattgttatcctttagttcctttcacgtaaaatttagaatttatataaacaaagattttacacttaagttgggagtttcgtaaatttgacgaattataatgaaatttgaattacaaatgtttatatttacaatttaaaatgtaacgatttgaatgccaataagcaatgatgacaattcaatttgtatatattgcattttgttcactattagtttagaaggaaattaaataaaattagaaaattacgtaagcatatgactgctcttcaaagatcattttttctatgtaatatccaaatacttggttaactaaaaattaaagattaatgagtttaacctagcctgactttttaactactttgataggtgttagggaaggagttgtttagagttctaaagga

SEQ ID NO: 12827 - DNA, 7494 bp, Vitis vinifera
  Intron number 3 from transcript GSVIVT01017755001 (locus G SVIVG01017755001) derived from phytozome v7.0 (chr-ID chr5 ; pos 3169855 to 3177348 reverse strand)
agtcccggcgcaaactcaattctaggtatagaatggcctcaatctgattgttgacagtacaattttgattaatttctaatgctaggttgaaaattgttgttgtagtaccccttttgaaatcctatgttgattgaagtccaagtttagggtctgagttggttgtggggttattccgagttgttggatttgtaactgccatcattacaaaggccaatcgtgataacattggattgtcccatgttacttcacgttcctaaatgtaagcaaaagtggatatgttcattccatataagaaagggaatggaaaaggaaaagggtcattggaaacccaatttgtctcctacacttaggcgccatctgtgtcaagatttttttttttttaaaaaggaagaatgttgcattaggtggagtcaagtacagggatatcattcattgctggtgacttgttgtaacttttgcaaagccaagttaactagcaataggatcagtaagagtagaggctgcatttggtgatgcagcagaacaaagatctaaataaggagaatgccgtcttatgctcaaacctcaaagacagaaagggctaatggaatagcagttgaataagttgaaagctttggtgaagaagagggcccatttcatattatatgaggttaggtataaggatgtcagagagagaaagcttgcaccatgacaatgtaaaatgttttagtttagctttgtgtaggttaaagtgtttgatgactccactacgaggataagcttcaaaacagggtcaccatttaagtccaacttgtataagtcactccacaagaaacattgtgtcaacattaaggacactttcactagagtgtgtgaatatgttggtctataagaggagttggccatatttctgacccaaggtgattgttgccactaactcctaggcgaagaagagggcccattcattctgatgttgccttaaaaggaagatggatgcgaaccaagaaggtggagacagcttctaaacaggtaaagcgatacccctagattgagatgcggtgtttgcaaagttgaatgcaagttatgaacaagtttccaagagctagttaatttgcctgacttttggtgggctaacaaccagaaggagaccattccaaaaaaaatcaaagctgctattttaagtatcatcgtgtacagaggaatgccatagcttgaagtgttgttgaaatgtatgcaaaaagtggaaaactcagtcaacttgttgcaaaatatggtggtcaaatacagttagttaggcaagttgcacaaggttctgaaggtggagctgtaataccaagaattatattgtgattcatgatgaagatttttttgaatcttgaaggagtagtaggatgccagcataccaaaaagttaggcaacatgagtgaagttaatcaagttcgacatgtttgacttgttacagttaggacgacagacaacaaccatgatgttgttttcccattcgtatccaagggtacaatagtatatcctcataatgaggtgttgctgttgatgttaccaataaccaactacaagatgtagcatgttctggttgatgctagaagttgtaggattggttacaataatggtgcgatttttgatagttgatgttcttccccatatgacgctattttgggaaggggatagattcattaagcgtgtgttttcctatctacttatcattataagtgttagaaaaattaggctaatccaaacctatggtaatcaccctagagggggggtgaatagggtgatggtctctttttgtaaatttaaattgtgtgaatgtaagagacaattatatgcaagtatataataaaataatatagagacaactgcatataaagtaaaagagtagggaagagaaaatgcaaacacaatattttatagtggttcggcgcaacccggcttacattcactctcctctagcttcaatcccaagtttgaggttctactaattcaaggcttccaaatcaagccttcaagccatacaattggattatggatccagtccaccctcttggacttttggctccaagtaccctttacacttctcaagagatactctactcttgaacaacccctcaagtgatacctcacacttagattctttctcttaaagatatacaaataatttcacaaactcctagtacaaaactttaggctcaaatgatacaagaaaactaggattgaatggtgcactaaagatatgcaagttttagaacaatggtgcactaaaaaacactctcccaaggctcaaatatattaaaaaaagatttaggaaggttaagctcatgaaacaatgaagattggagccttttgaggaaaaagaccaaactagctgttgggggtttgattggtcgagttgggggttgaccggttgactagtcattagcatttaatgcttggcaggtgatcgttggacttcaaccgccccttgaccggttgaggtgggggtcgaccggttcttcatccggttcaaccggttgagctgtttttggcttaacaaccaactttttcaactttaaaccttttaaataagtttggaaaacatttgacacaagattttagttgaaaacatgaaatcatcaaattttaaaatatttaaaacaaaataactcttggatgattttgttgcataagtgaagaatgaaatgcatgaaaatcctagtgcaccaacaaccttacaaagagatcttatgaagcttgggttttgaaaaacacttctctttgaggttttcttcttcttcatgatttctctttgccttgatttgtctttgtgattatcattttggaaatcgtcttgcctaatcacacttgaaataaaatcattagttctaaatcttggtttgttatcatcaaaaccgagattaaccaaatcttggtttcataataaggtactttttctaataaatcaaggggtgatggaaaatatgaaggggatagattcattggatgtgtgttgtcttatctacttatcatcagaaggtactttttccaataactctaggggtgatggaaatactcggagatacttatagcaattattataggtgtcaagaaaaagaggggactctttctttgctgtaaaagatagagagaaggtgaatagtgttgatcattcagactgaaagaactgttaaacgggatatagttacaaccgcatgaaaggtctgagctgatcaattttctatcacctaatcaacatgtattcgtttggaggttgtaggatatgagaggaattgatccctccatcgtagttcattagcttaatgtggatcagaattgttcaccaatctactaaggtattagaagtaatcatttgagaagtggaaaatggtcaatcaagaagttgaggagattattagaagttaggtttatttgagaagttaagtattatagttggttagccaaatatgagaaatggcgtatgtgcatggattatacagatttgaataaagcctgtcatttgattataccctaaataaacatccaaattgggaagggccatactacatgtgtgaggaaattggggatagagcttgtcggctccaaactttagatagataacagttggggcatccttagaatattttgaaccttaaaaagtacttttagttattttgatgcttcttttatgaacccattttgataatttcctatggtatctagtagattgtgtgatgtaggacaaccctaggatggttgcctacactcaagggtaggtggactagggttttatttttaggtgtaagaagaggaataaagaataaattttatggtagagaaaaatataagataagaaataaagaaaaagaaaaaacaacgaagaaaagattaaaaaccttagagtctcactaaagctttctaggagtctcacttagaagaaaatcaatggagtctcaccattgagggttgcaaccttgcaatgaaagaaaacataatattattaatatcaatcatccttttgatttacattgattagcctatttataggcttctctaagaaatccaaaatctactaggattctaataacctattatgattctaattctaattataacattcaaagtctactaggactctaataacctattatgactcaaattctaattatattataactcaactaactaatcctaattagactccaacaaataccaatcctacttcaattctaattaatataaatcctacttaaagtttacttaggtcttccatttcctccttgaatgaactttaaaaggttttcccccatcattgtgtattcaatataatatatttttatgctcaacattcaaggtttatactataatatggagtcaacagtaaagacctgtgtgaatgttatatagttacagatgggaaagctgtaagatgtaaatgcctaacaatgcttgaaaagatgagcacttagttgagagtgaagatgtaaagtttaacttatggcaatattacttaatcaaaagtaaaatgtagcaaccttgattaaagctatttctcacccctaacaaccattaaattgtatcaaaataccatatctataaccgtactttcaatttgcaaaattttggcaatcttcctctatacacctttcactagtccccagcagcagcaacaactttaccattcctggaaccactttctgacttgtcagcttgttccacttcttcatctgaaggaggaatgccatattttactcgacattccccatagccaatgtcatacctaatgtctctatctgtcctcatttgggacttaagttgagctatagatttggattgcaattcttgaagtgcatggctcttccccttgggatgacttgatgccagcttcttctaactcatacttaagttttttattcctctccgacaacttggaaagatgactgactgcttaatcatgatttttcttcaaattatcaagttcattcattactttttccaacttagtggcctcaccttctagcttcaatagcacctctttcaactcactaccctttgccaagactcttcttagctttaggaattgaaggtcatggtcagtcagtttccctactatgcccgtgaaaatggatagcaattgcattagcattagagaggggttagttatgaaagtgtgtttacctaagtaaaggcaagtaaaaaaagttctctcatctatagccattttttttttttgatttttgagagtggtggtggaaagagttttgaggcgttctctatttccattatttaggctaagggggaaagcggggttttcctaggaatatgaactaagaatggttgcaaaagttcctcataaacattctagtggccaagatctagattgggggttgcgatgacaggccttagttgttgggccaatggcctacagatcaactattgtatgcttctgttcattcattgcataggcatgctgaaggttcgttttctcaattactgctacatcaaaattaacctcttcaacacctttgcttgcaacctcttgatgactaggtgatgcttcagcaggatttcttttttttttttttttcccctataacctgatgatgacttggctaagaacaaccttttgttgtgttctttctcttcttgctcctttgaggaacattgccgagtcacttgccggtaaggatggtaggatatattttgtcatttcgaataaattagtattggaggaggggaagtatgcatttcttgatggcgccttgaattcagggaataatttgtttatagtggcaagggggttcgtccatgcatagatggtccaaataggcacttgggaaattgaagactatcttgttcactagtctcctccttaatagccagtatttcttgtggctgggtttttctaatgtcctcactaatattgacatcttcttagaagatagcaagtaattgaatttgtcgcaatcatcactatcactaataggtattgtgagtaagaagataaaagtgagttgtaattagcaagactacccatcaacttggccaaaactctttggaacatcccaaagctttagttcatcttgggagtcaagtcccaattccctcaaaccctcatataaccactcttacaacctttgttgtagttaggcatattaagcactatggaatatgattttcaaaggggagaaaggaagtatgtattttctttttcggtttaagttatgtttggttcttagaaaatttgagggaaaaatgcaagggaaagaaagtagaaggaaagaagaaatgaagaaaaataaaaaaatagatttaaagttaataaattatttctatatgctatttcaaaatgatttcacttattttaactctttaatataaagattaaataatttgaaaatgcacaagttttaaccaagtttaattatatttgattttcttttatatttttatagtacaaccaaacacaagacaataatttttcttaatttttttccttctttaatactttctagaaccaaacataaccttaagcaacacattgggaaagccaaggtctagtctgtgaaggtgattaatgactagatagctcatcaaacttcttattacataagcatggacctgataggagtcaagcttaaagaagtagaagaagagaaaaaccaaaaggtgaaatgggatccttagccctacctcaaagtgagaataatgaagacccagattttactaagtatagcaaaatcgttcttcattatggggaatgactcaaaccccacatcagagtttactgcataaaggtgcctaaacatctttcaccagtgtttaggtttctttgtgttgccattgcagtagtaaatggtaatggagatgaaaacaagcaaaggaaaattgagtcatacaggagagagaggagctagacattgtaaagatcttgaaagtattcttaaaaagtggaaacactgagggagacgatctgccagaaggcagacatttgagggccgtttgtttgccactgtttgatactttttatgtattaaattcttgaggggtgtgccttttcatatcgcaataaatgcacccattatgcaccatcggttagtgttgacatgtgcagtgtaatatggaagttcacatggtgtatgtaagtgatactatgtgcaacaaccacccaaaattactagtggggggaatagtgtggtaccccttttgaaatcttatgttgattgaagtctgagttgattgtgaggtcattccaagttgttggatttgtaactgcctccatcggagacagcattacaagggccaattgttataacatgggattgccccatgctcccaaaaataagtcttgatgcttcatgttactaaatgtaagcaaaagttggatacgtgaccttcaaggttgagtctatataagaataggtatgaaaaggaaagtgattgttgaaaaccaagttactgctattatttatcatctcttgactttgttttgtgcaggctccactcagctgggcatttgctagacat

SEQ ID NO: 12828 - DNA, 2316 bp, Vitis vinifera
  Intron number 4 from transcript GSVIVT01019374001 (locus G SVIVG01019374001) derived from phytozome v7.0 (chr-ID chr1 5; pos 156116 to 158431 reverse strand)
actggtttttgcaaaacaaaggtatgcaatttcctgttgattcacatttcagtatatttgggttgaaaatcttgcaaatgtttaaggataataggtagagtgtatcatttgtttgaatggaccatttcttaagtctttagttcttaaaacattcaacaaacttcaactagcctgtttttggttgaatctgtcaaaccaggagttaaataagttagtttcataaacattgtcctacaatacatcataattaagagaatgataagaagatgaaacttggatgaatcatgaatcagttagtcgaagagaaacatgagtagcttattcatatgaaagtttcaaactgctctgccatgctcatgggagatttatgtcaacttgccaaggacatggcgcagaatttgctagcatcagatttgttcaatgagctagaccctgaaggtcctatacttcttatcctcacaagtagcccattcaatagcaagtggatgcttatccctaataaagagctgaatcctgaatgcttctgaaagttagccaacttcctgaagatcgtcatcaacaccaaattgggtataaggcaatcctaattatttatagtagctagaatagagaagcagacgagattccaaccataaggaacaggtgctacatgagaatcccatccattgctattaatgtcatattatttttgtagtttttctttctccagaggctattgactttccccagtatggtttaaacctctcctttgcctggtttatatctcctaaaaagggcagcatcattttttttccttttcttttttcccttttggtccttaaggggatttgaaccttgaacttctataccattgccactgagaaaagggcaccaccactggaaacatcttgaaggcacatatcttgtttgggcactaccacctctagagctagtcaccacagaccaaccacttttgattgtacaagttatatgttttatcaccactttgtggataatcattagatctgaatattttagatgcatgtgactcgattgttcaaatactatctcttaaaaaaaggcattcttttaccactttacaaagaaaatattttcttgctaaggaacaatgtttaggagttgtccacacataaaatcataattactgatatgagctgtttctacaaatttttgttgcaatagaagcagaacttatgttgattattcaagagtcaaagttgatttgttatatatatatataagaagatatcaatgaacttctatgaaatggttttatgggattctgccaattgataagtccattccaattctatcaatctatagcaccatcttggctgccttgcatttttttgggtagtgagtggcaaatttgaaggacattatgatacaattttttatgaaaattgtctttcaaaaaaaaaaaaaaaaaaaaaaagaaaattaaaaaataataatacatatgatgtagcacctggagattgttttgatccttctttctttctgggattggggtggcgtggtggggggcagtttggtgttggtgacacatcattatcatgtaattagatgccaatatcagaaatttggaagaatccaaattaatgtgattctagctctaaccattttgttttgggacctctataattaacttgtatctagcacctagtcatatctttattttggcaatttgagttgaatatttcataactggtaattttgttggtagatatgatggtaatttttaataggtaataagcattgagtagtagtaaattctgtggtgtaatgcaataaaatgagtttgtgcatatatggagaaagaagcttttaattattcctcttaccatttctctcctaatgtcaaaaatatttttcttgagtattttacttttccctttttcatcttttgttggttgtttccaaacccagaagaatcataattgtgtcagattttgatagctgaactatgcaacataatctgttaattatcaacagctatcgaaatgttcggaaattgcataaaaagttagggaagtacttgagttaaaagtctggtctcaagcatgcttattatctatctatctatctatctatatatatatatatatatatatatatatatatatatatatatatattaatttttcttctagcagagacaaaatatttatgtttagcttttctgttaccataagaaaagtggtctctcaaatatttttttcatggtgtgcaatttatgttaacatttgatgtaatatttgcatctaatgacatgttgtagataccatctgaggttactgctgccttggagcctat

SEQ ID NO: 12829 - DNA, 5229 bp, Vitis vinifera
  Intron number 6 from transcript GSVIVT01036685001 (locus G SVIVG01036685001) derived from phytozome v7.0 (chr-ID chr1 9; pos 23880197 to 23885425)
gataagtgccttctcagctgtcattgatcgacttggtatttggtttttcctttatctcctgcatgttttgtttgaatttaaccaaataaacttgaaaggagattggttagttccttaacttgctactaagtgaacagattttctaggtccatcctataagtgatctttgtggagaaggttgaaacataaaatcaagtacaacatatacagaaaacatggatctgtttttcactggataattgagatacttatcattctgaacattaaattgcattaatattgtcctgggacaaacttacttcagttaatgttttttgagttgtcaattttcttattccattttgctcatccatactagctagctgtctgcaatatagtgaaggagaaagctgtttctcttagctctcatttgttgataatagctgtagtgcaggaaaaaattatctccaataacgagtatgcacttttgcagtcagtgaatgatctgatgttatgtgaattctaaatgaaagattgattttcctttttgatgcttagcagtattacatgagtggaagtgtcttgcttgtatcaatatctatatttaacaggaaaaatactgctttttctgcttgagcttcttgaccttttaatattggatgtaactaatgcatctttgttatcatcgcacatatgccttatggtttatatttccatgttattcttttccatgctctttaatttcacactcactagtagtataaaagagaaaagtaaaagaacattgacttcatttccagtaaggtagatgaatcaggacctgtgatacccggatccttcaatttcacccaacatatgcttgttgacatgagatgacacgggggtgggtatgggattcttctttttttttttttgataggaaacgacaaaggaatatattgataaaaaggatgtacaagagaaggatgaggaatcctcccaccaaagaaaaacaaaactacaaggaatcaaatataagaaaatacaaagtaaaaacaagcaaactctttattttatgggattcttcttgggcactcctattttatttttgggtgtggctatttgattttttcattaatattcttttattctttgaactttcttactaataattacattaaagaaaaagaagagttagctgaaaagtgaatttttgttggaatatttaggaatcagaggaaaaaaagggaatagagggaaaagatgagggcttttaaataggatatattcacttccagtttatttttaattaaaattttttgtgtcccattacctgtgcctattttttggatcctttttagtcaagtcgccatatcctaaaatttgagttgtaaaggattagacacctagatacatgcccacatccaacactcatacccaaacccatgcaacatagattagggcaagtctgggtttcaaactagttgcagaagccacctcaagagtcatggtaattggtcaatatttggattgcactctaagttgactcaatacaacttatagacacaataattatctgtttgacccaaaaatgaatcttctcttagatccagttctgaagccaacctgtttaaattggagaagccaagtccatctgcatgttttaattatatatatatatatatatatatatatatatatatataattgaagtaggctttttcttatcaggtatagcaagcttgtgaggtggaataggaaaagtggatgaaggaaaaccccttgaaagaatggatgaatctttgaggtgaaagaaaatttgagactaaaaatggaggactcttttacaatctctatttgtatggatggctaaatctgtgatggataagagagtcccttttggatttaattgataaattggagggaagttgagatgaggctttcatggctttcttttcttttgtctcttctctagatgcaactcatatactttgcaaatacatgtgatatacacccctttttttagtatattttccttataaaagatatagttttagattgtttaggttctttgtttggggaatctaatatagaaaatcattgtaagctgcactgtcaagatgattatctagcattatagtgagaacatatccctttaccagtgaggtctgaatgaagatacttggcttaagggagtgtgggcaactgaggggagcacattgagggtcatagaagtgacagggtcacgaagagccctatagacaacacttttgagtctatactttatagctgcctcccttgaaggatagttctgaacatgttctggatctttaacttagtatttccttgggggaaatctctatcggggtctgcaaaaatttcttcttctaaagtttttcttgaggttctacaaataaatctccagaagttcccaaccaaaaagtaaaataaaataaaaaatctatgggagttcttttctttgtgaggttaggcctttctttgaagaaggttagtactaggtgttcttttacaagattctttttttctgttaggattaggatgaatattatcaatcaacaaacaccttatgcatattcatggcagattatgagtacattactcacatgttacaatttgattcattcatcgattcttcttaaaacactgagaccataaaggtggcttccactggttgtgtaatggacacataactagttccattagctttagatttgaccatgaaatcaagactctcaagccatcccacctttgattgaggtggaaattttccaacagctcaattgagaaaatacattgtgctctaggatttcttctttgattatgttcttttggtagtccttgtatacttcttgtgcaagtggctaatgcatgtgggttgggtcccctttttattatgctcctttaaatatattatttttgaatataagaaaaggatgaaggtgttattagactcattttatatacagtgtctggtggggcctgatgcagttcatgcatattgcccagtggaccccacttcaatagtttctgtcatgtcaaattgcatagtgatctttacattatcatttttcatctttccaaaggcctcttggtcaccaccacatgcttggcctttaccatgagtcattatggatcaaggaactattaggccatgttcactttattattgacctgtgaatatagatgttcaaatgattatacatataaagggggtagcaacaagttaaaagcttcatgtcttaactacctgattcatgacgtgaatcctattttgctgcttagctctattgttgtcatatcttcaattagatcataggccatgattttttcttcttacccaccttggccaacattttttaggccttactcttttccttgttgctcctccaacttgactcatattattcttctttactagagcagttagttgaacatgaactgaacatcttaggtgagtatatctcctgttgtcctccatgggggttacctataccttctcatgaataagtacattatgctcattttgtagagatgttttttgttcactgtagagacttttgtgccataaagcatggtgagctttatagctgttgtattatttcttttattttagttttataggaatttcacacagcaatctagaagctttaactacttctcagggctgggcttggtatggaaagcgctgattgcaattggaaggagcaaaaaggaaaaaggaactagtattctcgataataactctaatggagataaaaaaaacttttacttaagcttgagctctaggttggctacctgaaaattcatttcttatagagcttaggatcctcttgcatccaaataagcagagaaaggttttttcatcttctttttttctttcacaataatgatgtttgacttttgtaggtttgtgattgactgttgaactattatttgatgatatgcacaatatgtaatataattaaatgaaaaaatctcttgaaatattgttatatagttagttatagaaagtattagttctggagctttgaatagagttgggtcctttaaaaaatactaaatattaaaggttagtttataaacggaataccataaggcagcctattgtttacatgtgtttttttaggaactattagatattttccttttaatggccactactttcatggggattcatagttggttaactcaaatggatttgtagactaaagagggctttggctgtgtaggaatttaaacattttatccttcttgatcttgtttctttgtaatgccactatgttattgctttcattgtatttgtagttttcatgtggcttttcttctttctgcaatgacttgtttgtccttgccttttatatcattgttctccaaaataatttatgttccccatgttaagctctaccaatttgacaaagttttaaaaggcgcaaggtgcacctaaggtgcaaaagtctcctacaacttaggtgcaaggagcaacacaaggcacacgcctaagtgaagtgaaatgcaacctgtgatgcatattaattttataaaatatgattcaaaatctaatccaataagtaaaaaatttaagattccaaacatttaaaagaaatattcaataaaaaagtaatgaaattatataaatttcaatatataatttgaaatttcaagaataaaagtgtttaaaaaggaagagcaaagtagataaggcatacctcttcaataaggcgcagcatgtcttggcaagcgaggtgctataactaaggagtggttgtaccttgagcctaggtgcgctttaagtgtgccttttataactatgtttgacccaaaaggttaaaccattaggaccaataaagtttatcaggtttctcaagctagttcagaaaccctatatcctgatatttttattatgtcatgaatcggagctcttctgtgtaaactttggccatgtacaatgtttgttctgctttcctgccaatccaaatcctcaagaattttaagtacatattacactatgtatgtgtgtatttcatggtttactggctttgtttctgcacactagcattttgatgtagtcagtaccagttcctggtttagtaatcctacatgacttttaatgctttgttggttagatgtctttgaattgaataagtacctaccatgattactgttttgatatctcccatgtatgcaggtgaattgaataaatacctaccatgattactgttttgatacctcccatgtatgcaggtgaatttg

SEQ ID NO: 12830 - DNA, 19184 bp, Vitis vinifera
  Intron number 12 from transcript GSVIVT01030869001 (locus GSVIVG01030869001) derived from phytozome v7.0 (chr-ID chr 14; pos 18082860 to 18102043)
acaaagcagcagagctggcagtatcaagcttgcaggtattcctttttctgttttggttttttatttagtaattttcaccatcaatacaactgcttgagtgctgaaagtctcctttttcaattttttttttttaaattttaatttattatttatttatttttatttttttacctttgacttatttataggtgtttaagtttggatcattcttgccagccactaaaaataacctgatgccaaagagcatgtttccttagagaaatcttctcaaaccccaaacccccttccaccttagactcgcacactaggtcccaactaatgagatggtctcacttgtgctcctcagtgacgtaggatggatagaagcccaatgtcctatattgacagattaataacattggttaggccttatatgtgaggctatctcttagcctccattagcttaagctcttgatagcgtatgtggtcctacatcatttggtatcagagtgtgaggtttagcctagattaccctgtacgtgttgacatggccatcaacaattaagttagggtgtctaacataaggacaaatggaaatccagtgtcccacatcggctaattactaatattgattggatctcatatatggggctaactctaccccccattaactgaagcttttgggactgcatgtggtattgcatcatctagcccttgactaaagaaatctctttgcattttcttgatctttaacaccactgaagaaggtatcttaaaaagggagagaaaataggttagggatatgagacaaacatgattggataagatcataagagttatccttccacctaatgacaaaaagactttttcccatccatctaatttttgtgaaattttctcaatcatcggattctagaaaacacatgcctttgagtttctcctagtgggagacccagacaggggagaggccaaatcaaagaccttgcaatcaagcaacaaggctaacctagtgatttgatcctgactcatgttgatgctaaagatagtactcttgccaacattgatattaagtccaaatatgttcctaaaaactaacaaaattagcttaagattttgcaaatcttgcaacaagggaaagtgctagctttttgtatattcactttcacttggcaattactcaaccaaatttcatgtttgaatggacctacatatgcagttggaattttgaaacaattcaatgtggctaagttcaacttttaggggtcaatcgaaaggaataaataaaaagaaaaattattgagaatcatatatattttttttacttgtcaaatgtgttgttatactaacagaggataattgaagatagtatatttctataggggggagactcactttgatttgaagcaccttgtctagcttgcttatctacttttatgtcgtcgtttcagatgtcgaggatagtgagtttgaagtttgaacagatcaaaaggacttcctttggggtggtggatttttagaaaaaaagcctcattaggctattgtttgtttagataagtggaaggagggcctgggagttaggcgtctctcgtcactcaacaaggctcttctttgtaacggaattggtgttttgttacgataagggaggttttttggaggtaggttgtttgtgggaaatatggggaggatgcaggggattggtcttctaaggaagtgagagatgtgcacgaggttgtgttatggaaggccataaggagactgggggagttcattaatagtagagtctccttctctattggtaatgggaggagggtaaaatttgaaaggatatttaacatcggggtgagcctttgagagtttcttttcctttcttattttccataggtagctcaaaagaggcatgggtggtggatatgtggactcaatcaaatgagagatgtgtttggacccctaggtactctaggcgtttaaatgatttgcagattgaggttttggagggtttcttgtttaggctgcaaggtaaggtggttattggagacataaaggataatgtgatttggttgaagacaaaaggtggaactttctctgttaagtctttttactttattttagagcttaagagattagtgctttttccaatatgggttgtttgaaatgtgtgggttccttctgaggcaagttttttttgcttaagagacatcttggggaaaaactttgacactaggtcaactttagagtagaggatgtatattgaccacattttgctacattgtgacaaggtgaggattttatgagtgcttttgttgtccctttttggtgtttattgggtgttgccttcttatgtgaaagagactttgctagggtggtgtgactcctttattggaaggaaacggaaaaagtatggggctttttttggacaatttggaaggagagaaatagaagatcctttgataatgaagagcttttggaccaagggctaaaaaccaggtttccttataacttgaagtattggaccaagttgtatatgggtgaaggaccattgtccttattcgacttcattgattggtcgggttcttgttgagggaaggagtagttttttgtttcccttgccctttttggtgccttttggtgagtgttgcatcatcctgtgtactttggtgtgcctttttagcgctttattaattttttttttttttgataagtactttagcgctttattaatattatttgcatttacctattaagataaaaggataagaggattgacttgaaatttggaacctacaaggtattggtaacattgcaggatgacattggattatgatatttaaggcatggctccaagttgcaattttagtcattaatttggaagggatggtagattgtgacatcttggattggtattggtgacatgaaaattatattataatagttaaaaagttcaaaaattctaaaaaaaaggagaatttatagaaaaataaatacagttagatgggcttcaaaaattaataaaaacatatatcacaattgaaattgtttaaataatgataaaaacacacatttagtttggtatgtgataatactaaaaattcaaaattttattgtttttaagtacacattttttttttttaatttttttttgctaaaaaacacataaattgaaagtttagagaaaaaaaaaaaaagcgttcctctatacctttgaagtctaggattacaacatatatatgggactactcttgagtacatgcaaaaggaaaaaaaaaatacaactgtgcaaataatcactacttaccctaaaaaaaaaaaatttctaaattagaaacattgacttagcttattctatcccctaatttgctccactaaatcaaatcacaacatcccatttatagtactaaatcaaatctcccacatattttatgattttccacactccccctcaagttagttttaagatgtttaacattcctagcttttttactagaacttcaaataattgcttttgaaggcttctagttaggatatctgctagctgtttttctttaggaatatggcatatagactaaggtggtgtttgtttttttggctttttgctgaaaaccatttagttttagaatttaggttgtttgtttttttactttttcatgactttttataaactttttactaaatagaaaaagccagaatatgtggctttttctaaatagaaaaaataacactatggttttttttactttttaatacttaatagaaataaaatactacaaaaacaaacaacctaatatttaatactattaagtattaaggttctatttagaattaagtaaaaaaacaaacgccacctaagcctccctcaagtctttcctcaatgaaatgattatccacttcaacatgcttagttctatcatgttgaactggattgtgggctatgttaattgttgacttattgtcacagtataatttcataggtttcttataaggaatccttaattcttctaatatcctctttaaccaaatgattttacaaattccatgagcaacgacttgaaacttagcttttgcaccacttcaagctacaacattttgtttcgtgtttctccaagttattaaattccttccaacaaaggtgtgcaataacttgaagttgatcttctatgttctatcgttgttatctcctgcctaattagcgttagtatacgcctcaatctgcatatgcccttttttcttgaacattaatcctttcctcaggtttcctttcagatacttcaaaacttgatacacaacttcaaaacattctttaataggtgagtgcataaactaaccaaccataataaccgcaaatgctatatcaggacgtgtatgtgctaagtatatcagtttacccacaaacattgatagcgtcctttatccacacttgagcttaactctgtttgccccagtttcctattgggatccattggtgttttagttggtttacaacccaacattcctgtttgtttaagcaagtctagagtatattttcactgagaaacaaatataccacctcaagaccttgcaacttctatacccacttgcatcctactggtgtcttccctcttggcaaacttaccaaatctcaagttctattcatttcaagagctctcatttcttccatgattgcttttctttacttaggaacaactaaaacatcctatatagattttggaatctccacagaagacatgttagtggtaaagtctctaaaggaattagataacctatggtatgacacatatttagaaataggatgcatggcacatgatctagttcctttcctaagggcaatgataatatcaaggtcattagaagcattagtatttatatttgaagagagaacaagaactataccttcctaggtccttatgactagttttaacgcttggatagtggcaagagtgtgactttttggattaccttgattatttctcctccttgtgtagatactaagctcagtttgagattttgtctgtagtgattctcctcttatcaacaattcttcattgtttagtacaatagaacttggttgaggagttgaacttgaacttaagttttttgacccaacaggacccaaaccagaagaatgtgaaagactaggactcatattgtcatcaaatgttcacatgggtaaagacatttcccaaaaacattgtcatcaaatcttcctcaaccacactttccccttgaagagtgtttttggttaagtagggttgattttcaaagaaggttatatccatgctaacaaaaattttcctagagataagatcataacacttataccccttttttagatgtgaatatcccacaaaaatacactttagtgcatggggatcaagctcagttctatgtttttgatgaatattgaaataaatttgaaattttttttgctttccttaaaaattgtattagaatacaatatgtacatcctatttatacgcaattggggattggattccccttaaatctcttccataaatcaaggatcttattcacctatcatctattatcctataatctctcagataaatcatattttaccaaagaaagaaaaggaaagaaataaatacaaaattatttagaatttgccaacactttatacacaatatattttgctatatttagaatttgccagcactccttctcaagctagagaatacatgttgttcattcctagcttgcacgtaattatttgaaactggtgactagtcgatccattggtcaacacatctataagctgccgttttgttgtaatcaccatcaagtttttctttgacgaagtgttaatctacttctacatgctttgtttgatcataatgtactaaattgtgagcaatattgattgtcgatttcttgtcacagtataactttattgttcatggcaatggtaagtttacccatatgtgaacgtttgattaagagtgtatgatctcttggctttatcgagactctatgttattcatagcttttgcaaatctttcaaaccatgcttgagtatattgtttaaggtcataaactgccctttgttagtttgtacacattgtttgtttttgaagtctccattgaaactcgatagtgtttccatatacatttcttattctagatcaccatgcaagaatgcattcttaacatcaagttgctgcaaagaccaaccaaagttagttgccaaggatagtaatataccaatggtattcatctttgctattaaagtaaatgtttcttagtagtctaccccataagtttgtgtatacccctttgccacaacctagccttatatttcttcaatgtctcgttagctctatatttaacagtgaacacccatttacatcaaactggtttttttccctttggtgattcaactatttcccaagtttggttttttttttaagagctaacatctcctcttccatggctttcctccaattctcacttctaagtacttcttgaactgtttgagggatttcaataggagttaattgggtaaggaaggctctatgtgatggggataggttttcaaatgaaataaaattggagatcgggtgttgagtgcattttatggtagctttcctaagggcaaattggtaaatggagatcaggaaactcttttgaatcttcgttttgaacaaattgatcccgaggttatggtgagggtaacaaatttgaagcaggagaaatgacactaaaaatagaacaaatggagtttgtgtgtttattacttggcttaggtttagattgttgagcttgcattaaattagattgggactattttcacctaaagtaaacctctaatggcatgtcagtcgcattaactcccccttgaccatttttgatgagggttcttgactaggtgacaaggaggtagaacctataggtgagccttaggtgaaagaggcatggatttagaaagtctaggcaaatcaagcaacccataagagagaaacttatcttcacctaagatttccccccaaaaacaagtattaggaaaaaatgattgattttagcaaaagtgacattcatttttgagttggagagtatcccacaaacatgcattttaaaactcagggatcaagtttgttacaatttagaggatagacatggacaaacgacacataactaacaactttgggaggaagtttactgaagttattgaaatgtggaaaatttttgagtggttttatcttcaagcacttttggggatagtcggctaatttaatgagctacagttaagacaacctctccctaatatgatttaggcatatttgtctgaaaaagtaaggcttgagtgattttcaatagatgtttatttttttgttcagccacacctctttctgtggggaattaatacatgaaaattggtgtattatcccttctttttcaagaaaagaagataacacctgattaaagtgctctttcccattatatgatctaatggctttaattttaactccaaactatgtgctaaccattttgggaaagacaaaaaacacaaaactgtcatttgacttgtttttcatgaggcataaccaattccctagtacaatcatcgataaaggacacaaaccacattgctccaaaaagacttgggactcaagagggatccaattatcggtatgaattaacaagaaaaggaatattgattttgtattacttaaaggaaacagaacatgatgatatttagctaattgacaaacctcataatgaaaaccgttaacatccgatttattgaataatataggaaacatattttttagcaaagaagaagatggatgccctaaacgaagatgatgtgtatgaagcaataggcttatccattgaagttagaaggctacgaagcctctcaatctcttctttgttcagtctaccatcatttgaatcattagaagttaagatttctagttgggaattctctttagattgagcaatatgggcttgaccatttcactatctagattagcatatcgatttctattccctctaccaaatgattgcagctttccatggagtttccaacaagtctccttggtatgccttggttttttgcaatatacacaccacaaggcatttttgttgattggtgatctagacacttcacttcctccacaattgttgtttaatagtgtggagtttggcttcgtggtgacaagacctggactttctgttgttggagtgtcaagcatagcattccttccttcttctgctcttataatggagaggacttcatttaggtgagggagatcttcctttccaaggacttgaaccttgacttgatcatattccacattaagacccaccaaaaattcaaatatcctatcactttgaacaaatttgagcatcatggcagcatcttcgctgcacttcatcttaatattctgatagtaatctaattccaaccataagcttttcatgatattattgtatttggtaacaacaaaagtatcttgcttggtagcaccaatcttggtctttattttgtggatgtggggagcatccctcactttcgagtatgtttgcctaatagtctcccaaatatctctagtcgtcgtcaagaacatgcatgtgccgctggtctctggttgcattgaattccacaaccatgacattatcattgaatcctcttcatctcatgcaatgaactttggatcgtcttcacttggaacaggtccaattagatgattcagttttccttttcccttcaaaagtgttcgcactacttgagccacaccaaataattgcgaccattgagtttgaatggattttgcagattttaatattttgtagaagggttatcgctagtcaagttgggagcaaagtttggagatcggatgatttatgatctatcgaacatattggagcaaatcagaaataattctgtaaatttgagaggggggaaaattttatgaggtcatataaaattcaatggaaggagatgtgcatcaacaatttctgatgctagcaatgaaggtcatataaatgctgtgaaattcagcagcaattaaggctaagaaaagaaaaaacttaggatgcaaaagagagtcttaactctgataccatgaaataaatttgaaataaattctactttcgttaaaaattgtattagaatacgatatgtacatcctatttatacactattggggattagattcccctaaaatatctctcataaattagggatcttattcacctaccacgtattatcatataatctctcacataaatcatattttacttaagaaagaaaaaggaaagaaataaatataaaattatttagaatctaccagcactttatatatattctacggtatttagaatctgcccgcaaatatgaacaaatgttgtacatccaaaaattttagaggaattgaagaaaatatttttgaatgaggataaaccttagaaatatgattaagaggggttttaaaccaaaattttagtcggcattctgttaattagataagaagttgtaagtacaacttctccctaaaattttttaagaaccctcgatgtaaacatgatggctttagcaacctctattaagtgacagtttttcctcttcgcaatcccattttgtcatgaggtatcaaaacaactagattgatgtatgatcccatttgtaagtaaataatttctaagaatagagttaaaatattcctttccattatcaatttgaagtacttggatttgagtttgaaattgtgtttttatcattgtatggaaaatttaaaaaaccctttttgcctatgatttttcctttaataaataaatctaacaaactctagtgtggtcgtctatgaaagtgataaaccacctagttccggttaaggtcaccatgcatgagggtccccaaatgtcagtatttatcaatgcaaaagtcctagattctttataaggtcatgtaggaaagtagacatgatgatgtttaaatagttggcatacctcacattgaaacattaaaggatttttgttcttaaacaaagatggagacaattgttttaaatatgaaaaactaggatgatctaacctacggttccatgacattatttgatgttcaatagaggaagaaaaagcatcatgacttggaacttgaggttatctactcttgataggatcctcaatatggtaataaagtccatcaatgttcttagcattgccaattgtcctccctgagcatgggtcttgaaattcacaattagatggaaaaaatttagcaacacaattcatgtcccttgttagtttactaatagaaagaagattgcatgacaaattaaggacatgaagaatgactttagaagtcaaattttttgaaatagggactgaaccttccctacaacggatgaaaatgatccatccacaattttaattttttggttacctagacaaggagattatatcaaaaacaaatttaacaagctcgtcatatgatcagaagcactataatctatgatccatgatgtaaaattttcagaatgaacacttaaagcactaagagatttacctgtttgtgctgaagaatatgatgataaagagttagaagacgaagactgattgaataacctatataggtgttccagttcttctttactgaatggagatgcttcagttatggttttggactctcagttgcagtctgcatgccttggccatttctctcatgaaatctgccactgtttttcagattttgtgtcttcccatgcagcttccagcaggtgtatctggtgtgcctttgtttgttacaatgatcacaccttattttccctttacctcatgctttctttgagatcccttgatcaccagcattggccgcagcactggcagcagcttcaattgcaacaagtgctgagttctcctgaatgattgaagaagagcctcccatcatgactgatttgtggctttcttcctttcgaacctcaacaaacacttcttggatagagggtaagggctctttacctaggactcatctacggacttcatctaattctttattcaatccagcaagggagttaaacactcgttccttctctatcatcttaaaacaggcactgtctgcagcacatgcccattcaaatccataaaataagtcccattcttgccaaagacctttcaaaatgttgtaatatttagtcacaccttgatctccttactttatctcacagatctttgatttcgacttaaagatttgtgctgaattcctaagatcagagtaagtttccataactgcttcctagagctcttttgctgttggtaaaaacatgttaagtctgacctatcttcggctccatataattcactaacttggccatgatcatggaattttttgagtcccatgtttgaaaacttgggtcatcctcttttggggcctttgttgtaccagtcaaatatcctagttcccctttcccatgaataaacaatttaatggactaagaccatctaagaaaattcagtccatatagtttatgagtggtgatgtgcagtgaaggattatcactggttccatgaggtgagacttgatatggaggcattgatacctattatgaagaatatctaaaattttcctcctttctgattcttgacatcaaatcccccaaccagcagcctcatagttccagaaaaaaaaaaaaaaataaataaaaaaaaaaaaaaaaaaaaattctgatgcttgaaaccaaaaaataaatgtatcacttccagtactaaaaataaatgtatcacttccagtaggaaattgactctgataccatgaaagtttagagaaaaaaatcattcctccatctatatctttgaagtttaggattacaacacacatgtatatatatatatatatatatatgttgaatataatgtatttatagtatattatctttccttgttaatataggtcacatgtatggtagttaggactcctagccttgtatatatatatatctctcaattgtaagtagagattacatgaatgagaattaaggtttttcttctttttctctctctcaacatggtatcagagccaaggaagaaaacctaattctttcctgtttctcgtgtcatcaactccgggaaaccttctggtgaccgtgtttctttccggtcaccttccccatctcccaatacttttcggtcagtcggatcgtagttagaaaccactcaccgccggcgaacttttccggcaaactttcccggcgacctatttttccgacaccgaccataccagaaggagtgcctggaggagatctccaacttttgtgaaggcaccggcaccacaagagcatccacgcgttggtaacgtgccattttccggccggcggctgcgtctcacgcgccggcgcgtgagggcgcgtcggcgcgtgagggcgcgtgaggaattttccggcgacgcgcctcctcctccagcctcgcctgacaccgacaagcatccctagctccctggttctcccatccgagccctgaacgtgcctcttttggagatttttgtctccgtcagccctccaaacagtctttccggtgaaggtcgggttactttttctccaccccaatccctgcacgtgccttgggaagtgtccttctacctttctggtgttaccacgccgcgatctgaggccgtctccctttttcggtggtgccacgccgcaatctgaagccgtattagggctctcttcgatccaaacatacttcattctccagataagtggatatggctactaaaacttccattttttcctctgtcatatctggatctcctatgattactttggagaaattggttggcagtgaaaattatctttcctggtctgcctctgttgaactttggtttatgggtcaaggatatgaggatcacttggttacccaagaggcaaatatccctgaggttgaccgcgtacagtggaggaagatagatgcacagttatgtagtgtattatggcaatcggttgatcccaagattcttcttcatcttcgggcctacaaaacttgttttaaattttggactcaggccaaaggattatacacgaatgatatccagcgtctttataaggtggcttctgctattgtccatatcagccaacaggacttggatctatctacttatattggtcagattgcctctcttaaggaggagttcttgactgtgatgcctcttactcctgatgttggggctcaacaaacacagcttgacaagttcttcatggttcttactcttattggcctccgtccggatcttgagcctgttcgcgatcagattcttggtagttcatcagttccgtccttggatgatgtgtttgctcgcctcctccgtatctcctccactcagactttgccatttgatagcacttcagattcttctgtgttagtttctcaaactagctctcgaggaggccgtagtggtacccgaggtagaggtcaacgtcctcattgcacctattgcaataaacttggccacactcgcgatcgttgctatcagttacatggacggcctcctcgcactgcccatgtggcccagtcctctgattctccgctgcctcagcctccgagctcttccgcatctcaggcttctgttgcctctgttgctcagcctggtaatgcctctgcctgccttacccacacatcttctcttggaccctggattctagattctggagcttctgatcacctatctggtaataaggatcttttctcctctattactactacctctgctttacctaatgtggtattagctaatggttctcaaactgtggctaaaggtattggtttggcccttcctctgccctctctacctctcacttctgtcctttatactcctgaatgtccttttaatcttatttccatcagcaaaatcactcgtactcttaattgctctattaccttttctgataaatttgtgaccttgcaggaccggagtacagggaagacgattggcataggacgtgagtctcaaggcctctatcacctcacctcagattcatctcctgcagtttgcatttccactgatgctcctctcctcattcacaatcgtctgggccaccctaatctctccaagttccagaagatggtccctcgtttttccactttgtcgtcgcttccgtgtgagtcatgtcagcttgggaaacatactcgtgtctcgttcccaaagcgtttgaataatcgggcaaagtctccttttgagtttgtccacactgatgtttggggtccttgtcggactgcgtctactttaggatttcagtattttgtcactttcattgatgactattctcgatgtacttggttatttttaatgaaaaatcgagctgagttattctctattttccagaaattttatgctgaaatccaaacccagttcaatatttctattcgtgtgttacgcagtgacaatgccagggaatatttttcagccccatttacttcgtttatgtctcatcatgggattcttcatcagtcttcttgtgctcatactcctcaacaaaatggggtagctgaacgcaagaatcgacatcttgttgagacagctggtactatcctcctccatagtaatgttccttttcgtttttggggggacgctgttcttaccgcttgttatttgattaatcgtatgccctcctctgtcttacacgatcagattcctcactcccttctcttccctgaccaaccactttatttccttcctcctcgtgtctttggttgtacttgctttgttcatattctcactcctggacaggacaagctttccgccaaagccatgaagtgcctcttcttgggatattctagacttcaaaagggttatcgttgttattcccttgaaactcatcgatactttatctccgctgatatcaccttctttgaggactcaccattcttttccaccacttctgagtcttttcctgtttctgaagtcttgcccattcccattgtctccccacctgatgctatgccccctcgaccacttcaggtttatcatcgtcgccctcgtgtcgttgctcctctcctttttgctgaggcacctgctgactcccttcctataccttcggcttcacttgccccggctctgccttcttctaatgacttacccattgctgttcggaaaggtactcgctctactcgtaatcctcatcctatttacaattttttgagttatcatcgattatcttcaccctattctgcttttgtttctgctatatcctctgtttctcttccaaagagcacccatgaagctctttcccatccaggctggcgacaggcaatggtggatgaaatggctgctctgcactctaatggcacttgggatcttgttgttttaccttctggtaaatctacagttggttgtcgttgggtctatgcagttaaggttggtcctgatggtcaggttgatcgccttaaggcccgcttagttgctaaaggctatactcaggtttatggttctgattatggtgacacattctcccctgttgccaagattgcttctgtccgtttgcttctctccatggctgctatgtgttcttggcctctttatcagttggatattaaaaatgccttccttcatggtgatcttgccgaggaagtttatatggagcaacctcctggttttgttgctcagggggagtctggtttagtgtgcaggttacgccgttctctatatggcttgaaacaatctcctcgagcatggtttagccgttttagttctgttgttcaagagtttggcatgcttcgtagtacaacagaccattcagttttctatcatcataactccttggggcagtgtatttatctggttgtttatgtggacgacatcgtcattacaggcagtgatcaggatggtattcagaaactaaagcaacatctttttatccactttcagaccaaagacttggggaaactcaagtatttcttgggaattgagatagctcaatccaattctggtgtggtcctttcccaaaggaagtatgctttagacatcctggaagaaaccggtatgttagactgtaaaccggtagacacacctatggatccgaatgtcaaacttgtaccaggacagggggagcctttaggagaccccgggagatatcgacggctcgtaggtaaattgaactatctcaccattactcgtccagacatttcttttcctgtgagtgttgttagtcaattcctacagtcaccatgtgatagccattgggatgccgtaatccgcattcttcgatatatcaaaagtacaccaggccaaggtgtattgtacgagaacagaggtcatactcaggttgttggttacacagatgcagattgggctggctcacccacagatagacgttccacttcagggtactgtgtttttattggaggtaatctaatatcttggaagagtaagaaacaagatgtagtggccagatctagcgctgaagctgagtatcgagctatggctttggcaacatgtgaactcatatggttgagacatcttcttcgggagttgagatttggaaaggatgaacagatgaaactcatctgtgataaccaggccgcattacatattgcatccaatccagtctttcatgaaaggaccaagcatattgaagttaactgtcatttcattagagagaagatcgcatcaggatgtgttgctacaagttttgttaattcaaatgatcaactagcagacatcttcactaaatctctcagaggtcctaggattaaatatatttgtaacaagcttggtgcatatgacgtatatgctccagcttgagggggagtgttgaatataatgtatttatagtatattatctttccttgttaatataggtcacatgtatggtagttaggactcctagccttgtatatatatatatctctcaattgtaagtagagattacatgaatgagaattaaggtttttcttctttttctctctctcaacaatatatatatatatatatatatatatatatatatatatatatatatatatatatatatagggctactcttgagtatatgcaagaggaaaaataaaaaaacaaaaactaaattagaaacattgattcagctgattctatcccccaatttactccactaaatcagatcacaaaatcccatttatagcattaaatcaaatctcccacatgttttatgattttacacataaatatataggcatttcacattggctttggaggttctacgagcttgacagaatggtccaacttgacaatggcttgatcttagtgtccataacttggctctatcggccaattcatttctgtaactgaaaaaaattgggtctcaaaatcatctcagtaatgatcgttccacatacaacttaggcaatactttgggccttgatttaaggtggtggttaagcaagggataaactctctgggaagttaaatcttatttttatcaaatttctcagttatcttgttggaccagaaaatgtggtaagtttggaccagaaatttctcagttataattcaatattgacaaacatagtcatgttttttatgcacaaagttcctggtgtctaattgctttcagctttgacttgtttgtgcaataaaatgaagcggagatcataaggcattaagatggttgttgaagaacatactaagacaagagtttgtatgtgtgtgcatgttgtggggcagaatggaagtgaaagttcctatagcttgcaaacccaggggttggttctgaagtattgttgtaaggttgccactgtataaattggtgtttatgttgccatcctgctgataaaccatattggaaattttataaccatatgtcaagggaggatttgcaaggggcagtttaggagctcagtgcttctgtaacgataaacaatatggttttcttctcctttgtttctctatgattgagaagtcatctaagtagaacatcattttctttgaagatttctagacctcaatgttaagcaagagtgtggatgaaggaatctcttgagtttttctagaagtctgttgaagtgtggtttgaggaaccttctcttagaagaatttacattcctagcaatgaaaaaaaggctcctgatgggatggggagggagtgttgctgactcttatatgaaaactactgaccattttatgaaacaacccactaatcagttgcttgtagttcttgaattgaaaatacaggagatccatgaattgaaaagattcaaaagaagcatttgagtggttctgagaaatgtctcaatgttgtctagttctgtctacggttcatgcactcagtttgtgtttttaggcagactagtaaatttctcattcctcatgggttgagatatctatggtgctatctatttggcctttcctatacctacttaagtaatattctcaccttagttgtgaggttcttgatggtctcgctgattcattgggatcttgagttcaaggacaaggttaaattgttgttctaaagccttggaggaggaaatagtttgattgatgacaatggctagggtggaatttttttctgacttattttattgtctttgtgcttctgttttctttatttcttcataactttcatggttaaaaatctgtgatgtgatgtaacactaaaagcaaaagcttttagcagttaggcagaaatgttcacaagatttcgaatgtgctttccttatataggtttaacattcaagtgtatggatgacatttaaaagaaatttaaaatcttggaattttattactaccttgacaaagatgtcaaacacactccaggcattacactcatgttgacttgctttcaacaaaaatctatttagagcatgatattaaggaccaatacatgtactatgatgtgctacaatcatcatctttatgttccttatccaaagcatgtttgggcccatctttcctaatatcctgtttcagcatttttgttagaacatgatacagacccatatcatattgtcaaaggttgtacatttatattccatagctcttgatagcctttcatctgaattcaacctggaggaaactagttgctggaacttcaagctgatctaaattctccttgagtgcctgaatgggataattactgcatagaatttgacagacaagaaccatgaatgctgaaattgtaaatatgaatttgggattttattccagaaacagattttgaactaaaaaacttgtgatcatattgttatcaatattttgcaggcgcttctgcagaggacattggctgact

SEQ ID NO: 12831 - DNA, 8698 bp, Vitis vinifera
  Intron number 2 from transcript GSVIVT01029054001 (locus G SVIVG01029054001) derived from phytozome v7.0 (chr-ID chr5 ; pos 11505538 to 11514235)
cccaggatagtcgatttgccctggagaattacaaagtaaaacttctgagtgattttaaatttgagtgctgcattgtactgttatgttatggttctccaatattcactgtttacttatttcaaatttacaatttcagttgcggtttaatgttatttcacactcgttattttacactctcattgacatgatttattgatcttggctgccgaggagtttcgttcttgagtatttttttgagatctcttttatttcttattagcatagcttctagaaataacatgcaagaaatcgtgtgcttatgttaggtgttctttgcttgatagctaacccaaaaaaaatgttctttgcttgagaagtagagcttaataacaaggatctattcagggtcatggctcattgtcagtgtggctgtcccactgttgcctgtttacttttaatccttgtttaacattagatgcttgtgttaaacatacattggttttgaaaatgactttctatcaatttaaaggtagttttaggtccagctaagtatgaaacaaattcttttttgttgaaaaagttcttgcatgctcaagaaagtttttattgtacaaattcttggacatctaagttcaaagatcggcatcaacattgattagtgattctagtttagagcctcttgaagtttttgtgttcttgcatttcctagatatacatgcatgcatgcatacatacattcatacatataggcatacatatatgcatacactatgtttcatgggtttgggtacgaatgtctaatgggggtatgtgtctcaatatataatctttcacaactcaaattttaggatatagggattggacaaaaaagggatccaaaaaagggacatgggtattgggatacgatatgataaaagaaaaatcaattaaaaataaattggaagtgaagatatcctttttaaaagttcccattttgtcctgtaatccctttttgtccttttatccttaaatattcttccaaaaattcactttttagctaactctttttctctaatgtaattattactaggaaaattgacataataaaaggatatcaatgaaaaaaatcaaacagccacatccaaagtaaaataggggtgtctgacaaggatcctatacccacaccaatatcatgtcgatgctggtaagttgggtgaaattgaagaatctggtaagttgggtgaaattgaagaatctgggtatcatagtgtgtgtgggcaaacaatgagaatataatgaaggtacaaaacatcatagaaatatagaccaccatggatctggataattctgtgtaaaaccagaaacctttaaaagagtgttggacaacttcattaatcttctaggctatcactattgctgactggtaatgtgtcttttctacaacaacacatgttgcattttctatacataagcatgtttgtgagatgtttgtagatggtatgtattttattttaaacttctatcttaacatccgatcctgttttagttagaagaaatgacagtaggaataggacatgtagaatacttcctctagaatctacaagcatcatagatttaaatctttactaatatcatttttatgttgtttattctctttggcttgcgggacctatcaaaaaaaaaattctctttggctttcggggtggagagtgccagaattttttatcctattttttgtaaatttgacatcagtgtacatttattctcaagtaagatcaatagaagaatagtttgccaaattcttgaggttgcaatatgttatttgtgaagggtggatcatattttatgtatgttgtggaaagattgatgctcatcgtagatttcattgattggttggggttggtttgagggaaggagtggttttttgtttcctcttccttttttttttggcgctttttggctgccattgtatacatcatgtgtactttggtgtgccctttttggcgttttaatacaaatctcatttactgataaaaaaaaacattttatgcatgttgtgtttctttaactaattatcgaattagataaatattttctcttttttaccttttttttttaaactataataacatccaaaagtgggagtaatatttattatattatgggttttgttttcctttttatcctttagaggggatcaataatgtttttcttgcctcatctttttttttctttcaaacttttttggtgataaatgctctatatctttgtgtcactgacttactgcctcacatttcatgtgacgttaagagtcattgctctattatgcatgttcttaattttgatggattgaaggaggttgatagcggcgccctttaaagatatatataaaaggcatgcaatggatgtttcaggcccatgccttaatttgacacatattggaatgtggttgccacttaaaattttgcataattgagtttagttgcaatcaagcctttgctatcaattctatagaggttggtctagagactttttgtgcagcacttgatgctttttacagactttgtgatggaacctatgtatgaagcctagaatatacgtattcttcatttctcacttctaatgctgatcttctatcatgtttgagatttttaaaccacaagtaacccttggttctaacttttagatttctaaatccccacttctctgtacataactattctcccaactttaacttataaatctagcagccaaaacctgaaagttgctgtaaagtacaacaacatattcttttaactccaactgcttctggccctaggcatattctagcctcttcttatcatagatattttttatgtggtgttatttgctttgaaaaaaatgatatgatttcatggatatctggtgctgtactgcatccatgaataggcttgttttggtttcttaattttcttatgctctaattattttggtagaggtgtgcatcattcaatcggctcggttttgagcattaaaatcaaaccaaactaatttaatcaattttcatgcatacccaattaattgagcttaaagaggaaactgatcggtctgtttggtttaataataataactgatctaagttggtttactttattttggtttggttcagtttggttcaacaacaaaaactgatttttatatttttaatttgggtcaaaaccaaaaagcctataattggatattttgtgccaaaaaaaacttgaataatgttattataacaagttgtcatagagcctgctcgaatcacatcattacaatctatctcaaacttattattgtaacctataacaaaagtaactattgctatagctcataccagtcatactaagtggcctaattatagaagaaagctatgtaggtgtgttttggggtcctattgaatatggaaaaatgtgcaccgcattaattttttttgatagataaacacatggaaaatatatattaagaaaaaaggctgcttaagaggcaacccaaagtatacaagaagtatacaagattcgccaaaaggcaagaacaaaaagaagcaaaagctcatcagccctcatctaaaatccaactaatcaaaaaagttgattaaaggtaatggtcctacatctaaacaagacttagaccaataccaaagattacaaacaaacgaatttttcatcatttgaattgaaatatcctcattaacaaaagttatcctatttctttccttccaaaccgtccaaaataaacagagaggagctgccatccaagcctttttacgcttcttgcccacaaaggaaccatgccaacctaaaagagtgtctctagctgaaagtggaaggacccacttaacaccaaacagagcaaaaaaaagctcccacaaaactctcgccttggagcaatggataagaatgtgattaatcgtctcctcttcagcacaacaaaggaaacatctagtagctatgttccaccccctccttttgagttaatctagggttaggatcttcccccacgaagcttctcaagcaaagaaacccaccttagtaggaacacaagggctccatatgatgttccacggaaacaggactgcacatctaggttcaagagtactataaatggatttaacagaaaaattcccattctttgtctctttccacactaccctatcctccaaaccaaaaactagtctctttccttgtagagtcaaaaggaacctctccaccacctccacctcccaatcattgaaagatctagagaaacggggattccacccccccctcttccctcaaggaatcctaacaattcgctacccacgcatctttaaaatccgctaaggcatacaaagaaggaaaagaatcacgaagggtattgttcccgcaccatttgtccttccaaaacctccccatagaaaaaacaatattttttagcatcaaggagccttcctttctaatttccttccaaagccccaccccatagccctccctttcttcacaggtactccaacctccttcctccccaaatttcctactaataacaagcttccacaaggactccctttcaaccgcaaagcatcaactccacttgcacaaaagggccttattgagaataaaaagacttctaactcccaagctacccttctttttatctgaataaacaattgcccactttacaagatgaggcctcttctccaaagctcccccccccccccaaccccaaagaaagtccctttggattttgctctagtctcaatttagcaactcttggcatatgcattagagacatgagatagattgacatgctaaccaaagtgctctgaatgagagtaattctccctcctttagaaatgaattgcctcttccacaaggctagtctcttccaaatcctctctttcgcaccatcccaaatcgccattgatttgtgcggagcacccaaggggagccccagataagtggaaggaagagctcccactttgtagccaaattctagggcgaacatctctacattctctactcttcccattggcaaaatcactcttatccaaattgattctcaaccttgatatgacttcaaaccacattaacaactaacttaaaaaagaagtttgctcctgggaagcatcatagaaaaccagtgtatcatcagtgaacaacaggtgggtaatttgaaacctgtcaccaccccttccctttatcctacagcctgttaagaatccccccccttgctgctctatttatgagacagcttaaggcctccatcctgatcacaaataagtagggagatggagggtccccttgcctcagccccctagtgctatgaaaaaaacccattggcgagccattaatcaaaactgaaaacgttgcagtggatatacaccaactaatctagccaacccatttctccccaaaacccattttttgcatcactagcaacaaaaaattccaattaatatgatcgtatgccttctctatatccaacttacacaacactccactgtcattccttttcagcaaagaatctatggcctcattagcgattagtgcaacatcgagaatgtcttccttcaacaaaggtattttgggatgaggacaccacctttcccacgaccttctttagcctattagctaagacctttgctagcaacttgtacaatccttcctccagactgatgggtctatagtctctcaaatcgtctgccccacctttttttggagctaaaactaggaacgtggtgttcaggcttttgacaaatcttcccctcatgaaattctttgaagaaacccattatctcatctttaacgaattcctaacagaactgccagaaaatgagggggaaaccatctggactagacgccttgtcctcattcagctttaaaaaggcagagtaaacctcttccacagagaacacctcctccaaactggctgcctcctcaatcccatttctatcgaaatccaaaccgttcaaactagggcaccaaccactaggatccgacaacagattctggtaggccctagccacacccctttgaatctcttgctcttcaatcaaccagagaccattaattttgatttttgccaaacaatttctccttctgttagttttgccatcctatggaagaatcccgtgcactgagttaataatattgctaatagatattttatattataagtatgtacatataacttttggtttggcttggttcattatactatcaattttttaaatgagaaattatgaaccgaattgatttagtttggttttccatttagaaaacctttttttttttttttgttgttgttgataggtatatttagaaaaccaaaattattaaaacatttttaaaaattgttggtttgagccggttcggtttggtttggtcagtttgattggcgcaatcagttttttacacacctatttcttgctgtaatagattcatggtgtgctagagtaaaggacatcaattccttctttgtttttgttttgttttgtttttaaatatatatatatatatattttttttttttcttattgaaaacatatgatgttttttttatgtgtgtcaagtatattaaagaaaactggtgtgatataacttaaatatggcaagaataaaaaaattaaaaatgaaatcatgcacctaaccctcctaaagcacatgaacataactaagtctaaaaatgaatatgtcttacaattgtagattacaccatctacacatacaatgaacaagtaatatatctttctacacatacaatgaacacgtaatatatctttcagcttcacaagtgagagttcaacccctcgcagaacccttctcaaaaattcttctgttgtgttccctccaaatactttctgtgaatattttcagttaatctgcttggagcttctcagtcttctctaaatgcacttttcttcagtcaacctttttgatagtgtataaaagcagagtgggtagataggggatgagaaaatgagtcataaagtcaatagctagagctcaaaaaagagtcctagtttgtatccagtctgttttaaggaatcaaaggtgcttctgttgtcagtctgatggtgaggagccaaggagtgggaaggttctgggttcaggtgcagaggaggctagagggtcagctgggggctttctgttttactaggtcggtagggctttggttttgtatcggtggtggttgtcattgctcttttcctttagcttgctttttggtgctatttgtatattctgtgtatactttggtgcacctttttcaagcacttttaattcaattgcttattgtacccataatatatatatatataagcagagctataagttgtgggcatgtgtcaactttcttactgtcctagcatcattttaagtttcaagttatgaagttgaaaagttttttagtggcctgtgtctttttttatatttgtgagaggttctccaaacctcccctaaaattactttgttaaaagtaaataaataaataaaattgatatttttttatctataatcatggagatctgaggatctctgtagcattttatatcctgttcattgtagttgacctttttgtccaattatggttcaccctaattcctatgtacattttctattgttctccatattatgagatagtgggactaccaaaactgtgtcaatccccaatagttagcatttaactttcaaaacatgaaaaatatcacctataaaatgagtgaatatcatatctcctcttttagggactaaagccctgtttatttacttattgttctgaagttttgttttgaaacgtttcagtatcattttttttttcaagtctttcttttagatatttttcttgaatacaaagagtaaataattttaccttttcgctgcaatttgaagtttgaatgacactcaatttctattaaaatcttagacaaattcagacctatttagacctaagataaaaaaacaaatgcctcctaacaagtatttcattgtcaatatgctctgatcaaagacagttctcatgcttgcactaaatagaccattataaattttcattccaacctgttgggatactttgttgctgtattgaaccacttaaagttgtcttaggtttcctagtatttgatcttctctacatttgtccatgcatctggatgatgctagtgattcttactactacacttctgtgatgttatttctctgttatttgtttatttatttcatttatccgtgtgccatatttatcatacatctttctaatgaatttgatgtatagtgggggtattggatcggttagcacaatttgaattgtatgatttttttttttttctttttttttttaattgagaaattatttgaaattacattctatttattttttaaaactgacatgagatgtgattgagttaattctggaaacttgtaacttgagaccaatggatagctgggttctcttgatggcatagagagattttcaggtgtattaagaagagtataaaatgcaagcaactctaggtggatgcaggcattgaaacaataggttcttgatcaaaaacctttgttagcagtactgatgttgtttcactttatttgtggttctgtgtgttattatatgtataaatggcttactaagttctataaccttcttgaggtccaaacaagcaacaacaacaataaattatcttcttgttaaaataatgaactgtaattctatgccttctagaatcttgctagccgatcccttgtcg

SEQ ID NO: 12832 - DNA, 3113 bp, Vitis vinifera
  Intron number 2 from transcript GSVIVT01010928001 (locus G SVIVG01010928001) derived from phytozome v7.0 (chr-ID chr1 1; pos 15517776 to 15520888)
atttgagagggccagaggaagaaggaacaacagaggtttctactagataattcattacaataaattttctttctatttttaaattcttgtaattagttgtaatttcctatttttgttgtaatcccctaattctaggattgttttctatttttgttgtaatcccctaattctaaaattgttttctatttttgtgttttaggtagattatttcctattttttgtgttttaggttttgtgtatatatactcattcttaatcaatggaaaagttaagccattgtttctcaataatcctctctctaattcaacatggtatcaagagcctaatcttcttgggcgtattttcttctctctttttttcccagaaaaaccagaagaactctacaaccactttcctcaatggcttttggtgcaatcctctcttccaccaactattatattaccatccaaaactcccaagatcctcaacatccccttcttacaatcaatctctccaatatcaacaaattgtcatccaccaattatctcatatggagccttcaaatctaatctcttcttgaaagttatgatcttcatcacttcattgatggcactcatactccaccaccacccatcgtcactgtcactggtgttgcatcctaaaatccaacatacacaacttggaagcatcaggatcatctcatttttagcgttctccttggtgctatctccgtttcactacaatcgcttattgcctgcaccaccacttccaaatggcttacttaatacgcttccacaaagggattcctcgtgtcaacatccatcccaaaatgcccaaccggttgaccattcctcctcaccaattgactgtttaccactagaaccacacaattctgagacctcttatgcttcaaccacagctccacccacccatcaaaatacccatcccatgaccactagagccaaaaacaacatccacaaacccctaactaagatgaatctcattattgtcctttctcaaccataaaaaattgagcctcatactgttaactaagccctaaccgatcccaaatggagataagctatgaaagatgaatttgatgctcttgttcggaatggaacttgggagcttgttccatttacttctatgtagaattttgttggatgtaagtgggtttttcgtattaaacggcttcctaatggttttgttgacaggtacaaagccagattagttgtcaaaggttttcatcagtgacctcgagtggattatcatgacacctttagtccggttatcaagctgacaacaatacgacttgttctaagtatgacagtcagtaaaggttggtcgttgcgatagttggatgttaataatgcctttcttcaaggccatctttccgaagatgtctacatggcccggccttcgagatttgttgatctacttcggtcaaaggattttgcggtcaggttggcttgaatgattcaaccagacaagtcctttttgccaccctagacctttgatatatacagttcctagcgctccttgagagtctagaacatttataatctcttcggcctttccaaggggttcctttttccaatgcagtagtttctcttgtcacttaagatgaaacttccactaatttttttaaactaaaaaaacctagagtgagtgactttaaaaagaggcaagaacgggtcttccagcttttcttgagttagttttcatatggaagacaatccaacacatgtatgcaaattaaagaaggctatatatggactcaagcaggccccatatgcttagtatcttgaacttctctagttcttcattgagtctgggtttacaaactctcatgcagacacttctctattcattctccactcaggtgacattactacatatctacttgtttatgtggatgacattattatcacaagtaccaacaccaatattatttagcgctacattgacctcctggcacaaagattttcaatcaaggatcttggtgttttgtcctaatttctaggcattaaggttcttaccactccatctggtatgttgcttacttaaaggcgttacatctctgatcttcttgctcgaacaaaaatgtctagtgcaaaacctgttgctacaccacttgttatagatggcaatctcaatcttcatttaggtacagctataactaactacacagaatatagaaccattgttggcagtctacaacatctttacctcactcgcccaaacatattatatgttgttaacaagctatcccaattcatgcatcgcccgacgtctaaacatcggaatgctgaaaaacaaatgcttcgatatctgtgtggcacattgactcatggattatttcttcataagacaatacattttctcttcatgccttctcagatgtagattgggctagcaacaaagacaattatacctctacgagtgcttatattgtctatcttggtcgtcatccaatttcttggtcatctaagaaatagcgtacagttgctcagtcatccatagaggttgagtatcgattagttgccgctactacttcaaaaatcaattggatttgttccattctcacggagcttggtgtcattcttcctacactgcttgttatctattgtgacaatgttggtgccacctatctctgttctaattcagtctttcatttgcgtatgaaacatgtggcaattgactatcactttattcgagatcaagttcaatcaggtgctcttcgtgttactcatgttttctcagccgatcaacttgccaacgctcttactaaacctcttccacaaagccgcttccaagaattacgggtcaagattggcgtctcctctgaagctccatcttgagggggcatattagagaattcattacaatagattttctttttatttttaaattcttgtaattagttgtaatttcctatttttgttgtaatcccctaattctaggattgtttcctatatttgtgttttgggtagattatttgctatttttgtgttttaggttttgtgtatatatattcattcttaatcaatggaaaagtcaagccattgtttctcaataatcctctctctaattcaatagtttcaaggtttgacttgtcatattcattcctacaa

SEQ ID NO: 12833 - DNA, 13462 bp, Vitis vinifera
  Intron number 2 from transcript GSVIVT01010282001 (locus G SVIVG01010282001) derived from phytozome v7.0 (chr-ID chr1 ; pos 18956356 to 18969817)
tcttctcctgttgtatcggaagggtataggaggaggtatttcttctaattttgttgtcatcagctgtatttctaaatggcttactacaagtatttcgatgcctaatacatgtgtgtgtttatgctgtcaaaataaatatattttagctggttcaattggttcaagaagtaaaatctaatcttctttgggaaatacatgagttatttaagtaatgttttcttcctcttgaaccagtgtggggtatattgttaattggaaccagtaagaaaagattctgaaacctggacagttattcatttggttctatcttcattcctttccttgatgttggaatagtataatgccaaactgttctgtaaacttatatcatgagcttgttggggaatggggctgagaacttgtacagttgtgcctaaatgagtctgtctctgtttcactaatgaaagtgttttttgtctaatggcaacatgacataactcaactttataaagccctaaagagtgagttctacagtttgctgggcagtcctctggctaatgggagtgcttgtatttagtttatgttcttcttatcttgtttcattaggcttcaattgggataaataaattagaattaaaagctataatatgatggtgccatgggcacttcttcctatcaatggttattcagatacatattgatatgttccatatgtcaacttgttgcaacagctctttggagatgtagggtgcattgaaccttatctttctccatttttattttattttattttattattaatattattttttttatggtgggattggttacaaaaggtgctaaacttttgatcacaattttgataggtatgctagattaaaatattattttcaacattattggatgtcctcattgccttcatctacggtttttagtctttttttttttgcttgtaaggccttagctgccatgtatacttcctgtatactttggggctcttttgccttttttgaatgaattctgtgcttacttataaaaaaaaaataaaaaaaaaataaaaataaaaaaactaccaaaaaagaaatccttcatttttgtctctctaggatttcttttaaatgtgtttattggcattttctttattcttgttttggaatatggagtgcaagcttgccaaatctttgcttagattttctcttccatgtggtggcaatggttttactcaactgcttgacagtggtgtcctccagctttctcagttattctcctccaccaaccataatatttaaagtgtgatcctattacatatttggagatgggcaaggaaagctaagagcggcaggaagaagttattttctttgcttcatgtgaatgtatacagccttatattggacatgagaattttcagaaaatggatatgctcaccttttttgggaaactaaaatggaatgagttgatggtgctgtggtaaaaagatatttgcaatccatcttaagtggattgggctgcttttggagctagagggaacagtgggagaaatcttattaatgtaggatcaggtgagggactataaaggaaggtgattgcattgggtgcctttggggagtagttgaacatgttgggaggtagctggatctcctcttggacttttgtgtttgggaggggcctttcatgtggttagatatctgtgcaagaggaggtggtgggggtaaatgttgatttcccaattaggacaggcttcccagacttcttagaaagaaatgagtttatggatactccatgtgtagatggtttattcattttgtccaatagtcatgatgtgatgaattttttatttttttttattttttcaggattgagtatgtttttctcctggccccttgagggaaaaaacttctaaaaggtccgtctaatgccttttgttgggattttctgttgttctcggctggggcttatataatgcttgggatctgagctgaaggttatcttttcctggaaagctgattgctaatgcctggttcaaggaaggttttaggtgagtggaggttaggaatggtggtgttgaaatctctataaaagttttccatcaaaaagcaggtctgcatattttgacttcagtagaagggaaggaaataatctcaggattgggttctgtgggatagtggaagtggagactttttggcggcaaaaatcttttgtttctcaattgagaactgtttttaagcattgttcttaaaagctgtttttgaaaactattttcaaaatgttgccaaatatgcccctagattcttccattggctattttttttttttttaaaaattaatttccattggctattgaattcccatgagagaaataagtgcaggaagaggaaagacgatgttcaacaatgtcttattagaggaaaggtatggtgttggggtggcgggttattttgttaatgtccttaaacaagagggttcaaatgtctatggtagatgagattctttatttatttatttagttattatttatttaacttattcttttagttctagatgcataggagtgagtggttggggctttgaatatcttgaatggtgaaaaagtgcttgttttttaatgggttgaccgtagtgatttatttatttttatattattattattatttaaattttagggttgttaagaaggacttataaaacttttgggtgaattctttgatgacttagttataaaaaatgttagaatgttgccttagttactttatttagtttaccaatgtgcacccataagctgttgcaaaagatcccagccaataggttaaggaattgtgaatgatgtagttccttatatgcaaaatgcattgttactattattattttttttgaaatagaaaatcaccgatatgattcttattgctgatgatgtgttgtgtttgacctctctaaaggtggttggttggagagagagggggggctgccaattaggcatggagaaggcagatggtcatggcatcgtgttagttggaattcctgaaatgtacttgtggaggagagtggaatttggaaataaaatggaaaaggtaaatttaggcttgcctgtctttggtactattctctatatttggtcagtggatcctgctttgggagggttaggcaaagtgattcacttgaccatcttgtttattttggatgtgatgacctttagcatgcttttacgttaagttgtggaaggaatcttttgagaagtgtggttgtcaaatcaaaagtagggaagggaatcatttaggtgatgctcgcttttaacaagcttttcaagtgaagttgtggaaggagatctttattctcatctttatattcctattcacaaatgtcttttgtggggctaatgtttaatcaatctaatcatttgagggaatcctcttgtgcttttagccgggcatggactttgcgattaatttgagtaaaagtgagtggaatctggttggggaagttgaagaggttgatttgtaagcagccaatgtcgggggaagatggagggccttctagttatttactttgggatgcctttaggattaatgttaaaccaaggtggtttaggacatggacatcaaaaggataagaaaggagtttggagggttaaagaggctttctttctggaggattttattatgggatcttgaattgaagaactcttactagcctctcaaagttctttgtctcttttcaacaccaggtttttaatacctctctattctagatattagaaaagaaaggatcaccattgtgggtaagcggttggagaacctttatatgatgtcccatgggttagtgtagttaggagttcaattattacttggttgattgtgagacagttttccttcctaaggtgttcatggtcttgggatgaaaccattatccataattaatcaagcctcttggaaagtgccttggagctttactttggagaggatgaccagtggatacacatgatagtctggaatgggtggccatggttattgggggtttgaaatgcattgttcaaagtattgattccttgtaataagacatggggaatagtggtatggatttaaaacatcttgcccgtagttgtttgagctatttcaacatgtgtaatagttcacatcccaaaaatgaataatggtttaagttacattctaattttgaatatcaatcatttaacccacaaattaaatcaaataagaataatgtcgaaaacatcagaaagcatgggtgtacaaatactagccagtatttacttgactcaagttcattcatgcaattacaatttacaacttaatacttgggcagtaaacattcattcttgtatatcttgttggaatgggtcaaggtgtcataggggggaatattccttgtccatgttggactttgttaattgattaggctctaagtacagcatggttgttgttttttttttttgtgtttttttgttcctttcatttttggtcttttggcttccttgtatatgttgtgtaaaatttcctgtgtttgtggttgttgctaatacaatcctaatttacctattaggaaaaaaaacctatgcaattttctttcctaaaagaattgatcatatccatcctacacaaaaagctaatctaacacgtgactacataccttcacctgactaaattcgctggtgcttcaaggtctagccattttatccaaaataattaacaatggaagctccattcgtatcagatctcctgtaatgtggcaatgatggtcactgattatagcaccaccatcactgatgccattggcctccccaggtgcctaggtgagtaaaccctagtactattctggcctccatagacataggccctatagtcatggcctcaatgctggcccactaatatcctttttttttttttcttggatgagtatgtaatatatatggagttatagagaaggcgtacataaccacacaagtagtatacaaagagctctcaacaaaatgaaccaacaaaaaagggaaaaaaaaaaaaaaaaaaggagatacaatcgtatctctaacataccccaagcccaatcaatcaacaaaatctaccatagacataggtgcctcaatctatacaatgcctcatgcaatccaaagaattgtctctgaacattccacattatcgaaagcccttcaatttcactctctttggatattctgaagtaaacataaaggggcaatcatccacgctctcctccatctcttcccaacataagaccctttccagctaagcaacatttgtgttgttgaagagtggacaacccaagctaaacatgaaaaagaccagctgccacaatatgcttgctaagatgcaatgtaaaagaatatgatcaatgggttcttcttcttgtttacacattgaacatctatttgctaaagacacacctctttttttcaactggtcaaaattcaaaatcttgccccatgatgcttcccatgcaaaaagttgtggatgttggtccagctctagggccctaggttcataaccatgatgccaaagggaattctgatccctcttggaaagtcaaccaatgtagtcaaactcctatagttttcctctatccagccttgccaggcatagttgttaaaggtgcacctaagcttaaggtgcagcaatccctagctctgttgttaaaggcacttctcagttttagtgcattgcctatcaaagtgcatgccttgttggaggagcgtgtcttgtctttatatatatatatatatatatatatatatatagcatttttatgttggaatttctcattgtatattcaaatttgtaattgtattaacattttgttggatgcttcttttaaatgctgggactcttgattttttgattgcatggattagaattttggatcatatttgttgatatacaagtgtttgataaatatttatggattatatttggtgatatacaagagcatattgcatgtccaactttacagttttttataaaattgatgtacacctgtgattgcaagttagttggttcaggtgtgcaccctgggttgtgccttacacctggacccctagaggcctttgtgcctaggtgcgccttatgcctttcggaattatgaagcctggttggaataatatgattaatgttttgcatcatgtagttgtcatctccctgcccatatgatacctttagatgcatgcaccttctccacctaaaaaatcactagatgacccggccatctctgatacactagaactagatgcatcaccatggcctactgtgctactgctgttttcatccttgtcatcaacagcatcgccaccactgttcccatcagtgtcatcatcattggtagaactggagaatatatgctggtagtgcccacagtatggagtggcattttcttaaccctgaacatttgctgctttgtttaactagatatctttatcatcaagcagtcttgctcctctctttacctctttgtcaaacttattatcatccttaaacatggtttagataagttggacaataatgcttagcattgtatcccttattcactagtttttgtttttattattttaatttttatatcagttatccatgtttcagtagcttttgaacccaaaatcatatatcatagtgcacaaaccaactccacgattgagccaccagtccgtgtacaaagtagagcaatttaatagaatcatcgagtaattcccgaatttttatccaaaaatgatgatgttggctcttcatgtcaaaattgtgttggcaatccaatccttgttagggtggagtcctagcttgcttgttcaaacctgttgcccgagaggctcattccctttaagtctaaacccaagttgcccagtgaggtgtccaacctggttacagtcagttaggggcatgatgcggtatccccttcgggcgagttccaaattgaaggcctatctcctaggaaaatggctaaagtgcgtgaggttttaagctctctggatattaaggtatattccaggaggaagagtagacgctctataggtttgtgagacctgttggaatcagtttggggattaggggctaaactgtttttctatgaaaataattagttggaataccaaaggtttgggatcaaggaaaaagcaaagggtggttaaagatttcctgaggttagagaacccggatgtagtgatgatccaggaaacaaaaaaggagtgtgatagaaggtttgtgggtagtatttggatggtcagaaataaggaatgggccgctcttccggcgagcggggcttcaggtgggattttgatcatttgggactccaataaactgcgcagtgaggaggtggtaataggatccttttcgatctcagtcaagtttgctttggatggatgcggacctctatggctaactgtagtttatggcccaaacagtccctcacttaggaaggatttttgggtggagttgttggacattttcggaatctcttttccgttatggtgcataggcggtgattttaatatcataaggagaagttcagaaaaattgggaggatctagtctaacttcaagcatgaaggactttgatgattttataagagagtgtgaattgttggatccacttctatggaacacaccattcacttggtcaaacatgcaagagtctctcgtgtgtaatagattggaccgtttcctttactcaaatgagtggaagctttcctttcctcaaagccttcaagaagttcttcttagaagaacttcggatcattggccgattgttttggaaaccaacccgttcaagtggggcctaacaccttttaggtttgagaatatgtggttgtaacatcctagcttcaaagagtgctttaaaagttggtggagtggctttcaaggaactgggtgggaaggccacaagttcatgaggaaattacaatttgttaaggccaatttgaaagagtggaataaggtttcttttggagtgctaaacgaaaggaaaaaaagcatcctgaaagatatagctaaccttgatgtcattgagcaaggtgggggtctcagttctgaacttataattcaaagagctttaagaaaaggggagttagaagaattaatcttgagggaagaaattcattggagacaaaaagttagggtgaaatgggttaaggaaggggattgtaattcaaagttttttcataaagtggctaatggaaggagaaatagaaaatttatcaaggtgttggaaaatgagagaggagtagtgttgaatgattcagagagcattacagaggagattttacattactttgaaaagctctactcgggtcaaattggtgagccatggagagttgaaggcttacattggtcccctatatttgaagagagtgcgtctagattggactccccttttactgaagaagagattcataaggccatatctcagttggatagggataaagtgccgggtcctgatggctttaccattgcagtgtttcaagattgttgggatgtgatcaaggaggatttagtgagagtgtttgcagagtttcacagtagcgggatcatcaatcaaagcactaatgcctccatagttttgttgcccaaaaaaagtgtgacaaagaaaatctcagactttagacctattagtttgattactagtctttacaagataataaccaaagtgttatcaggatgtctaagaggggtattgtgcaagacaattcatactactcaaggcgcttttgttcaagggagacaaatattggatgcagttctcatagccaatgagatagtggatgagaaaagacgttcaggggaggaaggattcgttctcaaaatcgactttgaaaaggcttacgatcatgtgagttgggattttttggatcatgtgttggagaagaaggggtttagtcctagatggaggaaatggatgagaggttgtttgtcctcggcatcttttgcagtcttagtgactggaaacgctaaggggtgggtcaaggcatctagaggcttaagacaaggtgatcctttatccccctttttgttcactttagtagcagatatactgagtaggatgttgttgagagcagaggaaataaatttgttagagggtttcagggtgggtcggaatagtacaagggtgtcccatttgcaattcgcagatgataccatattcttttctaacactagtgaggaagatttgcagactctcaagagtttattgctagtgtttgggcaaatttctaggcttaaggttaaccttgacaagagtaacatttatggtatcaatcttgaacaaaatcacctttctaggttggccgaattgctagattgcaaggcttctggatggcctattcactacttgggtctccctttgggagggaatcccaaggcttgtggcttttgggatcttgtgattgagaggatcttgaaaagattagatgggtggcaaaaggcttttctatcttttggaggtacgataactcttatccaatcttgcctcacccacatgccttgctacttcctttccttgtttaatatacctgcttcagtggctgcaaagattgagagattgtaaaggaattttttatggtcaggggttggggaaggaaaaagagatcatcttgttagctgggatgtagtgtgtaaaccgaaggcaatagggggtttgggttttgggaagatggttctaaggaatgtcgcactcttagggaaatggttgtggaggttccctagggagggttcagctctatggcacaagcttgtttcaagcatttacggatcatgctctaatggatgggatgccaacacaatagtaagatggtcacatcattgtccttggaaggctattacacaagtcttttagaagttttccaagtttacttggtttctagtaggaaatgaggatagaattcgattctaggaagacttgtggtggggggatcaatctttgagttctcaatatccaagactatttagagtagttacggataaaaatattctcatttcttcaattctcagatctactcgtcccttctcttggaactttaactttcactgcaacctattcgatcctgagatagaagatttaaaaggtctcatgtgatcacttgagtgtttgcaattgacatttttcggttccagatgcgagatcctggtttttatcttcttcagggttttttacagtcaaatctttctttcttgccttatctcattgccctgattctccttcagttttccctaccaagttcgtttggaattctcaggtccctttcaaggttaagtcctttgtctggttggtggcacacaagaaggtaaatactaatgacttgctacaattgagaagaccccacaaagcccttagtccgaatatttgtaagttgtgcatgaggcatggagaatcagcagatcatcttttcctgcattgttcttgacattggggttatgacagattatttcagttagccaagatggattgggttcccccgaggagcattttcgacatgctatccatcactttcagtggctttggtttatcgaggagagggatagttttatggcaagctgcgtgcatagctttaattcgggttgtgtggcgggagagaaatgcgaggattttttacgataaagcaaggaatgcagagagtctttgggattctattttttttccttgcttctctttgggctttttgttccaaggttttcaagggagccccccttattgttttacaacttgattggttagcggtgtatagttccgatgggttggtttagcctagagtagttgttcgttattacagtgtaatttctgatttttggtttcttgtaaactagttttctttggtgggaggattcctcatccttctcttgtacttcttttttcattaatatattactttgtcgtttcctataaaaaaaaacaatgtttaatttcataatgcattatcaggaagatcaggtctgttaacttgcttgttaacccttcccaattcacctcttatatctatgattgagccaccagtccgtgtacaaagtagagcaatttaatagaatcatctactttgtccattgtaaattctgctgtgtacaatgtttaatttcacaatgcattatcatgaagatcgggtctgttaacttgcttgttaacccttcccaattcacctcttatatccatgaatatatatttaacaagccagtctggtcaaacatcacatttatcatataaattatttttttgataggtaatacttatttcccctagctgtcacaaggaatcggacctggaaccttccccatcaggccatcctcaccacaatcctttgccacctagccaggccccaaaggcaagtgtaccatgtaaattgtgaaatcatgcttaatcatttatatgaccatgatgtaatttagtatacgtgccaacttttttcatttagttattaacacaaattctgttgctcgcaatttgtattacataatgcatcatcaggagtatcagttttcttaacttgttcggggtagccttttaattactcagtaaatggttcagtctggttaaagattgaataaaccatataaactataaaatcacacttaatcatttatattgctatgacatgcttcattcgtttcccttccttgtttgtccaatctggctgcaatcggcaaatgagtttttcccacccttgccttatcacaggatgctcagagaaattatgactagtagtggaaggtctggttcagaaaatatgctgccacattatctgtcatcacaaattaaaaacctgaataataaaaaacaagtgtcatttgactaaataaacccaacttctacctgctgtgttaatgtgacagtcaagttgtgattcctattctatcctgtgtccatcgtatccctgaactttttgtaggccttaaccaaatgcctttactgcaaacctttccctgtgcattgtgttgtagatggcaactagatatgcttcctatcatgatcatttgtcttccacactcttacaagaggttctgttacatgtttcactttcctgattctgtgcccaaggtgcgcaataaggataaatacactctttcatcttggcagctagagccctcattgatttatcccaatctgagatacatggactctttaattcgacccaagttacttctgttaagacatggatatgggtgagatccttgttggatatgtctgttttacttaggatttggctgttaattgcttctattttatttttatttttatatttttttctacaactactaaagaaggagagaaatttgttgcaaaatgaccttttatgaggatatttaggaatcttttatagggctttctttctgaccccctgagttgtataatgtgattttagtccagtatttttttgtcacaaccttttgtcttgtcaacacatcagagtggttcacttttacttattatcttttgctcagatcttgtatttttggaaggatttcttgttgtcctttgtacctgttacttcatttcaatgaacttctttgcttctgatccaaataagggggaaaaaaggaggtggggtttgtagggaacaggggtgagaaaaactgacagctaaatattgctttattttttgaaagcacttaattgaaatttaatttgctcaagcattacaatttatacaacttatatcttaataaaaatttgaaatttcaaaacaatgttgtcacaaataatatgaatcaacttcttgttgcatctcctccaacacttctcaattaagctagattaatcgctaattgtacaaaattattgattttctatctgtgtccaagtacctgttcctgctatttagatccttgtcagccgactctttgcatcctacaatttgagaattcaaaggattgggcgcccgtctaggtgcatccaacacccacatctgtacccatgaaacattgatcttaagtataaaccatgtcctcaaatcaacaaattaaaacatcttaggtttttgttaggtgtagatattcagattaggttcttaggagcaatgaactcagaggcaaagctgttgatgcttggtctcagcaagttccggtcctctgtgtttgttttcaaacttaacactgttgcataccaaatttgattttttccctccatcaatcaattaattgtataacaggtttcgctttcctccacaagggaattggtattttgataaggcatttagtatttctgtccataattaatagatttgtggaaggttgtatagtcactgtagacaatgatggacttaagcatgtgagatgttcattcatcttgcctgatatgcacctagataggccacctaattctcattctctctctctctgtggatgttctatttttgccctagaatcttattatttcatgagaagcacttcttaagatgtgaattgaatgttcatatgtgtatcgagtgtatcgactagacattatcatgaagggtaactgactattcacctttgtactccatgcagccatcttggcag

SEQ ID NO: 12834 - DNA, 2903 bp, Vitis vinifera
  Intron number 2 from transcript GSVIVT01010214001 (locus G SVIVG01010214001) derived from phytozome v7.0 (chr-ID chr1 ; pos 17694861 to 17697763 reverse strand)
aagcaggtgactttcacttatcaaatctagcatcatcttctattctacccaaaggtttttttttttttcttcttttttttttagtaattttttcctttttttttgggcataaaattattgctctgattcggatttcggaggaatgatttctcagatttaatgtcttttttgcttgattttttcattcaattttggttttagggatggaaaatgtgatagaatgccccctttttgtgggaataattacacggatgcgattgctgtcaatgggcttacttatattttctttgggaattgtcttgatttgatgtaaagatcagaattaatgtggaattcaataacagcttgctgttatttagttgtctgtgtgtgcttgttttatttttattttttattttttatttttaaatttatctgtacgtcatggatagtgggttactgctgaagattcagacacagaatcagtatattttgaaatgaatatttgaatccgcatccttagagtaggcttagagtggccaagatgtagccatttagtgtacttaaacggaatgaaacttacttttctattttgtgtattcatttcagaaatgaaggttcaagatggactgtttgctatctcgattagtgtatagaaatctctgtttggtcaataatttgtgtgaatggattgccaatttcctgggttatcaacagcattgttttataattttttccagtttctttatcttttaaaaaaagattgatttccaaaacaaggttttaatatgaattgcttgattgaacagtccagtaccatatatatatatgaagtcaaaccttgaatcttccatcctccccccaacccattgccacctaatttccaattatatggggggattttattaggttggtgatatttagaatccttgtggggaaatgcaggccatttatatgttgtagaacattgttttaagagttcttgattgttatagaatgggtctactctttacaactcaataacagatgataaactgtaataaaacacaaaaaataatgtatttaatattcatattcatagaatacatacatacatacactataaaaaaatattcactatatatatatatatatatatatatatatatatttatatagtgatatttccaacttctttatgtgtgtatatattacataaatatgttttgtttacctataaaaaaaataaataaaaggaaagaaagaaatattcattttttttggttttttgataaccgtggatgtccgggccagtttacgtgcacctcgactaattccacagggccctgaagttaatgaccgggtaagtctctagtggccttgaggggactcgaactggtgaccattagggagtaaacccaaggccggaccaactgagctaccccttagggttacaaagaaagaaatattcatagagaagctgaaaataaagtaaccactttgaagtaataatatgaataatcacacaactttgcttgtataatgtggcaaaaagacaacaattgggcaaccaacgaggcatccatgctggtattcaaattaagcattagatagtcatgctacttgaagtaatgtaaactgatgagaaaagatctattctcatgtgttgattcactgcaaaatatgagtccatgccacacctatcaatactgcaaatatgtgtttccaaaatggcaaaatctgcatatcttgttgtagcttatacgcattatgcctcattttgcttaggacagtttaaaaattttaatattagtgtttacttttcatcaaggcattttacctgaattggaaaaatccaaacccaaacccccctggctttatgggaaaaatccaaaggcaagcctaaataagatgtgggaaaagagtcaagcttgcaacccaaagctgcatctagaactgccaccccttgactcatagcaatcatctctcttttccaaattcatttttgccttgaccttggctaaacacatatcaaaatatatctaagttccccatttgaactacaaattagagaaaatgatgatgccatcagtatatagcagaggcaagatcatcatccttttgtactttcctcctatctagtagaaaccaatattgcaacatgcatccatccactactttgtttggtcttggggccactccttttttcatttttttggaccatctgaaaggagaaaaatcagatgtcatttgaaaatgaggagcaatcagaccaaatgctcaaatttatttttctaagtaatttttttaatgtgggttaccttgtttttagatggaggttcaatgtctttattttactttgtagatcgattgtgttctaaatttctaatcaagggagggagttctttttttgttttctctccttttggctttgccttttggacttttgtgtatgtcctgtgtaccttggtgcattgctttgttatattttgtgtataatatttttttgcttgcctatcaaaagcatacatccctccactgccttaaagaccgacttataaacaattccagtaatgaaaaagaggtgaaaaaatgcatttccccattgaagcctcatctcattacccccaaaaatgaactagttgaggttttatttcctaaaatagggaatttcattatagcttcatttcatgtttaataagagaacaacattttaatatatgtatgtagggagaatgtaaacaaattaagaaaggagtgacaatttgatatccaatctaatggagtgtcaaaaggaactccctttcttcttactgacataaattcaaagtgttgggaggtacacaagttcaggtaaataaggcataggtgctcttattttcttctttaattatttttgttattgaacaggtatattctcttgaacaaacatcggaggacttgaa

SEQ ID NO: 12835 - DNA, 12368 bp, Vitis vinifera
  Intron number 6 from transcript GSVIVT01027871001 (locus G SVIVG01027871001) derived from phytozome v7.0 (chr-ID chr5 ; pos 8829287 to 8841654 reverse strand)
tcaagattagacgcccaaaagactttgttgacgtagtaagaatgataatcacgattgatgccttcttttcttgcttctgtctttaaaatgatttcatgttgccttttcttttaatatttgttgattcactttagatgtttttaatggttctctttttctctttactgataaaaaaaaaaaatgtttttgatggttctctttcaaaggtatgaaaaaaatgttgaacaaaactggatcaaacttgttgatcatttctgtttcctatttgttgatgatataataccaattcacatgtttatattcttccttgtagtatgtttccattcaatgtttgatggcagtattgaaatcaaatatttcattctttagtgctatctgttaaaatgtgctgcatgattagggcagctgtgacgtaggagttgatttatccatgaaatcttgatattctttcaaacaagcttggatgggttttccttgtcaactagtaggaaaaaggggggctggtgaccttgtggcagttgaatttcagtaacttctactaaacagaggctaatttaatggtcaaagttgcactcatttgagaaaaatatgaacgtcaaatgtcctggtccttgagagaaggctcagcagccttaaatgtcaaaaccagctaaatttgttcatgaacccaaattaatttggtgcttgtctagaaggcttcttccatgccagcggcatacaaaaggcctgtaggctattgttctgtaatatgaggttggggtggcttgtcaaccctaataagcttgacatgtggcagttgtcttcaggatgtaagaaaggaaagactgggtttgaaactagtgagaggtgtggctttgtgacttttaattgcattgtttatttattttagtgggataatatagttgatttcaagactttagaaatatttagttttgggaaatgaagtgaagaatcatctttttcctgtttctattgatggaatacttatcaaattgaggggaaattagttgaaatgttctccttttgcctatggggcagcatatttaagtatctcgtggcacattgactctttttgtgatttgtattgatggaagaatgtatgttatagttgcaaaaatcactggcggagataaaaaagcttgaatgagtaatctttcttaaacatataaagcctcagttatattacatatttttatgtgtcaaattgtgtgttggggtaaataagataaattacctaattcagctgtcatggttccttacttgatatagttgacattgttggaaaaacatctctggttccaggttgattgcatgttttacattgttagaacttacatcttacctcttgagttatgttgggttgttcagatcaggtgaaaatttaacttttagggacatctataccatcatatattaagccgactcgtttatttggtattaccttgattaatcagcggaagtgtccctgacacttcctgtcaatgaaagatctcatggctggtttaacaatataagatatcgagcaagtaggcttgacaggacttgcagagaatgaaaagtggggttagaaggaaaattttgagttacaagatgaagttacacgatcttattacaattatataaaagaatgaaattttgttatactcggggagtcagggtgagtatattttttctcctgattataattggtaaacatgttgggttgcttgctccaagcctgtttcatagaccagccaaaccttaggttggtttagcattactcaacataaaactaagcctattaatttgaagaaactctagccaaccattgcccattggttgggttgattgggctcaacccgcctaacttgtatccttaggctctagatatatgtctcatacttcatggcagaagcctcaagggattgaatctttgtatactccatgcattgaccttgagttcttcttagagtggctcaaggtgctggtctcattgattgacatattccgtgccctttatatgaggaatgtaacctctaattctttttttgttgagtaaaagagaagaaattgtattgaaaagagacgctaaaatagtgactcaaaaagatacagcataggaacacccccctccccggctaggacaaaaaaggccttgaaaagcggaggggccaaaaaaacccaccctcatcgagaacctacccaatcaatgaaacctgctaaagacggaggaccatcttttatgaacaattttgtctccaaccaaagaaaataaataaaagaactcttaagtctttgaatggacaacacatcatcttcaaatacaattttgttccttgccttccaaaccgtccaaaaaatacatgaagggtttgctctccaaacttcctttctcttttttttccacaaaagacccgttccaactcaagagcgttgttttaacagaggctggcagcacccattgcaccccaaatagagtgaaaaacaacgcccaaagagtccttgtcttggcacagtgaagtaggatatgatctatcgattcctcatgcatttggcaaaggtagcatctatttgctaaaggccatcctcttttttgaagttggtccgaagtaagggccttcccacccaaaaaaactcactttgggctgcacacatgatttccaaatgacattcaatgggaaagaggctgatggtccaaattctagggctttgtagagagacttaactaagaacttcccacatttagtctctatccaaagcaccctatcttccacatcctgctgaacactcttcccattaagacccaataaaaaactgtgcacctcatccatctcctaatcattgaagggtctagagaaatgtgggctccaactcccccctccctcagtgaaactccacacatcttttacccaggtgtccttggacgcagctaaagcaaacaaagtaggaaaaacaacacaaaaaggcgaatctccacatcatctatccttccaaaatctcaccctctgaccattgtccaccacaaaggagagactactacttacaacatgccactccctcctaattgctttccacaaccccacgccatatccacccctcacttccttggagcaccaaccctcttgctcctccccatactttcccctaatcacttgattccacaggcccctctctcatttgcaaacctccaacttcatttgcacaaaagcaccttattaagagaagaaagacacttcacccccaaacccccccttttcttttgtctaagcaaacaagcgcccatcttacaagataaggtttccgctcaagagccccaccaccccacaaaaaatctctctaaatctgctccaaccttaatatgaccgtcctaggcaaagtaagcacatacatgaaataaatgggcaagctaaccaaagtactccagatcaaagtgagcctctctcttttggagatatattgtcttttccacattgccaatctcttttgaaacctctcctccactccatcctagacaaccacagacttaaaagaagctcttaaaggtaatcccaaataagaggaggggagactcctgatcttacaaccaagttctgcagccaaagcctccacattttccacacatcccaccaggattaactcgattttatccaaattaattctcaaccccgaaatggcctcaaaccacactagagtccatctagagagctgtacacttgagtccatcttattaacctgaaaatgttgtctcactttctccttccttttataatatatatatatatatatatatttgatgggtaaaaggagattgtattaaaaatagaaagtatatatggtgtatacaaagcaaccaaaaggcagaagggagtgaataaacaaaaacaagtaaccacaccctatggggaacctaaccaatccacaaaatttaatagtgagatagaatcatcctcaatgtacaatctaactcaatcccaaaatagatgtgaaaaagaacttttaattgtttggtccaaactttcacaattttcaaaggcctctcttatttctctctctccaaatggactaaaaagggctaagctaaccaatccacaaaatttaatggtcacatggaaccatcctcaatgtacaatctaacccaatcctaaagtagatgtgaaagagaatttttaattgtttggtccaaactttcacaattctcaaaggcctctcttatttctttccctccaaatggaccaaaaaaggcataaaagagcaacttttcaagcctttttccctttttcaccaacgaaggagccgccccaactcaagagcacccctttcatagaagagtgcatcacccattatacatcaaaaagagcaaaaattagttgccgcaaaatgcgagctttcgaatagtgaaggagaatatgattacccgttttttcttctactttacatatacaacatctgttaggcatcttgcaacccctcttttgagcttaccctgagtcaatatcttaacccaagttgcttcccaagcaaaaaagttaacttttataggagtccaagagttccaaactatactatgagggaaaagcttcgctctcctacttgccaaggaggagtaggacttaactataaaaacaccgttttttgtcttcaaccaaatcataacatcatcagtacccaaagagatgaagtgattatgcaacctcccaaaaaagacatctacttcctctaactcctagtaattgaactgtccaataaacattgaaccccaactacccctatcctaaacatcaaccacccaagcatctttagaagaggcaagaggctatagaataaaggtccaagaaagaatccatcaaagacaaatccctacaccatgtatccttccaaaacttcaccttgttccctgagccaacctgaaagctagttttatctttgaaagcctcccatccatttctaattgcttcccatatccctattccacacctctctatcacctcttttgtgcaccaaccccccgcctctagcccatacttaccaaaaatcacccgtttccaaagaggattcttttcactcataaatctccaagaccaaattcccaaaagagccttgttgagaatcgaaagacttctaaaacccaagcccccctttttgtttttccaagcaaacaattgaccaattcaccaattgtggcttgttaaccaaagcccctcctttctaaagaaagttcctttgaatcttttccagtctagttgccactcttttagggatgacaaagaggaagatgtagtaaatgggtaatttggataaagtgcttttaatcaaagtttgtgttccacattttgaacgataataactcttccataaagcaagcctttttttaaaaccgctctttcaccgcttcccaaaccgtagtagacttgtaaggagcacccaaaggaaggttgggagggtacccaccttgcaatctaaaaccttagcaagctcctccaaatttgggacatccccaactggaattaattcactcttctccaaattaatctttagccttgaacatgcctcaaaccacatgaagacctaactcaagtgctctttccttgctctagcatcacaaaggatgagagtatcatctataaataacaaatggaagacctccattaccaggtcatatcttcctttaactaggaatccatcaataaaaccacctttctttgccctagatagcaagtgggagagggtctccatcactaagataaacaaacaaggaggcaaagggtttcctttgtctcaaacctctagagctttggaaaaaacttgaaggagatcaatttaatgtagatctggtaatagtctagggttgagtgaccaatttaagttcaataggtccttgagtgacttggaggattgaccttttgtaggttgtgccttgagaattgaggctaaagatcaaaaacacattttgataacattgaagtgctgataattattattattatttttttgcaagtgctttcatatatctttgcttacctatcaaaaagtgctgataaattttttctttaaaaaaaaaaaaattctagatattaaatgtagttgggagaaaaaaaatatgtttgaaaatcaattaaatgttgcattttgttttctgcaataaaaatttcaaatttagaatcagctgatgatttctgatcctctcttgccttctgttctgccattagcttgtaaactatgctgtaaaattcaaagaaaatgagtttcttgagtgtttgaatttgttttaagccaatttgtgtttcaataagatagaatgtaagtcctactgggttccttgttgaaagaatcgaaactacaaaaccactgttccagtcttctagagctgaattgttgctttgtctaaggttcatattacaaagttttagatcttgtttattccttttttgggtgcaaaatctagagttgcttctgttaatttaactgagtggagatcttatttctagtctagcttgtcggcctgattttcttgggttagcttttgctctggtttgcttgtttcttttggatgtgtccttgtatacttcctttagtctaggctacttcattttatctactaaaaaaagaaaaaataaaaactttacagttttgaatttctctatttggttaaattttagtggctaagggagggaaatgctatcaaaatatcatgtaaatatattatatagctatacacagtttttacttccaattttgtggaaaaacatatgctatgattgttgtagcatcccttcccgttttcttttcataagattttgcttaccagagttgccattttagcattatgaattatattgttactcttgcttctgctaggagaaatctaactccttactcttctttccaatgtgattgggattttttatgaattggatatctttcttagttattggttggggaaaaaaaatcgtgtgggagatttcactatattttaattaggaacaaaacctatcacaagaatattttaagaaagtttaattttaagagctgaaaaatgaagacattccaagatacttggaatttagaattgtaatacatgcaacaaaaagagttgcccacatcatttacaaactcattgctgatgatctgaaaaactttagacctattggcttggttgagtggtttgtacaagctcattgctaagatgttggctaaaaggtcaaagagggtggtgggaaaggttgtttttgagttccaaattgcatttgtgaagggaagacaaattgttgatgcaacactcatagctaatgagattctatgttgaagagtggttcgggaagtttaatttgcaagcttgatattgagaagtcttatgaccacatcaattgggatttttggttagttgttcttggaaagatggggtttgggcaaaaatggactgaatgggtacgatggtgcatctcaacaacaaagttttctatgcttgtcaacaaacactttttcgagttttttcaaagcaccaaaggattgagaaggggacccgttctgcttatctttttgttttggcgatggaggcacttagttgtcatctagagaaggctagggagggtagtcttttgtcaggttttggggtagagggaggtgtctcatttgttgttcgcattgagaccctagttttttgtgaaactctcatggctaagtgattcatttaagctggttgctaatgtggtttgaagctattgtgggactgaaaattaacctggagaaaaatgaattaatcccaataggagaggtggctaatgtccaagatttggttcttgagttatgttgtagggtaagggagttcccaacttattcaagacttcccctagggactctattcagagcagaggcagtgtgggatattatgcaaggaagatttcatggaaagacttttgttgtggaaaagataatatattttgaaaggaggaagtttgaccctagtttgaagtaccttatccaatttgcctatttattccatgtctttgtttggcatgttcaaaaaggtcaaattgaggcttaagaagattcagagagatttcttttgggaaggaggagctttagagaaaaaaatgcatagtgagttaattgattgtttgcaaggagaaaaggaagagcttaggaatcaaaagcctttcttcacttaataagttgctcatgggaaaatggtgttgcagattcgctattgaaggagaagccctttggaaaagggtcatttagggaaagtatggagagaggaggggggttgatcttcttgcgaagtgaggaatgagtatggggtggggtttttcaaaaacatgatgaaacaatgagacctgattagttgtagggtttattttaagatgggaaatgggaggagagtgaagttttgaaaggataggtggtgcgaggataaaccactttgtatggctttccccttcttgtatgcttagcttcgtcaaaagaggcatgggtgatagatgtgtgggatgatttgggtgagggatgccattggaatccttgttttggtagatatttgactgattaggagctttatgctccattctagagtcaaggcatgcgattcctttcctagaggccatcatttggaattcttttgtctcatcaaaagcaagtttttttgcttgggaagctagttggggcaaagtgttgattggggattagcttcagaagaaagggtggtcgttggtgatcaaatgtatcctttgcaaaggcgaagaggaatcattagatcacatcctcgttcattacaccgaagtagtctttgccatattttgttctctttgttcaatattgtttgggtcctttcttttaccatcaaggaaactcttctaagttgacatggctcctttgtaagaagaaaacataagaaggtttggagagagccactctcctatgcattttcttgacaatttggaaggaaatgactcaaagggtgttcaatagtaaggagcggactattcaagagttaaaatgcgctttccttggtaatcttgtatgttcggttagtttgtatattggggaaggctcaatgccttcgattgactttgtagattgggtgtgccccagatgagagtgggagctgtgatcttctatattttccccttgtttttttaatattttgtggtagtcattgtatacatcctgtgtaccatggtgtgtatcttctttccccatttttaataatattttcttgcttatcaaaaaacctaaaaaagggagagaaaagagagagttgtgcacatgattaaatgagtgtatctgctatttatgtggtatccattttctttcaaatttgtgattgagtaaaagttggatgctgtttcagaaaaatgaaagctagacagcatgaaatgaagtgttaatttctattaccaatttatgtttatactttttgtttctttatttttatatgtgacttttgtttcctcctttcttgctacctaccacatggactcaaacctagaagcttacccatccccaactcaactccttgcccatccccacctattttatgtgtcattaaaatggatgaaaatagatgacacaaaaaggggagagcctactcttaaattgaatttttcacataaaagactacctgtccttttttttttcattttaatttagaaaaatgtaaagcatggtactagtcatgagtacacatcatggtactactggtcatgagtacacatttttaaatctggaagagggtcttgttattgtaagattctatttgatgtcactgggtttatttttgcttgtacctcagaagaaaatatgaattgtttatcagactccactttagaaactgttatgcagcttcactagctttctcttgcacaaggcatgtctatttgtccccttaatgagatcttttctgaccatcatgttggaatctcttaaatagggtgtttatgttgggtatgtcatatatcacgttcaggatggtgatgaagctgactcctaaataagaagatttccaggtgtagtgacaagtttgatgtgcttgcattttttttttctactagagttggttttgggtcattgatctaggccgttggaaccattatttcttgtgacatgtagtttagtgtttgctttcatttgatgttcagcttgcaaatggtacgagatgtagttctctccatatctgcaatctgaatgttctcatggttatgcttagctttatatccatttttatttaattacatgaccaggtgattttatatgatgataatgccttcgtcgttgtaacaatcatccgggcatggttgcaccatggatgttgaaattaagtatccttttagccattcataatttatccctcttgcaattcctgtgtggggtcagattctgtgactgtaagacataactgatggaatctaagagcaataagaaggaaaccttgttaggtccatatttacttctggtgatagcttgctgtcaatcttataaacatagtttaggttttaactaaaataatgacaaaaatctttgttgctataatattggccttaaaatgaataggtgaaagctatccaaaattccaatattctgctagacttagctctcaaagcacccaactacattcagttggatatgagaatctttatggccattgagcttatcttggcggtgtctctctttttttttttttctttattaatagcaaaattacatgtcattatgtcttttctcgaagtcttaatcacagttcttttgctggtcatctggtctgtgtggttccatcaagttgaactaagcgaatcttactgctgcaactttgatctttcttgcacataaccaggtcatccagtaatgaatttctctcatttaatgttgtcgtttgaaacttcatatcctatcacctatgttctgtagatgacgagtttccttttcatttgatgtggaactcttttactgctcacccatccaaaattttaattctgttttgggaatttgatctaaatagatgaatcatggtgggtccgtggattcgtgcttgcaacttaataggagtgatcattagagaacgattagctttcaatctgccagtttgaggattgagaatggcagtggtgtctgacatggtaggattcagttgctaggattgcattacctgtgagatattaaatattcatcttcctagcaaaaaggaaaagaaaatatctgaagtctttgaaattctgtggcctacgtacttttgccattggttccaactcatgctaataacttgtgagaaaagataagtgaataaataaataattcatgccaaaaccaggatgtttttggtgattttctgtcagcttgagaattttacatttcttctcatgaactagatgggtgcaaccatgcttacaactagccagtattgtatttagtgtttaccatattgtagtagtgtgttgtattgatagatcgcataaaattttaaccatcccaaaacaataatcatattttatgtttgtatacttcatagcaaaaaagggttggcatggtggaattctaatgatggaaaaatggatggaaaggaaatacgcatcatgtgcatattgtatacacttcagaagatgtaggctttgtgtggccttctgcaggctagaaattgtttataatgttcattagcctgtgttttagtttttattgagtgataatctctgaaagctctgttggcatattcctagtgtaagcagggaacatagcggacagattcatacttatgaggtctcaaatctaattttcttctttacattaatgggattttgttaaagtttaaatgaaaaatatgctattgttttttatggttctgaaattattgtcctaaattgtacttctcccaagctttggatttgtggcttgcacttagttttgtaagttcaatctgatagcatgttttctgtttggttgagacacaagacacacactacataaaaagaatgctgatccgagattattgcatccctaaggaagctcaaaaccaggtataagggatcagcaagcatgttaaacatttcaataacttccaaccatttcatctccttaaaccagtactgtgaggtcaaaatgctttgtcgtaattacagttctaatgtttgttgatagttttacttcaacagagagtatttcaacacaagattttttttgctctatgtttttcttccttgttaatggtcataaagttagactcaatttcttgtatctgtttaagttcttctatgtgctaaacagaagatagttcggttcaaataagtactttctgctgctttgcaatttctgaggtacattgtggttactattcatgtagcaggttttcagacagttgctattttcatgcagactggtgttcaagagaaattagtagctgcacctga

SEQ ID NO: 12836 - DNA, 1469 bp, Vitis vinifera
  Intron number 1 from transcript GSVIVT01023872001 (locus G SVIVG01023872001) derived from phytozome v7.0 (chr-ID chr3 ; pos 2834128 to 2835596)
ttcttgcacaggtacgcctatgtttgaatctgattcggtggtggtgtgtcggtgatcgggttgatttgtgggttgaattgttgatttatggttgggatggggtgattctggggttggtgtggggatgtggatgcttgaattttgaaattttgtttatttgttagggttgatttttggtaccatttatggttgcgagaatgtgaagtggaagtgcatggtattttgattttggagatgatggttgcttatgttcatagtgaaatttgttttcttctaagctctgatcatctaaaatgtactttttctggtcataattgggtggcgatatatgagatctccattgagtactgctttgtttcgggttatggtctggtctaatcagaagtgaagcacagtttggcgtaattatgggacaatgtttatgagcaaggttctgatgagattgtgataaaatatttcaatgctatttggtagctactctgttcactctgatttttctgtgtttacatctttgccattttattaattctgtgaaaaattggaacttaactgttagtttcatcagtaaatggacagttctgagacagagtaacagtggggagcattggtgatcaaatgattagtcatctcccaggttcacaatgaataaccacataaataggcttgagtgcagagaagacgagttataacaactgtgccctttgataacattaatgaatttataaattcaatctttccattttaattgaaactgcaacactaataaaacaaattgaatcacatatgcgtagctcaataaaaacttcatcccaaccactatcaataaactacttcaataaaaatccttttcttttctgcactcgatcaaagttttgaaaaagttttatgtttggggcacagtaagctgacttttggcattctcttctaagcctcttcttaatgcgctcttaaaagagaaagaaattgtctttgagtattctgtggtttgtgaccatggacatctttccaagctatgtaagatggatatataccctaaattctcactgtgtacattggggtgcactgttggcgtttcttttttgtagtattcctttcctttacacatcaaatacacgcacacacgcaccctaagtttatgaggagtattggtgacatatttaccctagaatcttccatcatcatgatgtttgttcttcagttttttcttcatcttgctagtttgacctcccaggttctgatgctagcctgctacctaggagacctaatctgtggcctagacactgaaccttcagtacgtctacagttttgctaagacattgataaaagaacttgttacttgcacctcttagttcttacagtaataatcttatggtagaagacctttcattttagtaagttaattttgtgttcaagacatgataactctgtcagatttagtttgtatcaatttgttctatttttttgcagat

SEQ ID NO: 12837 - DNA, 5766 bp, Vitis vinifera
  Intron number 3 from transcript GSVIVT01020966001 (locus G SVIVG01020966001) derived from phytozome v7.0 (chr-ID chr5 ; pos 16254470 to 16260235)
ctgctctttctgctccagagacaagtgtaatttaattcaaatttaatggttatagtgttggaatatgtgcccataaacaaatgagatttttttttattttgctgattattaatattttttttaaggaattatttcaatattattgttgcatgcatgttatagatgctttataaatatcgaaaaccctagattatttaattgtaactttaaatattgtatataagtgttatatacaggaggataatatttaaagtaaaataatctaatatgttcgtaattaaaaattaaagttgggatctttaatttaaaattactagcgcggttcattacattctgaatgaaatgatcttatccggattgttaataatgagattattggaatgaaagcactttatataatttgattatataggactggaacacgattaattatgaatctctgataaattccgttataatatagagcattcaatattaatcaatgatggtcatatatgcattgatcttaattctgagtgattaatagactcctatttattgtattgtattttttgacataccgggtaatgacacaaatacatagtgtcaaattcttggtgtattggaagtataataaaataaatagccgggaatattaatcactacaataaaaataatttatggtgtcactatttatggtgtcacttttaaaataatgacaccatatgacttaaaattcataaaggtgacacatcatataaaaaaatttaattaggatagatgatattaattttaagtttagtgtcagttttaaaaaagtgacaccatataaaataaaaattttaaaatattataactaaatgggcccactttgagaataatgatagtatataaaaaaaaactcattgttttcacattcccacaatccaaaaaaatctcattccataacccataaccataactttcttctacctctcttctcacacccatagttcacacacaactgctcttctctactttatggactctcaggtaacccaaaatctcttagatctatcattttctttttttttcttttttttattaatgccaaaatctttattagcacaactgatttacattcattgatttggtatatttgtaatgtagattgtgtaaatagtgttttttttattgagttgcaggaaagtaaaaattaggtttaacattccaccatatcttttgtttcattgttaaatccataaaccccaaaacgaatgaaaataagataaatgaatgattttttatatctttcatactcaaaatgagggataaatattttacagtatgaaattttcttttgatcttacaagaaatttcttttgatgagattttctgtttgttttctaggaatattatagtatattgtgatgaggatatgtatcggtgatatttgaaaaataattttttagaaaattattatcaatattatcatctcccacaaaaggaaaaatgaaatagtttccatatcatgttagagttggtttagaatgttggaattaacaatgagaaattaattttatttctatttattaatgtaaatgaattgttttttaaaatttaaataggaatgaaaatttttataattataaaaatgatcaaatctcatattttgattttttttttttaattcttttacatggtattatggttaatatctcatcttgttctattcatattttttttaattcttaaaatatgttttttgttttttatttttaccttcttttcttattgtttttatatgcgttcaccaaaatttagagtaatttgagattgatgatgaaatttccctttcaaggttaaaaaatttctataaaatccttttattacataaattttccttccataaaagttttttttttttttgaaaaagatattttataattttcttttgattttctatgaaatttcctttaatttgtttattttctaagaatattataatatgttgtgatgaagatattggttggtaatatttgaaaaataatttttgagaaaattattctcaatattgtcatctccctcaaaaggattctaaaaatttgttttatttttgtcttcttttcttattgtttttatatgcattgaccaaattttggagtaatttgagattgatgatgaaattttcctttcaaggttaggaaatttctataaaatccttttattacaaaaaattttccaatccctttcataaaactcttcattttcttcatttttcttttttctgaagaagatatttgataatttattgatctaaagaatataaaaagtaaaatttaaaatattgaatatcttttcctttgatgtttttaatcttttattatttttatttgaacatatttttcatatccagattttttattaattattttaattagaaaaataaatattaattggagttatgactgaaaaattaataatttttatgaaagtttctttaattctttctcatactaatttttctcttaacattttttaatcatgaattaggttttttgtcttatatacacaatcttcaagcttgttataacatcatgtcctctcatattagtagttgaaaacatttttatattttgttactaaaattttattttatataattgagatgaaatttaatggacattgttatttcacaaaatgaacattaaaaaaatattgaaatttaaaaaatccttccaagaaataaaaaaatatataaaaagaattaaatgttaaaaatgatttttaaaagcacaatgaattataaaataaaaaaaaatttaaaaagtgcatatttttaagtggaagattactattttctaaaattttagatttattttttgattttctagttttgctttattttttattttcttgaattgtttttatttgagttcaaatgtgattgctttgttatgagattcattaaagagataattgttgattctacaattattgtattaaaggttttactcatttaatgaattgtacttagtttcatacttccaattattatgatattaatgttattctcatttgatttcagttttatgatataaaaaaaaaaacatattctcaggtagaatttgatgaaattagaggagaattaacttcttttgtgttataacttatcatattgataaatcatgatcatgcatggtgagtcccttagttgttatatgaattttccattggtattgtataacattacttattctttacatactatttttatatcaaaatgggaaaaagaaaaaagaaaacattagtacttagatttgtttattttttataacatcaattaatttttattttcaataaaactctaaatctcattaaactatgaaatgcaggtatacactcttgggaagacattatgaagaataaaaagaaaggagaaagaaacaacaacattttgggtttttagatgtgactcttatgccatacattataggacatcaatgttactttatttggtattgagaattttgggtttttggatgtaactcttgtgtcattttatgattagccggttttatgcatatgaaatgcaggtatacatgaatgttggaatgcttaacatttctaaatcatattttaatatgtattcacttttcttttttagtttcggtgggtttgatgtactatcattttgtaaacatttgatatacaaatatcactggatgatgtaatgtattataggttaatccataagcattacgaaaatataagttaaatgtgatatgattattatatttatagacaaaatatacacaagttgatcttatttgttaataaacattacaaaaatcaacaagctaattaataaaaaacaaccatatcttccataatcatttacaatgatgtgacaccataactaaaaggtgatgcatttaatatgacatcttatatatctcatgcaactctatatcaaattaagtataactaaaaatatatgatgtcgcttttgaatatgtcaccatttatttgttttggtgtcgcttccaaatacgtcaccaattggtaccctctatggtgtcgtggataaggtgacgctatgttgtagcgacaccctatgtttatagtgactcactataaatgtcaccatatattttttttcttgtagtgaatatacaagataaaatccattccttcgttaagaagtcagatggacggttcccataagtattggttcgggccttgaatgataagaacgctcaattcatgattagaccataaatatattattcattagagaaccaatggcacttaaggagaaagatataattaaagaggttaacggaaaaacctagctttaattatgaaccgtttatggaggattgactcatatgtagtgactatatcaatgggcaattcaaatcctttgaatatatttaattttataattttaagagtgcaattccaaatttttagtggagtaattttggaattaataattttgatttttttaattaagttgttaattaattgtcaaaattattggagcttaaaattataatgtccatagttcctctcaacggctccattaaaattatatgaacattttttttatgttgggttgattttattagtttggaattttgaattctaaattaatttcacacaatcttgatttgatttatttattttataatttgattatttaaaatattttttaatacaatgtggtgaagaccacacttacttgtattccctaagaaacactttttaagtggggatcatggggagagatattctctcccatgtttttcaaaattcaaaatatgtcaattatattaaaaagttttttttctcaatgtttttcggatgatgggatgagaatacaagtttttcaataaattaagttgtgtgatataaaaacccataaaagataataataataaaaaaagaacgcccactcgttttgagttcatcataatttggagaacgttagagaaagatccatggtgctttagaggatttggaattctaagatctttttggtggagttcaaatttatctgcctaatcgcaaggtacaattctaatttacctatatttgttatttcattaaattaatacaagtattgatcattgagaaaaaattttgagaaaatttttctagcttccgtttttcttttatttatctggtttcaaaaccaacatatagaccagtgttagtgacctttgtttcccttggccatgaatgcagttccaagagcaaatatacgtctcagccagattctcgcataaacagtggtcaacagttgggtgtttagatccaccatattgaaaatacatccaaactatttctgtgcatatggatagggtagaccaaaactttgaaccttctaacggcaagtgcttccctggtactgctttgtgttctcaaagtttcatcaaataggatcactgaactttgttgtaacatgattgaagtaactttgaccaatccttgtatctgcatctgacacgaagaggtccaatgtatgtattactgcccttctcatgtaatataacctactcagaatacattgcttttcttttataggattaccgattaccttggaaggagagtagtcatcctttgaaattagagcaaaatggttctttataaattttaatacttgtacaacgataaatatttattatgattaattttagttgcttggttttgcttgctaattcctgtggggcaggtgcttggaatttttcagtagtggccttcttttgcaggtcagttgcagggagttgaagagagctgatc

SEQ ID NO: 12838 - DNA, 3725 bp, Vitis vinifera
  Intron number 12 from transcript GSVIVT01021791001 (locus GSVIVG01021791001) derived from phytozome v7.0 (chr-ID chr 14; pos 7350896 to 7354620 reverse strand)
gaatagaatttctgaatcctccacttgatgtaagaaactaattttttcatcaaggttaaatatggaaaattacattgcttctactctcattagtttatctctgtagtttcttatctgattagaagatttcattgtgattgcttttctgagtttctcttatgtgaaatttcctgaatcttactaccagatagtattagacactagtcatgtttctgcatatgtgcattgctagtcattttgttgaattcttctccagtccctttcattctactttcatatatattcatgtcctaatgctccaatcagttgtggagaatatatatgcaaacaattgccaatcaatgggctttagttggagtagttgttatgagattttaaatgcatttttcttctcttacagcttctcagcaattagacaaagaagaagtatagtgctttctttctttctttcttttggttttaattttatttatttttagcaaataagaggaattattaaaaggcacctaacaaaaaaggttagtgcataggaggtatagactaagtgcaccaaacagaaaaatagaaaggaacacttacagggaacccatcccaatttgtactcttctgaagcacaataaattcaagaaaaactaaggaatcttgagacaatagaaacaaaaagtccagaaatgacttttttcttaagctttcctcctccttgaaggtcgtgttgtcgaactatctccaaaaacaccacatcaagtacaatggagccatcccccacactttttgagggcttctgacccatgaaactgccatgccaattagacagaagcttctttactgatctttggagggcccagagaatcctgaaggcaaaaaacaaaaacaccattagctgcaggccttttcacagtggatgagatttgtttagctgcctcctccatatggttggttgcacaagcagcacctgttaagtgccaacccttgcgcctaagatattgcaggcactgacaatcttgcctttccacctaccataagtatactgatgagaactaggttacttgattgtcctattcaagtaagccatcttccatctaccagggatgaacagaaagactgcttgcttccaagcaaatagttgctgctgttcaacttcttgatcatgctctgcaaggttggattttcattgcaggttctgaccttagtccaatcttccattgaagacctctgtagtgtctagctaacttcagatgtgcttcatatgacatccaacattctaagtatgaagcacatgtaaaaagcaaggcatctgagaccacctgcacttagtaacctgaggaatccagaataccatatcaggccccagagagtaggttttaactgtggagccatagaaaacaccttggatgcaacctcaaagaaacatagatcatcacaaattaccacaatatgtcaaaaaaacagtgagtggtcaaagtgggctaaggagaaaaagccttcacaggggacgagttttgagactgtacatatcagtccctttttcccaaaatgaatcaaccaaactcctactatgcccaagtttaaccagagaggtcaactaagtaggaaaaccctgttgtcatcattacaaagaagcgattatgtcccctgatgacatcaacaagatggacataagcagtagcagtgcattagatctggtactaccgtcccaattttcagtgatctcctctagttttgacaccaaattggatttgttagttctagggatttttcttagagttaaaagatgatgagaacaaagaagaagaaaggaagattgggataacctgcctccagctcctatatttatgttacaaggtaagcacatgatacaagtacccttattttgtgtaaacccaaaaaaaaaaaaaaaaaaaagattgatagatcacctatggcatctgcctgcagctgtggattgttgcactctatgtatgggcagtggagaatcgatagatcacctttttttactctgttcgatgactatggaattatggcataagccttttagattggccaacttggtttgggttcctcctagaagtgtatgtaacatgttgatcatttcttttaaagggttggggagcatgaatagggtcaaagtcctatggcaaatcgcttgtcttactttgatttggatggtatggtgggaaggaaatgcaaggatctttgaggacaagtgggggacaatcaaaatgttatgggacctagtctatttctattcgacattttgggcatctactactatagctttcaagggcattcctctcagccttatttaactcgattggatttcaatatgtagttcaaaagtgtcaaaatagtaatattgatatattttgttgtcttttgattctttttccttttcctttgttttgattaggtttgtatttagggaaggattcctcatccttctcagttttactatgctaatgaaatcgtttttgtttctgataaaaataaaatacaaaagaaataataataataataaagaaggatggctgccaaatgtttctaatgtagagaatgaaaaaaaaaaatccaagttgtagtacttggaactcagaaaaataaaaactgtgctgaaggttgccaatattcaataacttattggcaaactttaagctttagtgatagaaatatccagtcgaccaggaaccagtcttggatattttaatgggatatgtgttttaactcttttgaaggtcgagaagctttaaagccaaagtaacctaaacctgacaactatttacttggcaatgaagaagatatggtacaagtaaccccacttcaatcttatgcacatgtttgtatacatgcatgtatgcctgcatgtttgtattttataatcatctctgcaacatgcaagctagagcttactgaaaaattgattcagcagtttaatgaattatctatgttttggccacaacttgcataaaatcatcttagatcatgcaaatttgtcttgttgggaacttgcttgagtattattattattactactactactactactactactactactttagttctttattagtttctagtgatattaaaagaaaaaatggtaatcaatatgcatagtggtgtcttctgcgacaatattctttttgtttgcatctgttgcattagtgcttcttattacttaatgtttgaaagggctactacatatctctactgaactgttttgatgttttaaaaaaaataggaattattgatatcaaatttaaagttcgctaacacgaggggaaaaaattacttacttccctgtttcctgttcctaataactggacctgattcttacaattggaagtttggcaatgcttaacattttcagaaggagaaaacccatgaattcaaattgctttaccgattttttttttttttctcctctctgccgatgttaccgagttttcatgtttgatctttttcttgcaagagattgccaagttcttctgtattgctgccaccccctcctcctttcttaacatgcaaaatgtctataagttatcatctctattctatgttatattgattatcccagcatataagtgctctttcctttcttttattttatcttttctgtatgagcaaactcacaattatatagatagcatcaatttccttctgctgctgttagtttgaaattaacaagagttcaatgatttgctagtggacaagagagacaaaattaccac

SEQ ID NO: 12839 - DNA, 1361 bp, Vitis vinifera
  Intron number 12 from transcript GSVIVT01010735001 (locus GSVIVG01010735001) derived from phytozome v7.0 (chr-ID chr 5; pos 21932893 to 21934253 reverse strand)
atgtaagacctctaaatctggcatgttttgttattgttattttcatatatcaaatttgaactgtatctaaataatgcttttgtagaatcaaaattagcattttgatttacagagtggacatgaagctaaagctgaagatctgttcttgtgattgattttccctattggatcctttgacctggcggctaaatatctgccatcttctgtatttctgcacttagcttttgctgcaaatggattaaaagtacaagtaattcccaacatgaaattgaagcaatatgattcccctcaatgccgacccttctaaaatactatagtttacctggaataattggactcttcaaaactagtgccttttggctacatttctatgttctaatttctatttttagaattaatattttgattttttctaaagtcatgtttgataacactagtataaattatcttctgattctcaaaatttaataaataaaattgacattatgaaattatgctatctttgtgttctacgttgctttttaagacttaatactgaacatgtttttcttgtttataaaaacatgttacaaaatggaagtatcaaatgtgtttactgtttataaaagttgaaaacaatttttctttttttttttaaaagaagaagaaacattatgttctctgttttttttttacaggatgcttttgaaaatgaaaagagaatgatacaatttgaaaagagttcagcaaaaacaaaagtgtttccaaacggcatcaattttatgatctaaaattaaatttgatgaggattctttgattttctctctcatttttaaaactgagggttctgaatttcaagtaatctacaatgttgtctatatttatttttggcgctttttggcgattgttttacatcatgtgtagtttggtgtgcccccttacggcacttttcaatacaatttttatttatctgtcaaaaataaaataaaaattgttgtttacacatttgtattgagtgtcctaattctgttcaaaattctcttactttgctttgcttattgatcagctcactgaaagggttatgtcgtggtttatcgatgtctgatgtgttgtgagtagaagagattacagataatttgccatttatttattcatttattttgatgtagagctctttctacttatgttctctcatttttctgtcgagtttataagttgtgttttcactcaagagaaagagaatagggagtacattaatgcagcatttaaagagtgtttcaaattcgccatgttttaactatcctatcatttttgttcatgatttaatcagatgcatctttttacccctgcaggtgtttgattgctggtttgagagcgggtcc

SEQ ID NO: 12840 - DNA, 9717 bp, Vitis vinifera
  Intron number 22 from transcript GSVIVT01031879001 (locus GSVIVG01031879001) derived from phytozome v7.0 (chr-ID chr 3; pos 5099918 to 5109634)
ctggcagccgaatagcccgaggtaagaatcatattatcccatttgttaccattttaggagctcacgtcttcttttgctcttttggttgatttctgaagcaagttttgtggttgaaattttttaactcatattcctgtcttcagtggttaaattagcaaatgtggagggtttaaacttttgaacttttaatcaacctacatcatgtccagaaatggaaataattcttgaaagttagaagtttggtaccacccataattatgagtttatcaataatgattttaagatttgacttagaatcaatcacttgttaatctggaagtgaaactaattagcagtaattaaagataaaagacccagaaccaatccccttactaggcctgttcacttattggctagtgctataaacactggcaaaaagtagacaaaaccctcccacccgatgttttagttttaaaaactgaaactcatgcacacaggtttgttcttttacatagattttgggattgctccattttgtaccctcagttttgaagtgtgagttttttttcccttttttattttatttatgttttggtgtgtgtgaattcagccatgttgtttcagtcttgaaggcatatacttcagtcaaagcatggggtttgatccattcttgccaatattgtctgaagcgttgttgtgtggatcaatgacttctaaataggatcctagtgctgacatttattatcaatatatgctccattcttgccaatatcgtctaaagcattgttatgtggatcaatgacttcaaaataggatcctagtgctgacatttacttaccaatatgcatatattgtaagaatgttggaatacatggaaagttggaaaattgtgggttttaaaatatactaattttaaattaaagatacactatgctaataaagtgaatagaaaacttaagattgatgcacatgtattcatgttttctaatcgtacatctattcatagaaatactatagaaacttcatttttttttcccttttataggcaaataagcatatattaaaagtgccaaaaagggtgttcccctagtgcataggaatcatacaaaggaattgaaagactaaaagttgcacaaagaaaatcagcattgacattctcactatttagagcacaaccactcaatggagtgtagcatggacagaaaaccagcttgaaaatcatcttggtgtagtcctccaagtttgtccaaaatattctctttggtacctcctatgatgaaagagttgctaatggatgaggacaaaaagtgccatagccccttatctgtcccataatggatgaggaggttgacgactgattcttctgcacttttatacatataactataactcaccaaaagccgctctttttttctttttaagttaatcagaggttagggttcttccccatttatcttcccatgcaaagaaacccacgttttttaggagcctagagctgcagcaacacacttcctttgaggggaaagatactcctccatccaactccaagactgaaacaggatttcattgagaacttttcacttttattagcctcccaaaccagactatccttctgcacaatacacctccctaacactttgaagcttttagaacaactttgcaatgttgtccacctcccaatcatggaagtgccttaagaaatatggatcccaaatgacttcccatcctctaccacccaaccctccttataagttgcaaaagaggaaagggaaaagagtcttttaaaaggagaattgtcacactaagcatcttaccaaaacttgattcttctccaattgcatacgacaaatcttcttctccaattcctcttcttatggccttccacaagccaacaacatactatttccttctaattgagagcacaacctcctggttcttcctcaaactttcccattatgacctttctccgaaggacttccttatccactgcaaatctctaacacaattttccaagttaggggttatcatgagcggataacaacccctctttcttatctttgtgattgacgaccacttcactagatgtggttttgtcttaggaacccctccccctcacaagatatcttgttgaattttttccattctcaatgttactcctgttgagagagagagagagagaaaggagaaaaaccttattttcattcatctaatctctacttacaattgagagatatatatatacaaggctaggagtcctaactaccatacatgtgacctatattaacaaggaaagatagtatactatacatacattatattcaacactccccctcaagctggagcatatacgtcatatgcaccaagcttgttacaaatatatttaatcctaggacctctgagagatttagtgaagatgtctgctagttgatcatttgaattgataaaacttgtagcaacacatcctgatgcgatcttctctctaatgaaatgacagtcaacttcaatatgcttggtcctttcatgaaagactggattggatgcaatatgtaatgcggcctggttatcacagatgagtttcatctgttcatcctttccaaatcgcaactcctgaagaagatgtctcaaccatatgagttcacatgttgccaaagccatagctcgatactcggcttcagcgctagatctggccactacatcttgtttcttactcttccaagatattagattacctccaataaaaacacagtaccctgaagtagaacgtctatctgtgggtgagccagcccaatctgcatctgtgtaaccaacaacttgagtatgacctctgttctcgtacaatacaccttggcctggtgtacttttgatatatcgaagaatatggattacggcatcccaatggctatcacatggtgactgtaggaattgactaacaacactcacaggaaaagaaatgtctggacgagtaatggtgagatagttcaatttacctacgagccgtcgatatctcccagggtctcctaaaggctccccctgtcctggtacaagtttgacattcggatccataggtgtgtctaccggtttacagtctaacataccggtttcttccaggatgtctaaagcatacttcctttgagaaaggaccacaccagaactggattgagctatctcaattcccaagaaatacttgagtttccccaagtctttggtctgaaagtgggtaaaaagatgttgctttagtttctgtataccatcctgatcactgcctgtaatgacgatgtcgtccacataaacaaccagataaatacattgccccaaggagttatgatgataaaaaactgaatggtctgctgtactgcgaagcatgccaaactcttgaacaacagaactaaaacggctaaaccatgctcgaggagattgtttcaagccatatagagaacggcgtaacctgcacactaaaccagactccccctgagcaacaaaaccaggaggttgctccatataaacttcctcggcaagatcaccatgaaggaaggcatttttaatatccagctgataaagaggccaagagcacatagcagccatggagagaagcaagcggacagaagcaatcttggcaacaggggagaatgtgtcaccataatcagaaccataaacttgagtatagcctttagcaactaagcgggccttaaggcgatcaacctgaccatcaggaccaaccttaactgcgtagacccaacgacaaccaactgtagatttaccagggggtaaaacaacaagatcccaagtgccattagagtgcagaacagccatttcatccaccattgcctgtcgccagcctggatgggaaagagcttcatgggtgctcttgggaagagaaacagaggatatagcagaaacaaaagcagaatagggtgaagataatcgatgataactcaaaaaattgtaaataggatgagggttacgagtagagcgagtacctttccgaatagcaatgggtaagtcattaggagaaggcagagtcggggcaggtgaagccgaagggataggaagtgagtcaacaggtgcctcaggaaaagggagaggagcaacgagacgcgggcgacgatgataaacctgaagtggtcgagggggcatagcttcaggtggggagacaatgggaatgggcaagacttcagaaacgggaagagactcagaagtggtggaaaagaatggtgagtcctcaaagaaggtgacatcagcggagataaagtaccgatgagtctcaagggaataacaacgataacccttctgaagtctggaatatcccaagaagaggcacttcatggctttggcggaaagcttgtcctgtccaggagtgagaatatgaacaaagcaagtacaaccaaagacacgaggaggaaggaaataaagtggttggtcagggaaaagaagggagtgaggaatctgatcgtgtaagatagaggagggcatacgattaatcaaataacaagcggtaagaacagcgtccccccaaaaacgaaaaggaacgtgactatggaggaggagagtacgagctgtctcaacaagatgtcgattcttgcgttcagctaccccattttgttgaggagtatgagcacaagaagactgatgaagaatcccatgatgagacataaacgaagtaaattgggctgaaaaatattccctggcattgtcactgcgtaacacacgaatagaaatattgaactgggtttggatttcagtataaaatttctggaaaatagagaataactcagctcgatttttcattaaaaataaccaagtacatcgagaatagtcatcaatgaaagtgacaaaatactgaaatcctaaagtagacgcagtccgacaaggaccccaaacatcagtgtggacaagctcaaaaggagactttgcccgattattcaaacgctttgggaacgagacacgagtatgtttcccaagctgacatgactcacacggaagcgacgacaaagtggaaaaacgaggaaccatcttctggaacttggagagactagggtggcccagacgattgtgaatgaggagaggagcatcagtggaaatgcaaactgcaggagatgaatctgaggtgaggtgatagaggccttgagactcacgtcctatgccaatcgtcttccccgtactccggtcctgcaaggtcacaaatttatcagaaaaggtaatagagcaattaagagtacgagtgattttgctgatggaaataagattaaaaggacattcaggagtataaaggacagaagtgagaggtagagaaggcagaggaagggccaaaccaatacctttagccacagtttgagaaccattagctaaggtaacagtaggtaaatcagaggtagtagtgatagaggagaaaagatccttattaccagataggtgatcagatgctccagaatctagaatccagggtccaagagaagatgtgtgggtaaggcaagtagaggcattaccaggctgggcaacagaggcaatagaagcctgagatgtctgagatgcggaggagctcggaagctgaggcagcggagaatcagaggactgggccatatgggcagtgcgaggaggtcttccatgtaactgatagcaacgatcgcgagtgtggccaagtttattgcaataggtgcaatgaggacgttggcctcgacctcgggtaccactacgtcctcctcgagaggtagtttgagaaactaacacagaagaatctgaagcgctatcagatggcaaagtctgagtggacgagagacggaggaggcgagcaaacacgtcatccaaggacggaactgatgaactaccaagaatctgatcatgaataggctcaagatcctgacggaggccaataagagtaaggacgatgaagaacttgtcaagctgcgtttgttgagccccaacatcaggagtaagaggcatcacagtcaagaactgctccttaagaaaggcaatctgaccaatataagtagatagatccaagtcctgttggctgagatggacaatagcagaagccaccttatagagacgctggatatcattcgtgtataatcctttggcctgagtccaaaatttaaaacaagttttataggcctgaagatgaagaagaatccggggatcaaccgattgccataatacactacataactgggcatctatcttcctccactgtacgcggtcaacctcagggatatctgcctcctgggtaaccaagtgatcttcatatccttgacccataaaccaaagttcaacaaaggcagaccaggagagataattctcactgccaaccaatttctctgaggtaatcagaggagatccagagagaacagaggtaaagatctgatttttggtggtcatattcacgtatttggatcgaagagagccctagagaggaagagaagcagcacccaagcctcggagatggagaggaagccctgtcagatgtggtcggaatggcaagaaagccaaaaataggaaaaaaagtggagatgcagggctcgtggaggactgccggagggctagaaggccaagacggcgtcggacgagcctggagaggtgtcggacgtggccggaaagtgagccacgcgccggcgcgtgggtgacagtccgacggggaagatcggcgtgtgggggcgcgtgagactccggttgccggtggggtttccactggcgtgtagatcagcgcctccggcggttcggaatatgtggtcggtgcccggaaaagaggtcgccggaaagggttgccggcgtggtagagatccgacggcaatgaggttgtccggggtgattcgggaagggaatgaggggaccggagtgaaacacggtcactggacggttcgccggaattgagtacacggctaaaccgaaaaaaattaggttttctcctttggctctgatatcatgttgagagagagagagagagaaaggagaaaaaccttattttcattcatctaatctctacttacaattgagagatatatatatacaaggctaggagtcctaactaccatacatgtgacctatattaacaaggaaagatagtatactatacatacattatattcaacaactcccttaggataacaaaaagggacatgaagtaaataagcaaagctactaagagtactttttagcagattcaatctcccacctttcgaggggtattgtcttttccaaagaattattcttttttaaaacctctcctcaagatttgctaatgagaatgagcctctatggaagcaaattatctttagcaagtatgaccttcaagaggggggatggtgctccaaaggagtaagagaccggcatggggtgggggtttggaaggccatcaaaaatggttgggagaactttcgctctcactctcgcttcatcgtaggggatggcactagagtgaagttttggaaggacttgtggtgtgaaaaccaatctttagaagaagctttccccttcttgtttaatctctccgtcaacaaagaaggatgggttgctgaggcttgggaggaaaatgaaattaggggtagttgggggcttcgtttcactagacatcttaatgattgggaggtgggagaagtagaaagcttattaagcaagcttcatcctttgaccattagaagaggtgtgaatgactcgcttcggtggaaagaaaacaagaatggaaccttttctgtcaagtctttctatagttccttctcaagggacatcaagccccccttcccggctagaactatttggacgccttgggttccaattaggactagcttctttggatgggaggcagcctggtgcaggttgctcaccattgaccgcctaaagagatttggttggagcatccccaacaggtgttttttgtgcaaatatgagaaggaaagcacagatcaccttctcttgttttgtgagaaggccagaatgttatgacttttgatcttctccctttttggagtgcaatgggtgatgcactcctctgtgaaaaggaacctcctcggatggcatggatctttcgtgggcaagaaaagggagaaaacttagagagctgcccccctttgcctaatgtggaccatttggaaagaaaggaataggagggcctttgatgatattgagaggaacgaccaagatattaaatccatttttttgtacacttttgtgaattgggctagggtgtatatagaggaacacactctctctttgatagattttgtagactagctagctaccaagtaagggtcaacttgtttatctttttgtttttttgcctctttgtatcttggtatactccgtgtataccctttctctagccttttggctcttaatgaattatctttacctatcaaaaaaaaaaaaaaacatctcaaacatctgaagacttgaaagaagttcctataggcaaacctaaataagtggctgtaagcttcctcacaacccaatgccaaagcaagctcctccatactagggaccttccttactagaattaataaaagcctcaaaccatagtaaaacccaactcatataagtccattgatatggacaaggatcacagaacagtaaggtgctgtcagcaaaaaggaggtaagaaacctccactatcactcctcaccacctctcaccttaaagcctgaaatgaagccttgctcccctatcttctcaatcggatgctaaaggactccatcaccaaaacaaataaataagtgggtaaggggtcaccttgtttcaaaccctttgtaccctgaaaaaaagctagaacaaaccattcaccaaaattggaaaccttgctgttgagatgcaaacctgaattcaatcaatccgcttctgctcaattcccagttaatgcagcaccactagaagaaaactccaatttatgtgatcataggcattttcaatgtctaacttacaaacgacctaccctttacaattccatagtctttaatcaatgccctcattggcaatacaagccacatcaaagatttatctcccttccacaaaagcattatgggattccgacatcactttccctattactttcttcaacctgtttgccaagactatagctaaaattttatatagactccccacaaggctattgggcctgaagtcctttaaatcttcccctcctttttgcaggatcaaaaccagaaaagtagatgctgaggacttcaaaataaaacttaaaggaaagataggctaaaattcttggaaaagaagatggtgaaattgcagtaccatcacaatattctgtgatataaacaacccatggagtatttttttcacatcatacatgcttatattgtttataccctttctcaataagcataatctgggcatctcttccaatatgacatatccaactaggttctttcctttgttgattgggaaaacacataatatcataaaaacatcagaatgtttcattatgttagacagctccatcatcccccttttttctcttctctaatagttacctagtgcatttcatactctcatgatgattgagtgtgtagcaaaactcttttattacagattctacttctcttatatgatgattattttacctccctctgtcaggtagggaagaatcgagaaagtgaaaaaactgaaactccttccttattcttctttcttatatgacaattattatactttcctccttcagcttgggaaaaactgaaaaaaaatgtaagaacatggttctcattcttgtgtttgtggctgttggtattttaggtaaaa

SEQ ID NO: 12841 - DNA, 10141 bp, Vitis vinifera
  Intron number 1 from transcript GSVIVT01037774001 (locus G SVIVG01037774001) derived from phytozome v7.0 (chr-ID chr1 9; pos 7740846 to 7750986)
gtgccgcgggctcaatttggtggataaagttcccggtatgcttctcagaaggttcacaattttatatggaaatgcttcttgcttatgtgttgctttttgttgttgcattgattatatgacacccgattcaacaatattatttgcagtctggttgattattttattgttccaaatgcatgtttgtatactgataaatctattttagtttcctcactgtattatgtttttgttcattgttgttggtttaatacaatgaagtttattctattgtgcatagaagtgaaaaaatcttcactagtgatttgtaaaagatgatatcctatgacaaagtgggcttcaatcatctgcataaggagttatgtagctagctaacaacataatgcaatggatactgctatgacttctaatttggatgcttgatcgtttcagccatcatgttttgagtgtttgactaaatgcagtcttagatccgtcaaatgtgttttgttttattttttatgttgatggcttcatggcaatatatagcatctattcgttgttggttctagatagtgggtttcagcaggtgaggtttatttttcatggattacattgtcatgggttttgtaaatttccttttcccatgttggggaatgttatcttttgatgttatcattcatgatgagtttgcttgtgttgtttggcctttgtttgtttaaatcagatagtttgtaatggttttaactataaaaggaagttgaactttgaaatgggtgtgaaaaatatgagctgaaaaacttattgaagagttaaactgcagcaaaacaggatgaagtgaaaagagttatatatatgaaattcagagggtcactgaaaacaaaaatagttatcttcaagacaggagtgcagcattaattaatttaaactcaggagttgaaagaagatttagtgatttagaattcaaaaatatgatatttgttgtgatgttgtatctctgtagaggctacccatctaagttgagtcagtgagaaatatcagaagttcaaaaaatatggaggacgtcacatcaacaatgaattattcaaggtgtctgggtattagaaacatgcctgctctaaacaatgctcttctcagttagtggttctggaaatttgtgattgaatgggattccctctagaaactggtgatagttgggtagtttgggcaggaagaggggggctggtgctctagactagtgagggaaggctatggattagaataccaccttgctatcatttctaaaggcttgactaaaaattgattaacaaatatcattgatttattaaaataggattttgtttacaacaaaggtttgacatttattgctattgagagttttcggaaatattctctttgatgccccctaagagtcatgtagttattttattttatttttattagtcaaattgaaactgcattttgaaaaagaaagaaaccatctctaggaaatttaaaaattacagctagagtataaattcaaaaattacatctaaaaactacaattttagtatacatttagatattgtattaattcaaattgattacaacaataaaagggcataggtggtaagatgagaatatcttccatagaagcttagtaaatatagttgtaagacacatatcttatgcatgcaattcatttattaatttaaaataaatgcataaaaagcaaatattaaaaattattatttttaagttgatactcttggttatgcgttggataaatgtgtgctttaaaataataaaaatttgtcaagttgaaggttaaggaatatgtgaaaaagctcgagagttttttttttcaaagtctcgaccatcaggttagtttttcacatgcaaatgtacatgtgggcacacacatgcacacacatgggtgtgcagaagcctacctacacacacacacatatataaggtagacttagagtttaagggaatatagtcttgcaaggttcaactatgggatgatggatatggccataggtctcccaatttaattatatcaaatgcagtataaggtacttattcaaagatcaagattttaagagtatatgtgagagtgtgtgtataaatttccaatttaattcctaacttttagcaattagtttcctagtcttttgggattagattttgattttatttactattttaaataaagagaaaggatggttatattcgaaatctctatttaattttgtatatatcccttattttaagagattgtttgttactagaattgtgggcattcaattacatgtctattgtcatggttctcctgtatattctagccttttcttttgtttatgtgatataagaaaaattagggttttcctctctaaatctcaatatggtattagagccatatctgtacctatcactatccaaatggtgaaatacggaatgaccactctggactcaacctccactttgaacatgtcctctaactaggagtggtagattagaaagtttggttttgccgattactaggcataagttgagtgaaaattatttcctttaatggagatttcatttgtgggaaaggaaaagatgattttctcgtcaaggctaccgtcactccatcaatagagatccgaagtacaaggactggaaatctaaaaatagcatggtgatgtcatggttaatcaattccatgaccaaaaaaatcagagaagactttatgtactacaagatgaccaagagaatttgggatgctggaaaggaaacctactcggataatgataacgcatttggattatttgaggtaaaaaggtatcctaaacgatctccgttaaagaaaacttactcaatactctaaatagatatctgaagtgaaaggtgaatcttaatgatggactacacctaggagggggggttggtgaataggtgttgttgaacaattttaaaaaatctcttaacaaaattacctaaccttagaattcctcaatgtcaacaaacttctcttccaacaacttttcaacaaagcataaaattcacaagcaagtatgaatgcaataacaccttcccaacaatttataaatgcaattcacatgcaaatgcttcaacactcctcaaaattaattcataagaacaattctctccttaactcatttccaattactacaagatatcattaaccaaaacgaacataaaaattattcaagatatccaatggataatcacacctatttcaactcatttttcttccattcaacatatatgcctaagtaacccatgatatcaaaaattgaaaataaatcaaagagtagaatgagagaaagagacaatgataccaaattttaatgtggaaaaccttcaaagagataaaaaatcatgggcctacaactgatcgaaaacatccattatgaagaacaaaaacttaatataaggttttacttagctcatgccaaccaatccttcttggaccatttgattagtatctttcactttcagtttctcacctttttcttccgaagcacacttagagttcacaccaagttcgatctcgacctcttcttgaatccacacaagaagaaaataggtttttacccaaacccaaatagactagaaattgagagatgaatgaatgaagtatgaacccatctttttctcaagaaaatccattgaaaacagtttggaaaacaatagaaaagttggattttcttggcaaccaaacaccccaaaataggaaaggagaagagaaccaaaggggatggctgttgctgtgtttttctctccatcacaggaagcaagtcttgggtttttaaataaaggaaacccttgatccaatggatgagatttcataaaaaagtgtaagctggatcgatcctagaacataacattttgaacacttagtaaaaaaattgcttccaaaccttcctaactccttaaaaaatattttaagtaaaataacatttaaataatatgattgattcaattccatccaactccaacctcagctacataccttagtctcttgacaaattcaacaacttgatcctcattaggcaagtagtccaaagaagaattggaaaaatcgagttaggaaacacttaggaattgtgtttggaattgccaacccagctaaacactcacaggaagcaaatagatctctttgataatgctaaatttggctgttcaaaatgttgtctcaagtataaaaagattgttgagaaagaaagaatttttaaattcttgtttgtgcttcacaaaaatttggaagaagtaagaggaagaatccttggaattaagccttttcctccaactggagaagtttttttcgagtttcccaaagaggaaagtagaaagaagattatgatgggaaaccaagttccattaaacctgagtgaaggatttgtcctagcaacttgtggaaccaatcctactcaccacaatctcgccaaggaagggaggaagaccatggtgtgacaattgtagaaaacccgaacacatgaaggacatttgctagaagttgcataacaagctagttgactgaaaactgagaggttctgctaaaagtcgtggcttcacgttcattgaagaggagaagtctacacctgaggctactttgtttagtaaagagcaaatggagctacttcaaatagtgatcaaccaacaaacatcatccctttctccacctgagtccacaagcactatcaaatgtctctttcttagctagtcttctactaaaaaaggttacaaatgctactcccctatcactagaaaattctacacttccatgcatagttgttaaaaacttataatacatgatataatacatttttttatggaaattgatacatatcacaatctatatattactttagtacatatacaacatacgatacggtacgtgatattacgatacgatgatacatacatcttcaactattttctataattttttttaaaaaatcaaattaattaatttattttttaaatcatattattttttttttgttaaaagaatattatattaattgtttaaaatatataataaaatattaaaaattgattgtaaagaggagaaataggtaaataatcttacatgaaaaactacattcttgttgtcaaatactatattggaagtcaagtaagtttatttttataatgaatattgaaaaattttcatttgaatggtttgaatgtttacaatgaaaatgatggcgattagtgaatgaatttttttacttaaaatattagtttttcttatatatatatatatgtttaaatttggaactaaaaataatagctaaaaattgaatacgtttatttttatggattatatgatgaatctatctattaaagtcatattttgttaatcaaaatttgtcaaaactttaacatttaatgttttcatatgatatgatatagtttaactttttagatcttcctatcttccataaaattggttatatattactttatactttatactttcaataaatatatacacatacatatttttctatttatttttcactatataaaaaacttatgatacacaatacagaaaagtaaaaaaatgatacacgatgcattttacgagttaacaaccatgctttcatagatgcaacctttttgaaaaccaatcatatggaccaaaaacttatattcaggggaagaactcaactgtacaagaaagtaatttttggcttaatacttccattccattagaaaccaagaccgagcccaccttcattacctcaattccactagaaactaagcctaacatcatcatatcactaaattagttttgtctttgcctaacagccaggattcagtcactcccatccatactcaacttgaaattgataacaagctctgtgtttattcaaggaggaaaagaccttaagggaaatagaggatcacacacctcctgagcaaaaacatgaatccaatttgagtccaaatagtctaggtaacacttttcatgaaatttagattgatagtactgctaatgatgatcttgatgttcttattgcgttaaggaaaggtgtgaaagcatgtacccaacattctatctacaatcattcatatgacatagactaccaagcgacttttgctcttgttgctaagctcgatacaattcaggttttgttatactttgaagctaacctagattggtcccttcatcaattagatgttaaaaatgctttcctcaatgatgacttggaaaaggaaatgtacatgaaaatttcacccggttttaagacaagaagcaatgttaacaaagtgtgcaagttttggaagtctctgtatggtcttaagcaatcgcataaagcgtggtttgacagattcacaaaagcagtcaaggagcatgagtactcttagggataagctgatcataccttatttaccaaattctctctaaatgggaagattgctattctcattgtttatattaacgatatcattgtgattgggattgtactaaagaaatggagtgctcaaaggaagcttttgctagagaatttgaaatcaaagacctaggaactttaagatactttctaggcatggaggtttcttattaaaaaaaaaaaagcattgtggtttctcaacgtaagtacatcttggatgtactgaaagaaactggaatgttaggatgcaaacctatagacacttcgatggaatcaaattataagattggtttaaaagaagatagtcttctagttggcataggaagatatcaacaacttgttggaaagctcatttatctctctcacacaaggcctagcatgtgtttccagttagtgttgtaagtcaattcatgaacgaacccaataagcccactgaagaacatcttgaagtagtttataggatcggttgatacttagaaatggctcttggaaaaagaatattttttcgaaaaggaacaagtgaggaagttgaagtctactcaaatgctgattaggttggatcaattatagacggaaggtcaactgggctattgcacctatgtatgggaaaacttggtggcttggcatggcaagaagcaattttttgttacaaggagtattgtcgaggtacagtatacggctttaactgaagtatatgattgaaaagattgcttgataaattataaatttcaacaaaagaagctaatgaaggtgttctgtgacaatttggctacaatcagtattgctaaaaatcttgttcatcatgatagcactaagcatgtggagttggattgttatttcatcaaagaaaaatttgaaggggtactaaacttggttcatacttctacacatcttcaagtaactgatgttctaatgaaaaccctttcaagaataaagtttgaagaattgacttccaaggtgggaatgattgacatctattccccaacttgaagggagtttgagtttccaatttaattcctaacttttaggaattagtttcctagtcttttaggattagattctgattttatttcctattttaaataaagagataaggatgattgtatctgcaaactctattttaattttgcttatatctcttattttaagggattgtttgttactagaattgtagggattcaatgacaggtctattgtcatgcttcttttatatattctagctttttctactgtgttatgtgatataagaaaaattagagttttcctctctaatatatatatttatgttaagaatgggatttaagcttgaagtgttactaaaatccttttttgtctctctacaatctaagatgttcaaaattttgtatggctttatggttgtgcttagttgcattgcacagaaaggatcagcttgggtatttaaaaaggttcaaagatcacatactcagaaatgaggctgcaatttaatggcacatgacatatatgacaaatttgaggaccttggttggagccttgcttttgtgcttggttaagtgaattttttttagagtttaaataaaaagctatcccacatcaataatgtgaaaaccaaaaaagctctatttaaaagatggtggcccctatgctaccatagctcatgacggattaatcccaagttgaaaaaggtgctgacatggcaccagaaaaatcgtcgataacactgaaaaatcggtgtaatgttggtatatcgctgataaataggcgaaaaattagggaaaaatgaaaaaaattggatgggcaagatgtctactttagttgtcatgttggagccttccaatatccaaaatattggcgatatttgacattttaattatggaatcaatatccatataaagttcctatcatcagcataatgttttatcacctttgtcctttttgaggggtttcaaaagattgaggtagcatggtatgctatacctttttggtcaaggttcttaaggcattttacagctaacttttgttcttgaattctggtaaggctcaaagattgagccagagaatcaaaacatttctatcttttatgcaatatacagtagtctcttatgacccttaataagacaattttcctaattctttctctttctttgcaaaagtaggaaaagagatggaaaaggagtattatttagacctaaaagaaatagaaaattttctattttcttagactaaaaaaggtagaaactttgataaaaagtcaactaccaaccaaaatagaaatttaacaaaccatggcaagccccaagatgaactttaatcatccatactgtctcaaattaaggtttggccattggaacaagcctttgcgcttctcttgtagttcaaaggatatttccaatgttgttccccatctctttaattcaattttaaactttagaataacccctatgattactgattaaataaagctttgctgagaaaggacagttatgttgtagtgttttcctccattgagtttagaattatggattattatatggactgtcaagtgctcatttaatgctcatttgtgatctcataatcattttcttactagttaacaattttatgcataacgcattttgtgagtttattgccctaacccctttgctttactattttgaaatgatttcgtgttgaactagttgatataggatccatttatgaaaaaaaaggttcccattgagggcttagatcctagaaaatccctaggctatataaatttgcatatcagaacaaacttatgatcttttgggaatggattgaagaagttgaaaatgatgacatcaggatgataagggttagtgaagctgatgaaagtgggaatttctgtttttctagcagcatcctgtctgtctgtctgcctatctgtctctcttcacacgaacatgtgcatgcaccgaatttgccttcacttcctttgctttctttctccattttttcccccatcactttcgttcgttgcttccttttctgtgcttctgtttttctgtttttcatattttatttatttatttattttcctaggtgggttttgattctttgtaatgcttacacgacccccaatgtgattattatgcaactgatgacttcggtataatagtaagaagggaaagataagataaaaaaaaaattacatcaggaaatgggtgaaaagaagcatcttgtcactttatcttgttgtattgtaataatctaagttttcaactgtagttggagtctttatgaatatgatggaatgctacatgtactaaagaaattcaaagttgattatgaaacagtgaagctaatttactcctaatatgacagagcaaactggtgaactgatgtagaaatatttagggttatggaggttcctctgctactcgtgattagggattgaaatcctgaactgcttagccttaaaagaagcgaaatataatagggatgagataaaatattggatagaatagggaaaccgcttttgttgtattacaaacacatggttgctatagggacccaagtttgcgtttgtgatgcatgaacattcagagcaaagttgacaacagctgaccattctcatgctttttgtcagatcatccaagcattagtcattgatgactgcatttttgtccaaagaagtgcttaccttttgctctatgcttccaataattatcttttggttgtcttctttgtcttctttcaagtggaatctaatgaatatgcatattttaattactgcagatcttattcaaaatctcattggcagtggcaagcca

SEQ ID NO: 12842 - DNA, 6762 bp, Vitis vinifera
  Intron number 7 from transcript GSVIVT01034028001 (locus G SVIVG01034028001) derived from phytozome v7.0 (chr-ID chr8 ; pos 15729378 to 15736139)
aaagtgctgcacagaatctgaaagaacaggtttatgtaccttctatgtggtagcaagtgtacatcagaatgagcagaccaacactgcattttaattttggtcatgagaaaatggaaatggattgtagtatgttcactccacaacctagtcaagaccatttctttgatggacatcttcatgttcttgcattatttgtccttttttttttctaaaaaaagaaacaatcgttaagaagggaaggtgtttgctagccaataacatgtggaacataattcttgttattatctgtatcagaaagtagattcaaattcagagcagaatcccaatttggcaactgatgttaacgaatcaaataggaaagaataatgaatgaatgaaatgcagccactttctgagagatgatgtatctgtgattctgtgccaatgtaactgctgccctgttttccttgaattgtatctgactctaacattgctgttgcttccccaatcaatatcaaaactgaaacttgtagtttttgaatctccaaagaaaccttcaaacttctttggaccctgtttactgctatcatctcctggctgtgaagaaaaccttttatcgtttcaaaacctacacaagccaccctctggagcaatggggattgtgtattttaggtgtgagctggacattctcaaaaaaataaaaaataaaaaattgaggacgccctatctttcgtctgcgtctctggtaaagttttaggctaagttgctcttgagacttgttacaaacaccgtcaagaaagggattggaaaaaaaattctcttccaatattttttagggttaaattattgacctttagatttagatgtttccaaccttatgttgaaagtgttgaagacaacctggaagacctaaagattttctgcctaataatttgtccttgagctttgccaccaagatggcggaaagctcataaggtggaggctaagacgttatgtagaacgtaagggaggatggtggaagattgaaaccctaatctaggtatttatatgatttccactaagcttgttacttgaattcctcttgaacttaggttacttaatctagtccaaaatatgttttaatttattaattaatctaacaaaattccaattaattagttagcctagtctagagatgttgttcatcaattcttgtgcaatcttgcataattatcaaaatgtccttatacacataagtgaaccaaaagttgatctaaccctcataagtcgtatcaacaaggtatataagctcaaacgaggaccactagaacccataggacaatattgggtcccttagaattgaactctaaaattgactcaacattccactacaaagagttaattgcgatctgataccttatatatatgacaatgagatactaagtacttgagtccatgacttactatccattatacatagtttccacataaactaatatttgtaatctaacaaagtgaaagctattactttctcaagattacttctatcatttttaagtttcaaatcctcctatgatatgatcaattgatatatcttactttaccaaagctaatgtcaagttccactttaaaaactattatgaccatagtttaccagaacacatccttaggatcacctacgaaaacacattgtcttaattctatgatatatcatggtacttctattgaaaatacttgttgctatatgtttctattaatagtaacttaattcataggaaatatataatcactttaggctcatactcataggtcaaagtcattactaactttagcacaaactcaatgttctctaaaagttgagagacagtacaacatagtagtttggtgaaattatgataactcgatagtcttacatcatgactcactataagtcttatctaatgtgtaaccgtacacactagtgcacttaccacatgaagctcatctcgatagccaagaccaaccatttctcaaattagaaggttatgcattacaacctttaatgaattgcctaagtccataaaccgattatgagcaagtcatttacttgtaaggaacccatgacttagattttctatgtaacttctaatgtacctaagtcatatataatgtaaaatatacaagtgagaaaaattataagatgtaatgtataaaataagaataaatttaagtgtaattggaattttattaaataaataataaagtctgaatttgttacatcatattatgcttttgagggttctatcccatcaataacatgactaatgcattggtaagtcactaagtgttcataagaaccacatagggttgtacacgttgccttaagctcatcctcttccatgatcctaacccggtagttgcctaactttaagtctaactttgtgaagtgcctagcttcaccaagttgatcgaataagttaacaacaacaagaatagggtacttgttttttaccctcaccttattgagtgtctaatagtttatgcacatttgtaaggatttattgtgtttcttctagaataggaccactacgccataaggagacttagatggttggatggaccctacatttgacaactctttcaattatctccttaggttttccagctcaagcaatgcgatcatgtacaaccccaaagcatggggcttgactcttgaatttagctcaatcttatgatcctccttaattcttagcgggagtctcttagacaactttagtaacattacatcattaaattcattaaggactcccttgatttcctcaggcatggtttcctttgtggaatcctctttatcctccctaagtatggccaaacaagtaaccttcttcttcttcaaccccatctttacttacatagctgatagtaacgggcccttgggtgtacttcggtgatcatgaggactaagcatatcgtctcctcctctaggataaccatcgagcataagaatgatagtggcactactttaactttttctaggaaatccattcctagcaccaccttgaagtcattcatgggtgctactatgaagttgatctagccttctcatgtgttaatatgtaggttaatgctacaccttataatggcttggcaacaaatttgattgccttaattcatccactttccttggatgcatggaactttaatctcttacctcatccacaaagacaaagttgtgtatgacactcatgtccattatagttttgatgagttttcctttcacataggcttctaagcacatcaaccctttattctaaggcattattggcactaacttagtcttaagggtgtttaagagctgcattgacctgagcatcatccttcttttcttttctcactgatcatcacatagtgtcttccttttaaggaaatttcacacccatgtggaacgtcacataggaaacaattcattctaggcatgaacttcttttattgtctttacccttgtcttccttaccactaaaggccttacttgacccttctttgatagctatatagctcttcgaccctttgtccttttaccttggtgtggttaccctttgagggctttggcttaaaagagctttctttcttgtgttctaccaaagactccattattgtcatggttatcacaaggtcttagacaccatggtgccttaacttttacttggtccaactttgtaggttatccatgaaattgaaaagtagttcatcctcctctatcatgttaggaagctcaaacataagtgtagagaactttttaacatactcacaaatcactcttatgtatttgagatatttcatggtcttcttcactaggtaagccacatccttgagatagaattacctcttaatctcccttttgaaatcctctcttgtgtagtaaggctggtttctcatccacaagtttgtttactagtcatcttttcaaccttggagcttgatatgcttcattcacttattatattgttcacctcacaaccatgctctaatacaacttatcatagattgaggtgtttactaagaacttatgcaacacttagacaactcaagccacttaagttgctaagtaagccttccccacatacttaacttaagaggttaagcaatattataccactcataagttagaacaaattgaagctttattgcactaaaatgctttactaggctctcaagtccttagtgccttggtcaaatgaggacaccacttatttataggcaccaagagaactctctggaaccctcaaaggttccttacatctttagaattctttagaaatccctacacaaatgctatgtaccaagagttctcatgaactctctaaaacattccacagtactccactttctcttatccatgtgtgaaaatatgtggatgtcctcaagcttctctagaattctctctacactttttcattgatagatatggagatgacttcactttctcccatccatgtggggaaatgtaggatgtctccaaactttcctagaattctttacacctctctactagtagacatatgtaaatgacttcaggttattctagaatcttgctcccttataaaagctcaagtgatggatcatttaatcgaaaggctaatggcctaaggggctactattagtctttctcacttgagaaaaccatgtttgacagctagctttgcatttctttttttgagaaaaataaaataaaatcctacacacccaacaccttaaaccggtggctactgcatccaaacttaccatgacctgactcaaaacagcctattaggacaaaaatggtctgccaaatccatggataaaccctagcatattattcaaaccatggcaacatttctctttcttcctcaaccctcttgcccaacacaaccatatcaaattcacttacctctcttcaatattctatcttcaaaaacaccaaaaaccaaaaccactcaaagttatcatcgatatctaggatggagctcttgtgtgatgtcccacatcggataggggagaatgttcatgtcgttatatatatagaggctcctcttaaccaagtatacgcgttttaaagccgtgaaagtccctttaagtccaaagcgaacaatatctacacggttgggagcgggtcattacaaatggtatcagaattgatccccgaccccggtgtgggggtttgtttggccctgtaaggggtgtttgtctgtttggccccgcaatcccatgggacacaacgaggacgttgtgtctgcatggaggggtgtttgtgatgtcccacatcggaaggggaaaaatttcctggcgctatatatgtaaaagctcctcttaatcaaatagacgcgttttaaaattgtgagggaccctttgggcctaaagcggacaatatctacatggttgggtgcgggccattacatcttgagacactaaatctaacttgtagaggccgaaaggcgctaccacatcttcttcttctcaaacaagacctcacgaaaacaaactcaaaaattgaagtgaaggtgactaaacaagaacaattaagcactatgaggacaattacaatggaacccatacgatgacctacattgatatgctactccgatgttgcacaaaatgagtttgtacccacaatataggtctcgaagcaccacgtggattcaaacatttattgatttattgagagtggaggatgttgtaataatacatctagacatttattaagggtagaagttctgtaatgggacttgctatagttctactacagttcataagagctcttatgaactctccatgggccatcattgaatgttatgatatcgcacatcatattggaaggagagtagccttcatggggaaggttgggcgggatgaattgggggaggagttggtttttactatgaataaagagagtacagacaaacgattaagtttgaatcaaatgttatcttataaattaagtttgagattcaaatgtgaatatgagaattaagtttgagaatgggaagatgatgactaacattgcgaaacaattctaatttatcataatgcattcatgcaatttattctaccaataatttatgggaaagtactttgtaatttatatgggatcttacatacaggttaagattatctaaccgatggtgtgcttttgtttttcgatttgaatttgtccttccctttgtggacattgcatgatgaaccaagcaaattgattgaaaaagctcggaaccaggcagacatcattgaggtgaccaaataagacctagagtttctcttagatgaagatcatcatgagaagaagagaaaccactggcctcactatcatgctgaaagttatgagaaaccaagaacagaagagattattaccataacacccgtgatgaaatatctccattgtggcatgagggattgaaatttttgttcgactgatggaactcttcgggttcagtattattccccatcttttgatggtgtggtggttggaacataggatgtgcttataaacacccttcacttgtgatagaaccggatctgatgatgctattttttttttaataggttttaagctgaccaccttcctgagagtatgaaaatcaagatactttggaggggcagcttccgtttgccattgctgcaggaatcatatcacaatggacgattggtgcaaagtcctgcacagaatctgaaagaacaggtttatgcaccttctgtgtggtagcaggtgtgcaacagaatgagcagacccacactgcattttaattttggtaatgagaaaatagactgtagtttgtacactactacttttaa

SEQ ID NO: 12843 - DNA, 1913 bp, Vitis vinifera
  Intron number 1 from transcript GSVIVT01007921001 (locus G SVIVG01007921001) derived from phytozome v7.0 (chr-ID chr1 7; pos 7521368 to 7523280)
atctcagtcgggtatggctttccttgttcaccaaccttcgttgtctgcttagagatgggctataacatgagaagtgtgttaaattagttaagaagcaaaaaattttggaaagtgatgaatcataagatgaactttctgataaatcaacgcgtttatttttttaatttttatttatttatttatttatatatcttgcagtctgttgtttccttgggtatatgcttctgttgaaatctgtatgtctcaggatgaagttcctagctataaaatatatagatttggaaatatgttcagatcaagggtatttaagataagaattgagattgcctttagtcatcttcatagtgcatagcattctttgtgcaagggttaattctgttttaatctcagaatgggaattctgtgtatgtgtgcatggcttatgaattaaggattttcttatataggatttctagtcatgttaatagaattgaatgggaattaatctgcatcggcaaactaactacttttccctctgtcatctttttagcatatagccttcttcatatgggatttagattctgttattgctcaaggattggaaggaaaatgattgcaaatgtatgcacatacactaggcataaaggtcaaagtttagttcctgtgaaatagatgaataataaatcaacagcattcagcattagttgatggagttggttttttcttttaaaaagatatttttaatgagaatggagtaggtaatcttcaggattcccttgcaaagatattataggcaatcatgtcaatattcgcaaagttttgctctttataattccatcacatctgttattagatgatttcacagcttcctgaaaaaacgcatctagaggcttaatattgcaactaataactatcagaattagaaaatgtcaggacttgtgtctttgatagagatggtcaggatccattaatagctggagtggtcctcatagacataatttcttccttatttagttctatgaggtgttgctgtatctggtacatgtggtttttgattgctagaaggaaagaacttgtctatgtacataaacactatttggagtagcatttaagtacaagtaattactattgtggtgggattgaattttttttgtttgggacttgtattttaaaaacatttttattaaagataaagatagttattgtcatttttgaaaattttaattaaataaacatttgcttcctgcattgcatttgaggaaaagcatgagcctccctactttaaaatgcagataaattatatgctaggaagcagggcccatggttgagtgtttaatccaaacactcttaaaaaattgcattaaaccttcaaatgtagtttgtagcatttgagaagtttttgcaaacagcctaatagttctttgcaggctgatgtgtgtcccaacatgatttatctgtaggttactccttttccatcttgctcttagactacttaatgcaagatgcttattttaacctaacagccttatgaataggatctttcataattttgctccatcatctttttgggtggaaagtggaacatgtgcatctccatttgaccaataatgttagtaatatatccaagagttgagactcattcaaacaaatccaattagatgttcttcagcagtcaatgtagtgaatgtagttttggcccagatgtgtagagggctatgaattgtatgtttccttgaactagaggatgttgcttatcccacatttcaatcttgagctggattttcagaaatgcttgagaggtcatgtggttcttcctgctttggtatgctggattttattgcctgatatttagtattaaaagagacatttcattgattattatttgatgtttgatttcagggtgagaagcttctgggaagtcttggaggaatctt

SEQ ID NO: 12844 - DNA, 7985 bp, Vitis vinifera
  Intron number 11 from transcript GSVIVT01023660001 (locus GSVIVG01023660001) derived from phytozome v7.0 (chr-ID chr 11; pos 8684040 to 8692024)
aaacctgccgacgtttattcagaaattgctgctaggtataatttcttttgtgaggatggaactcattcgttgtgatcatgtccatttgaattgtgattgaagcacttgttttccttttcaacttcttcatggataaacctaataaaaaactgaagccgaactggtttctcaattttttgaattcaaattgattacaaagctggagattacaactatttaaatagatagctagagaatagctaacaattctactgcctagaaactaggagacttattcaaactcagttacgacctgacaacaaagaaggatgggttgctaaggcttgggaggaagacgaaggaggaggtagctgggggcttcgttttaacagacaccttaatgattgggaggtgggagaagtcgaaagcttattaagtaagcttcatccattgaccattagaagaggtgtggaggacttgttccggtggaaagagaataagaatggaaccttttctgtcaagtccttttatagctcattctcaagggattccaaaccccccttcctggctagaactatttggacgccttgggttccaattagggctagtttctttggttgggaggtggcttggaataggttgctcaccacagaccgcctgaagagatttggttggagcatccccaacagatgcttcttgtgtaaacataaggaggaaaccacagatcaccttctactgttttgtgagaaagccagaatgttatggctcctaattttctccctgtttggggtgcaatgggtgatgcactccacggtgaaaaaacacctcctaggttggcatggttcttttgtgggcaagaaaaggaagaaagcttggagagctacccccctctgcttgatgtggaccatttggagagaaagaaataggagagcattcgatgatatggagaggaatgatcaagacattaaatccatttttttgtacacttttgtgaattgggctagggtgtatatagaggaacacactttgtctttgatagattttgtagactggctagccaccaagtaagggtcatgtttgttttgtccctttgtttttttgcttctttgtctttggtatactccgtgtatgcctttctctagtctttggctcttaatgaaatctatttacctatcaaaaaaaagatttaaattgaaactctaaacaataattttaaaaaataggaactaagagggtgtttgtttttttagatttttgttgaaagcaaatccgcttttagactttaagttgtttgtttttctacttttttatgacttattataaactttttgctgaataggaaaagctaaaatatttgactttttctaaatgggaaaagcaatatgttgatttttctttactttttaatgcttattagaaataaaatattacaaaaacaaataacctaatacttaacaccctgaaccattaagttctctttagagttaaataaaaaaaaataccacctaactattttaatatgatataatcagatgtattatttaaatgaaatagaaatatttgaataatggaaaatatctcctaaatttcctacgctcctcctcaagctagtgcataaatgtttgtctcaaagctgactctcagcagtcccttggtcaaggcattagctacttggcttttagttggcacgtaagtcatgcaaatcacaacttactcaatcttttctttaatgaagtgatgatcaacctcgaaatgctttgttctatcatggtgaattggattatgcgagatgctgatcgcagtcttgttatcactatacattatagctggaccttttgcagagatcttcaattcttccaaaacctttttaatccacatgatttcgcacattccatgagctattgtcctgaattctgcctcagtgcctactccttgccaccacagtttgttttttactcttctaagtgactaaatttccccaaacaaatgaacaatagccagatgtggaccgcctatcttctactgaaccagcctagttcacatctgtatatgcatctgtatatgctttgattcttttgtcatcactattcccaaagtaaattcccttttcaggagttccttttaagtactttagaattctatatgcaacctctaagtgagattcacgaggtgaatgcatattggttgatagtattaatgacaaaagcaacatcaggttgtgtgtgtgaagggtatatcaacttccctaccaatcgttggaagcttcccttgtcaatcggatctcctttgtctaccgctcctagcttctggtttgagtccattggggtttcacaaggtttacatttgagcatttcggtcttctttagtaggtcaagtgcgtacttcctttgtgacattgaaatgtcatttttatttctaacaacccccattcctaaaaaagatctcaaggatcaaaaatctttgacttcaaattcttttgcaagaatcttctttggtgcctccatttcagctacatcatcaccttttagaatcatgtcatccacatacactaccaaaattgttaccttcccatcttttgagtgtttgtagaacattgtgtgatctaattggctctaaaggaagttatatcattttagaactttggaaagtctattaaaccacgctctagaagattgcttaagattgtagagagccttcttcaacctacacacttggtttgggttttttcctttgaaactaggaggtagatctatatacacttcttcctccaaatcgccatttaagaatgcatttttaatgtctagctattgcaatggcctatccaaattggcttctaatgagagtaagatacggatagtgtttagctttgcgacaggtttaaaggtctccaggtagtctatgccataggtttgattgaaaccttttgccatgagaagcaccttatattgatcaatcgagccatcaaacttatacttgattgtaaacacccatctacaacccatagactgctttcctctcggaaaatcttctatttcctatgtttcattttgattcaaagctcacatttcttcaaagacaacattcttccattccaggatagccatagcctccagtaaattctttggaatactattataggaaaggggagaagtaaaagcatggaatgaaggtgacaatcggtgaagtgaaacaaaataaaaaatagaatgagaagtacagcttctaactcctttttgaagtgtaataggaagattcaaatcattggctttttgagaatcaaatttacttgggtttggaacagccaatggttccgttgtttcaagtgtcggaagtgtgagggcatctacttcttttagtttttgcctcgtggactagacatgcagttcggttgaatgttgaggttgtgttgcttccattagtgattcattatctccccctaagatgggatgtactggaactataggcaaggatggtggttgcaattgaacaatgctgggtagaattggtggctaaataggcacagaactggtggctgaacaaaactgggcatttgtgggttattttatggagtttctggaaaaactgaaatgggtagaaacggtggtgttgtttcctattgcaccagagttgtcatctcctattgcaccagtcatggctgtcttagccatcattaggtttgctcagatcaagtatttgagctctgatactaagaaaccgaactggtttctcaactttttgaaattcaaattgattacaaagctggagattacaactatttaaatagatagctagagaatagccaacaattctgctgcctagagcctagaagactttttctaactcagctaacaacctaacacctaaaaaacaggataaaataaatttaaactctaaacaataatttttatttatttaaaaatagctactaattcctagaatttgttataatcagatttattacttaaatgaaatgaaaatatttgaatagaagaaaatatctcctagatttcctacaaaaacatatatcaaagcatttcaggcaattgcatttctttattggatattcttggttccagtggaggatttgttcttagtgaagattgtcaatggattttctttccatagtcctgatgctaggagcatacaaattgagaactgcaatattatgatgatttaggcctaatggttgctacactaagacttctgaggtctttgattaataatcttggtttatttatttatttatcaagagatggaaagaaagaaaggaaaaatttgtagatttagtttgtagttcttagggcggggtgtaagattttttcaatcttgggaaaaagactatacagcaacttggaaagaaaccccacatcaaaacagaatcaaccaagcacatgacttcaactagctttctggttgttggtctacatgctcaagcccgtactttggcattgtcatgcctcaactaactcccttgggtttgaaactagccactcgaaaatctcttgatggtttttctttacatgtgccttcacacatgcatagtttgtatgcagacaagagttgggataaacattatccttccaaggtcgaatcataaaacatctaaaaactgagtgtcatgatttaataatggatcatttatattaaatatctgaaatcacttacaataaattgatgtcctctttgtgctcgtggtaatagcccttttgtgtgtctatgatcatctgacattaaatcacttgatctttgggctctacttttgttagcatctttgtagaaatcagacttggttaaatgatggttcacatctttcccttgatgtggtggttgttcaagagcaagaggaaattgggtgaaaaacatttttattaattttggtaattacaaaggaatatatacaacttaggatcaaaaagaaaaaggaaacttaatgtttataattgacatatattttgattctccttaatctaagctttcctaaatagaataggcaactagaaaatattgtacaaaattaacaattagcacatcaaatcacaattaagaaaatataggagaaaattgggtgaaaaatattctcattgattttggtaattagaaaggaatatatacaacttgggatataaacaaaaaaatgaaactaagtacatatttggaaattgtttttaaaaaggttttcaattctttagaacagaaacagatttgcaacttctaaaacatctttggtaaattttaactgaaaatagttttttaagaatttattctaaaaacagggtaatttcaaagaacaagttggaggtgtcttcatgtattttttatagagtgttttgagaagtaattaaaagtaattagaacacaaagaataggctggaaattttatattatacagaaaagcacaatgactacacgaagaataggttgaggaaaccattgttcatattttagtttacaaacagctttatagtcccttttttctcttggttgtgccttttggcgattgttgtacacttcatgtgtactttggaatgctgtgttggtgcatccttttaatacctatacttttattttacttacataaaaaaaaaagtttacaaacagaattttgttcctaaaaataactgagaaagaataaaaattgatttttgaaatttttttcgagaatgttgccaaaacggaccctaatatttacaattggcctatattcttgattttccttgatcgaattaagaaagcataggagaaaattaaggaaattatggatctggtgcacactttaatagtggtaagaactgctaatacttttctgtagctttgagtgtgcacatttactttgctagctgttataaattcttttttagaacaaattggaggtggtttcatgtatttttttgtagagtgttttgagaagtaattagaacacagaataggctggaaatttttggattgtacatgattggacaatgacttcacgaagaatagattgagaaaatggttttttttttattattttagtttacgaacagaaatttgctcatgaaaataactgagaaagaattgtttttaaaaactgaattttgagaattgtttttgagaatgttgctaaacaaaccctaaatatttatgattggcctgtattcttgattttccttgatcgaagtaagaaagcataggagaaaattaaggaaattaaggatctggtgcacactccaatagtggtaagaactgttaatactttctgtagctttgagcgtataagttactttgcaagctgtcataaattcttttttagaacaaactttatacaaccttttcctggagttaggtaggtattgagtgtctggaaattcatgactattttctggacaagttacatggtgtagaacacttgtcggtatgatttgtttttaatcctggagtattaggatgctaagaaattgttggaatgtcgaggtgtagtctagtttttcttgagaatcaagatctttccaattttcttttgtttgatgcccatgggagaaaaaatgtgtttatgatacatagcattattaatgtgggtaatatgttgtttccttgaatttattgttgatctaccaattttccaacaagtttaagcaattagagtttgggtccacaatgtttatcatgcttcaatacccttctcatatgcggctcccatgtttgcatattgaaggcatagacaaaaatagatctaggcatattacaaatttatgattacagatgattagacaaataaatattggggaggagtttaaatcgagacctccggttaaccaaagctttgacgctatgttgaactaccaattttcataaaagcttgagttattaatatttgggctcataatgtatatcacatttcaacatttatgtttatgtaaaatagaaaaatcttgagaataaattttattgaaattttgtgaattagcatcatgctcttctcttgatgtggtaccggtctaacaataaacaaatatgcatgtatgacaaataccatactcagaagacacatataaatatgcatgtatgacatataccattacttagaagacacatactggtgtctcatcatatttttacatgaacacttgatgcattttgaaggggccatataacacatattctcatcactttgatgacaaactagtatctggttttcttttcttgcactgataattagaaaattatttattcaatgaaaacatgagtgcctaaaagtgaacaggtggatttcttttaaaagagaacttgagtgctcttgatatttaggtaactccacgtggaaaatcaaacattagtttctcttcctacttgtgtctatatttttaataaataacaattatgtttggaggagaaatagtatgaaactagaaatttcctcccaaggcagctgaaagacaaatatagcagggaaaaaggaactaaacaggaaggttggtcaatggaacagatcctgttaatcacccttctttgagcgaagttgagttctagaagtccaagggacaaacgctagtatccctgataaagtttaaaatctcttgaacatggggaggatttatttcctttttggatttttggaggttctatactaagaaaggttttattatgaaacttaaactgactctctctctatataatatttatttatttatatttatattgacttgtttgtttatttgttttgccttattttggatttatgttttcttaagagtaactttagtttccatgttgtgcataagagatggcttttgaaagtttagggcatttcagtgaatcagtccaaaaagatgaatgtccaggtcaatttgtaaaattcacacattgtgacacataattctatttgatagttgatgtactttctgctcagatgcccatctctctgtccttcccctttctgttccccactcctccatttgtactaagtgagtcaaaaaaggattgttaatgtattttgtattttttaatttttgggcagggttcacgaaatc

SEQ ID NO: 12845 - DNA, 5132 bp, Vitis vinifera
  Intron number 5 from transcript GSVIVT01029953001 (locus G SVIVG01029953001) derived from phytozome v7.0 (chr-ID chr8 ; pos 2091896 to 2097027 reverse strand)
tttgataccggacaggtttgctttgaaacagtagtttatttggattctgggattttgtacaagccttttttctgcttcatggcattttagacgaaaattatttagaatgactggtatgcataatttattttcaataggtaaactttgtattttattttttatttttttgtttggtgggggggaaggtttgcctttgggactccaacctcccacacattttaacctccataggaaacattacacatatatacatgctataatgaccattatgtatctttatatatttctatgaaggatgaaatatgtgtttgcttttgaaaagattgaaccacagcttatgctattcattatgataaatcatgtgtgctttgtaccataagataaatcagatcgattattttctgtatcatattactattctaaagcttgaaaagttggaattcatcatagtagtagtagtttggacaaagtagggatcactttgtctttgagagagatttaaaatgtttctttaaggcctagcttaaaaacaattttagaacatttttcctgttcttctagtggcgagtcattgagagaagttgataccacatttcctcaaggccactttgagcactttcagtgaaaattagaatgaaaatgttaagagagatctttttggtgcatgctagtttgaaaaatgaaatgaaaatgagggtttgaatgctaaagtgtagccaaatgagcctttggaaattggttcttttgtgtcttcaaagttcaattcaagtagcatatgagtacaaccattacccaggtaaatatgtctcacaatgctattaaatatatacactgaaaatcatgcattttatcccaatctaatttggaaaacatggttcttgcctttgaatcatcattaatgaaatattgtctagtaaaaaaatttatttttgtaagtacactatccttttgtggttaaatttttttcttactaggcaattcagtcattcaatatctatgttgggattctagagtcataaacacggaacatgtgtcatttgttactttagtctgatgaaactaaagcacctctatcatcgatgtgggatccactataaaaaagaatggtttagagctgatgttaacccctcagaaaagtcagtacccttatgaattacgtagagttaagctattaaagaccaccttaatgaatttgcaggtctattgcatgtatacttccatcatgtttgcttgggtgtttaattggtttaatgcttcagcaaggcttctttaaggcaggcttgagggggtaaagcttgatcttgttaattggaatatgctgtcttcctaagggaggagattgtatgggggtaaggaggcttgcctttgagggatggtctttagagaagggaggtaaggcaaggtactatcactctgttgcgcctggggggcggggcgtttgtggagatttctcttaattgagctttctatttttgttctctgttcttaatgatagagacgttttagtagtaagctacttcaatttaattggatgttgaggcctccaggtccaataggttgacaagcctttccgaaattgaattttgttagggaaaagagagatatgatggttttgttagagactatttaatccttaggagagttatgggaaatagctcatgttctaattgggaagaaagggcattggtgtcaagtcttaaatggattctagactgatcagctttgtgcaaaggctaaaaacgtgatttggtaggtgttcttagattcccatatgcatttgtagaaaggcacttcattttggatgggtgttgagcgatagatgaggattagtttatcaggtgtgggctgcaaacttgatattggaaacccttctaatcatgttaattgggtttcctccttaatatgttacttgtgtaagctttaggaagatagagattaagtgaggtagatcatataacttattgttgcttttcattgcattagtaaatgaggctattttagcttctttgagggttctaagggtctccacgagggatccatcattccctttgcaaggatggtagaaggagtttaataaggattttgagattttgaaatagagtgggaaacacaatccttagtaaagaaggtactcctgtgttggcatggttcctttgttgggagaaagaggaagaaaggttggagagctattcccttatgcctattctggatcatatggaagtagaggaataggcttgcgtttgggaatactaaaaaggctgatcacgttctcaaacaatcatttatgtttacttttgaaatgaattaagagtgtacataagagaccactctttgtccatgttgaacttttattgattggttaagctctatgtagttggtgggagttatattttgtgtatccctctgcttggttatggccttttggggcctttgtatacattgtgtatacttgagtgcactttttgttagattacgttaatataaatcttatttgcctattgaaaaagaaaaaaaaaaaaaaatcttaggatctgaagtccatctaaaaaggaccttctctatgtggagtgtgggctcctatgttacatgacacttttcctggtgttagcatcaactggtgatgcaactttcctagcattaaagatcttgggatctgaagtccttccgaaaggggccttctctgtttggagtgtggcttctatgtgacatggcactttatgattgaccaggtaaaaaaaatacccatggcacaaactagacaaataacattgaataactagtcaagtagaggtcacaaaacagaaaatcgactgtatggttcaagtcaaaaacaaccatttcacaatggattcttttgtaacctatctcctaagtcagttctatgtagtgttttagcatatgtgtggcctgtgctcagctataacattttttcatgcaataaaatgagaaaatttgaacccgagatgtatcctaaccccatctaacctttaccacttgaagcaggattaggaatatgtttagttgccaacatctagaattgggaatgaaaaatctattttcaaaatgaatccccagattgtaatagatgtaagattctcattctaatgtcgatgatattgggaatttgagattcttgtcaagttttattcttatttttgcatttggttattggaggaattgcttgagaattaatttgaatatacatgataacctataaaataatattcatgaagatcagatttatttataaccaagaggggcttgagaattaatctaaatatacatgataacctataatataatatttatgaaggtcagatttatttataatcgagggggaaataaaaatgaattgttcattttccttttattctcattctcaaggaacgagaataaaagaatataagttttgtggataagatatattagagaataaaagaatataaattttatatggaaaagatatattcccacttttttttttttttttttgataagtaaacacggaatatattaacacaaggcaaaaaagccgcaaaacatatagggagtatacaaggcagcaaaggcctcacaaccaaaaagagacaaaaaactcaccagcccttaaatggaggctaaccactccaagaatcctataagggagcgtggctccgctccactatacaattttgcccagccccacacattacaaacaaaagaattcttaattttttgtatagctaaccccccccctaaaagctaatctattcttctccttccaaaccatccaaaaaataaataacggaatggatctccaaatttttttcctctttttacccacaaacgagcccttccagctaagtagaacctcctttacagtttctggaaaaacccattgggcaccgaacaaaccaaggacaatctcccacaacactctagccactgtacaatgaatgagcaaatgatttacatttcctcttcgctaccagataaaaagcattgattaggaagctgccaccctctcttttgaagtctattaagggtaagaaccttcccccatgcggcttcccacacaaagaacgctaatttagttggaactctatccacccaaatgccatttttggggaaaacggagacaatgggactgatcagcaagctgtacgcatacttaacaccaaactgcccgttttttcctcccttccaagagatcgagtcttcctccaaggtaatcctttggccccttaaggctcggagtaattcacctaccaagtccaactcccaataaggctcagaatataagatatattcccacttttgaggtcatcttatatccccaaaaaatcaaaacttccaaagttatgtgcattttaagtatactacttatatttagaaataagatgcttatttcttagtaaagaattagggatacacatgaacccatcggcattacacattctaaggggtaattctgttctgattgctgttatgttactgaaatactgtttttttcttcaatatttgttttcatatgcattttacttaacagtattcccacatgttcacgagtggtatgagatgttccccatcttatgtgcatttaactataaaaattgcctctttaacttcctttccaactctaataaattctcttgcctctcttcttcccttaagaagatgtgatgtgaatcttgtggagctttatgaaagcagctaaagacactagttgtttaagaaaggttgtctggttttggaaaattttgttaaaactttcagacaagcaacaaatttggcagatatattgtctttaagtttaattgcatattaaaagtagtacaagccatgctctgacctcctttccaatctatatcatatggttataaatgatcagttctttatgggaagggcattatcaccacctggaatagttttgtgtcctgcaatagttctcactcgagttggatatatagatttttggagttttttttttttctttgttgactaactttttaatcctttttaaaagttcttccttacaggttatgtcattgtgttatttattagggtttattttgtagggtccaggaaattaattttttttccccctcttaaccataggcctcaagggtactgaaattggaaagaaatagtct

SEQ ID NO: 12846 - DNA, 18633 bp, Vitis vinifera
  Intron number 6 from transcript GSVIVT01024509001 (locus G SVIVG01024509001) derived from phytozome v7.0 (chr-ID chr6 ; pos 9431228 to 9449860 reverse strand)
aagttagccttcaaaggattcaaataaagtataaggtatgcatgcaaagcaatgtattattgtctttggttactcttttaatatttatgggcatgtagctaatagctttctcacactactacaaaaattgaaaataatgacatttcattccttggaacttttaaaaagcatcattatttgatattattttatggcgcttattgaaaatgcatcattatttaatataatgtatttatgttatggcgcttattgaaagtgtcattgttttacatactatttgaaggatgcattggtatatagtgatgcttattggaagcgtcattgtcttacatattaattttcccttttgcctaagtatacaatgacgctcattagaagcatcattgtttgtttaattagtattattttttcttggcacttctataagtgccattgaataaacatatataaatatacggctctctttaaaatatttttctctcaaccatcttttaccgccaaacactccctccatttcaaaactcgacaaacccctaaaaactcaaagctcatatcggtgggtgaaatcaatgactgaatgagaagcaatcggaaactcattgcaggtccctacttgtcaatcgttagtggttgaaatccaaagttgcaagaaaccctttttttctccaagaaatatactagtaacaagtcctgaacctttcctcatgggtgaaatccaccattaagaagccctaatccattcctcacttataaaccctaccatcaaaatgttgtaaccctttggaagtaaccctacctaacatcaaacaattccacatgtggccacgactagaaaaacccaatatgaatgaatattagtgatgtttgttgttgctttgattccaatatttgtgagtggtaagcccttttctctctccacatttttcattctcatatttattttagggggtttttttcttttgtttggtgttcttgtgatttttgggatgatttaagtgaccctgggtttcagaggaagaaaagggttgctagctataaggcttattctatggaaggaaaggtgaagggggtgtttgaggaagagcttcagatggcttaaggctaggtacggtaccactggatattattatgattattattttgttttaaaattttgtgtttgtaagttttgtgcctctgttttaagtttgtgtcatcttaaaattgaggttcatggattgggatcataaattcaagatgtgggttgtccatatacaacttttttcatcctaatatttccttattcaatttctgggttcaactcttttgatcaaaatatataatttttttttttaacattttgaaagtcatatacatgtatataaattgtggggtagttgagggaccactaaggaagagtttcaagatgccttaaggtttcaagatgctttaaggttatatatataaagtagtttatggattgattatttcttgggtatcattatttcttatattttgatgtgtaaaatgtgtagcaatcacaaaactttgtaataaattcatgacatccatggggcaggtcacagatagcctaattattttggcatcatggggtttgaatccattaatttagcattttagatttggcttaataaattctttgttttgaggttgtctgataataaacaacaacgactgtgtgctcttaattcttttaattagactggatgttttgaacaccaatttttttttactgtaggtttattctgataattacataaagcttggatcttagagatttcatatgttttaacttctaatcttttatgctagtttcctataatgtatattattgggtttggagacttgaattcttgaagaattaacctggctatttgtatctatagagttttagttgagtctttcagttttgttttttacttattttgagagtgtttgaataattcgaaaattgttctcacaaggattttggttaagtaacatggaacttgacatttaaaagaacaaatttggtttaataaagaaggatgaatcactattactgtgtggccttggtttgcatgaatcaaaagctccccattttattctaggagacaaaatagctggttattatccttcctgacagccttcaaaaaatgcattaaatatacattatggggaagcaatttatgtgaatacagaggaccttgaaataaatatgtttatgccatagcagtttatgttaaatatagaggaccattaacaacaagactatgggtattaccattataagtttcaaatgttggactatgttccattgaaatagacatgagatatggacatgatatgccaaggatgagccaacataacaaattcttaagaggtaaacataaaaacaggtagtatgaatacctacacacacattatcctcctacagtgaatcaagaggcatctagtttttatgggactaaacctaaacctacttctaatttttagcacatgaataatagatgttcttatagatgttgcatatgaatattaaagtttttggatccaagtatgatatggtacttgataagttcagtgcaattcacttgttggtagtgttagctttctaaagttgactgagttggcaagcatcaagcaaagttaaattttttacttgttttccttatttgctaccccatatttctatattgttcactaacattaaaataagctttcctaactaagatttctattttgttgacagaaattggagatgagctttatttggaattggaaacgattatgtcattcatacaagaattaaataaatagaggttttgttgcaaatttgagattgacaaacaaaattctcttgtcaaatgtttatgagacatcaatgcatggagagtcataagaaatgactattgaagctttaagtgtaaatagtttgaaagaaagcacctgatagatttatgggaatttgtcttgattaagatgttgggtattggaatcaggctttagtgtttattcttggtagttatattggttggctaaggatcataaagcatttggaatttattctattaacatttatttttctctatatactgagttattgacggttaagcttgcttccaaaatttgatgtagcatgcccttaaagaggaaccaaaggaaaagtacctaatgaatatttcaagtgatatctttgaacttaatggttgaatttttcctcaactcaaaaagcagtggttttggttaatggttctcatgttcttttcctcctaacactacacataaattttaaggttgcaaattttcaataccagccatgttgttcccacctctttgataaactcataatatgtcttaaattaatttggtagttccaggtttactttgattacagttaatgtaaatatagtacagaaggcattaaaagtttgtctcaattatcatttatgaatagaaagtctccattactctttggccttattattaatagttgttttccttttgtggagttgttgaataatagattttatgaactctttctcacaccacatccatatatacacagccccctagtttctttttggaattgggtgatctctttcaatcgattcttttatcatttttttatattaaacatcactgaatggacccatttaagaacaattagatgattacaaagttatccaagatcaaaattctttatttctatttataatacatgaatagttccttgatattcactttcatggttttgcagctagtgaaggaccatcaagcttgggctttaggagacacctcaaggcaacctcttggaataggtgagatttaatgttgcaaggaaaaccactagttactgttgtactatttttctttttcttaacttcaccttaatcaaaatctctttctatgttttctcatgaatttattgaattattcaataaattttaccatacaacaatttgtttttataacaataggaaagttgcctagaaaatattatatatccaaatagaaagcatatcaaagaattaaaaataaacctgaaatattttttattttataggaatattttatataggataaattctatatggaaatattttggttttatttctatttattatatagtccaggttggatcatacactaaaaggagttaagtttaaattttgatacaaaatggaattgacaccctaatattttttttaattaaatattactatgttatctttatactatttttaataattttttatgaattaattaaatatttaatatatatatatatatatatatatatatataattactatatttaattaattaaatattactatatatatatatattaattaaatattttgatacaatgtagcatgttaaagaattgcaattaaaatttagatgtttatttcttatatcttatcatctttaaaggatgccatgtgggagcaaaatcttgctccccatttgatccccatgtcaagagtatgacagtagtttcaactttcaagcccaataattgattaattggttatatctatgtatatataagtagcattctataagatatttgtaaaatatgaaattttagaagaattatattattttctagatagagttttagcctaggcttgatattgaaaattttgaagagaatatgagcaatgaaatacaataaagtgaataaatggaaagattcaaagaaaaataagatacggatttaaatttaataattttctttcaaggtcatttttcttctttttatataaatgtcttttgatcaaattcattaaatttagttttattttacacttttctttttctactttctacattttctataaattctattttgattttggaaaaaaggatgggaaaaatataattttagtaaatatactaattctctaatccaaataagtaaaatcaatttaataacacaaatactattgaatctactttaagtatattgaaggtggtttgggagcatttttcataacgttggaagtctttggtaatgattgaaaaaacttttctcataaacacttaacatttggtaaattttaattgtgattttgaaattttagattaccaaattataatttttgaactaacccatgaaatatgcttttttcacaaattattttttggtaacttataatatatatatatatatatatatattataagttattgcctaaaatattgtgaaatgaattttaaataatttttttaaattatttctaataaaagtgttgccaataaaaacactataaactaacattaagagctctttagatgaggagaagccctttggatggagatgaagagttagatgaggagagagcaaaaagtgatattatttatattatttcattaaaaaaaaatggaataacaataaataaaggggatgaaggcaaatataaaattcaaagtgcctgttaatttgaagagctagggaaaaaaagtgggatttcctattatttgaagaagaaagatgatagagaaagtgggacccatattgtagcttgtagattgccatcttgtgttacggtcaaattatcaatttttagtttctattattattattattactattactactactactactgttattttacttttgttttatgaagtgttgggataggcatcctatattaggaattcccatcattttctatttagctaggagatgaattctctctttaccaaattattttaagagaatgaaagagactaataaataaataataatagtaggaattctcttatcccattcgaaaggatctcatctcataattatccatgattgtttatgtctctaacatgaccacttgatgaaatgtggagggaagtggggtaaatggtcaatactactggaaggattcctctttggctaataggtaatgaaccttttttcaagaagatgttctaagctgtgaaaaggttcttatgcttccatctttaatactagatactatagatagacatgatagacatgataaaatgagagttatgttgctaggttgtaataattcaataagtaattatgttctaattttaattaaatattcatgcatgaaaccttagatttctcgttcaagtatcattgtaaaacaaaagtttctcttattacatgataaagacatttaagttgtcaaaaggtgaaaatggttttatctaaactagtttcaagttgtctagaatgtgataaagatcctttctttacaaaagatacttgaattgtctgattggacagtgtaggaaaacataatatctataaagttaactacttgttcttaattcaatttttagaaattttggaagtcttccctcttgttctctaggtgcatatttggataaggtcacatattatgccttgtccattttgtgtacttggagaactataaggaagtgttatcgaaatttctttaaaatggaattaagcacattggcagtttacacatagggattatgtattcctatataggataggaaccactaccaaattttgaatgtcagacatgttagaatgtataaaacatgcataagaagtctctatttcatattgttcatcaaattttattgaggatgaggttaaaaaaattattgcatttgaatcctaattgtctgtcaataggaaaacaaatagattttttcaatgttagaaatgacaaattgaaagttttgaatgcttagtaaaggtaatgcttccaaggcttacttgtccttctttgcttatgtttgttaaataagaattgagtgtacttgttatgcacaaatgaatcattcttggatgccaaaagatagaatatcaaaggactacgaggatggggttgaaaattttattgcatttgcagttcaaaattctgcaaatcaaatgtccatgtctacagtgtggaaatttgatattccatacacctcaaaagattaaagaacatttgttcttttatgggatttatcaaagttaccatacttggtattggcatggggaggtagctccgagttgtgaaccaccaactataagggcagcatgttttgatagaattgagattggtaatgtggattatacagttgaaatggttgaagttgcacaagacgattgcaaggctaatctagaattatttgaaaggttgtttgaagatgctgaaaaacctttatatctcagttgcaaaaacttcacaaagttatctaaattagttaaattatataatttgaaagcaaaatatgggtggtatgataaaagcttctttgagctattaagattgcttggtgatatgttacctctcaagaatgagagaccattgtttatgtatgaagcaaaaaaaaaacattgaatgtagtgggaatggaatatgaaaaaatacatgcacgtctcaatgattgcatactttataagaattaagttaaaagatgcatctgcatatcctacatgtggagtttcaaggtggaaggtgaatagaagaggaacgaagaagagtaagggagttcctgctaaagtaatgtggtattttccaccaatcccacgacttaaaaggatgtttcaatcctcaaaaatcgcaaaagatcttatatggcatgcacaaggtgaagaatttgataggaaaatgcgtcatccatcggactcccgctcatggaaggtaattgaccatagatggcccgattttgctgtagattctagaaaccttagacttgccattttaatatatggtataaatccttatagttccttgagtaaaagacacagttgctggccagtcatcatgatcacttgtaaccttccaccgtggttatgcatgaagaggaaatttatgatgttatctttgttaatattgggtccacgacaacctgataatgacatagatatctatttaccacctctgattgaagaccttaaaactttgtgggaggtaggggtagaagcttatgatgtatattaaagaaaggtctttacattaagggttgttttcttatgggcaataaatgattttcctacgtatggcaacttgtctggttgcacaaccaaaggatattttgtttgtccaatttgtggagaggggacttattcacataggttgaagcatggaagaaatgactcatttacaagccatagacgtttttttccatgcaatcatccttttagaaaacaaaaaaaggcattcaatggtgagcaagagtttcgattgccttcacaaccattgagttgagaggaaatactattgacaatcaatgacatttgtaatttatggggaaaaaagggttagatatgataaatccaaagtgacttctactaattattggaaaaaaaaaatcatattctttgaacttgtgtattggagatatttgcatgttcgtcataatttggatgtaatacacattgagaaaaatatttgtgaaagcatcattagtacattactcaacatcccaaggaaaacaaaatatgcacttaattctcatttagaccttatggacatgggcttaatgcgtgaattggcaccaaggtttgaaccaaattgaacttacctcccgcctgcgtgttatacattatctagaatagagaaaaaagtattttgtcaaactttagttgacttaaaggttcctgaaggcattgctcaaacattagaaatcttgtgtcaatggaatagttgaagctctatagcctgaaatcccatgattatcatacattaatgcaacagttgttactagtgtcattacgatcacttttgccaaagcatgtacaacattctattgttagattgagtttttttttttttcaacgctctatgtaagaaggtggttgatgtgtctacattggataagttacaaagtgagctagttgtgacattatgcttgcttaaaaagtacttcccaccttccttctttgacattcatgcttcatttgaccgtccatcttgttagagaggcgaggctttgtggaccagtttattttagatggatgtacccatttgaaaggttcatgaaagtattaaaggggtatgtgtgaaactgtaaccaccctaaaggttgtattattgaatgctacattacagagaaagttatcgaattttttacagagtacttataccatgcagatgcaattgggattcctggtggtttgaatattgaccataaagttgggacgcctatacctggaggtcatatcaccaaaattgattctaatttttttatgcaagcacatcattatgtgtgggaaaataaaactatcatccaaccttatattgagtaaggatcaactattttgattttgtgtatagtttacataaactaaatttgggtacttattgttactttcttatacatatcttaatagagagcatatgaaatggttgaaattgaagaatccccgtcaatataagaagcaaaagtggctacaagaagagcacatgcggactttcactcattggttgcgaaaaaaggtattagattgattgtagacattgcaccattcttagcactagtcatagaaattgtaataactatgacttatttaaacaggtagaagtttccattgatgacaaagaatctatatatgaaaccttgaggtggattgcacatggtcctacccactatatgtctgagtaccatggctatgttattaatgggtgtcactacaatacgaaagatcgtgaagaattacgagttacttggaatagtggagtcagcattgtagcaacaacaatactgattactaccaaaaagtgctattttgtagacctaattataatggttttaagcacctttgagtattaatcatattcatttaacccaattaattcattaaggtccttagtaattggttttaaccattttgtggcaagtttacatgtttatatcagcttgtgaatcaattcaagcatgccaaatgatagaggagctacttggacaagttatggcaaagcttttggaagctcaaattcatgaagaaccaagctttggagctccatagccctttgccaaattcgttcaaagtatgcaaggaaagaacaatggagaagaggaaaacagagtgaagaaaacagaggacagcaactgcagttttatttcacacttttggagcacttctcgaagtccattttctacataatatataccatttcaaagctcaggaagtcaagaatccaacgctttaaaccgtgtacaatttggagctgaaatgaggaagatatggcctttggaagaaaactgcatcaagttgagggacaatttctcaccttgcgaaattggaactccaacgtgcgaaatttgaagtacatggcaactgtgcattcgctgtgaagcccaacatgcgaaagtgattttgcaacttacaaacttggatctcaacgtgcgaaagtggattctaagttgcgaaatcaacttgcgaaattttcgcaagtcaccatgcaacgtgcgaaactgggatatttgtgcaccaactcttttagatattttcttcagatatttttatataaatttccattcttctccttgtaatccaccaaccataagatttcttagctaggaaggttggaaaaacttctctatatatattcccttgcatccattgtaaaaaatatcgatcaatatatagatatttaaatatatagactatacagagccttgctctgtttttctttctcctgttcttccccatttctattttcttagtagccaaacagcctctgagggcttttcctcagaggatgattggctaaaacttttagtttctcaaagtatggatgttatgtgatgacttggatgcaatcccatggaaatttctcgcacctggaaggtaaggtagtcgtttttcattaaaggttcattaatgcaaagtttggtttttatttcctttggacaacttccaacggccaatacttgataagcttttggatttctatccattagttatctcctacgagctattggaaggtgaggttttcaattccaagttttgcattaatccgttagaacctatttcaatggccattgaaaggtgagtttatcacttggaatgactttgagttgccaatatttggtaagcttttggctttagaccattagttatctcttacgagccattcaaaggaagtctaaggtgaataaccattgatgaaattgactaccatctgttttgccattttaaaggattaaaacttgatttgctaaatccataccggttcgggaagcaagcatcaccatagttgcaaccccaacgcgaggagcctatcctgagatttccaatttgcataagagccagagcatagctatcctatctttgagaaacttgtttttacaccctttcattttagtctttaatgttagcttagattagtttaaatctttctaaaacatttacaccttcttttaaagctaacatccataagaaaatcacctattttcctaatttgaatatcactagtgtttgcgaaaactcatcccagtgaacgatcctagaaccactatgctatagtagcttggctactttagtaatagtatttaaggtataaattttgttgatacgcctttaaagctaagctaccatgagtcgaatcaaatacaaattgcaagtgctaaggataagaatccagtgtttggtgagctatgtttctatgggattattactgagatttgggagcttgattataccatgttcaggattccagttttcaagtgcaattgggttgacaataagagcagcatcaaagttgatgagtttgggtttacattagttgacttcactaagatggctcataaatcaaatcctttcattttagcatcccaagccaagcaaatattttatgtacaagaccaacttgatccaatatgattagttgttttgtcaactccttaaaaagacttattcaatagaaaggatcctgatggctccatgggtaattctattaaacaccatcttctcattactaccttgtcgcaagttgaatcatttgatacaatggatgactctgatgtcatgtgcatttaaggagactgtgagggattttggattgataacaaatcttctatgtaacaaaaaataggaccttgttctattgatgacaaagttgtcactatgccattaacttattaatattgaaattatgaattttactaattagttgtttacttcttttgtaaggttgttaaattcatcatttctattaatttattgatgccctctttcatgattattattcacatattatgtggctaatttttaaaagtaatttttctaattaaatcattgagtaggtctctattatattgaatatcatcatttttttatatcaatttgtcttatactattgttaagggtaagacaaggatatcaatttgcctcagctcaaaggttgtgatttctagttctataagagaaagggttagtgaagattttatggtaagttctttatttatattttaaaaaaataatgacaaaacatcataatgttgttttctagcatgttaattatttctagtatgctcattttactaatacgtgtttatggtataaaaaatccaatattgcatcatagatttaatggttttacttgtcttttctcattgatgtattataggcatggatccaaagaaagagaaagacatagatccaaaggaaatctatgattataaggaattgaagtagagggataaaattgctcataaagtacaatgttaatggtatctatgtaggagaatcttctgcgcacctaacaagttacttaggtgtattggcacatactcaggtgccaatcaaataacacatggtgagatgtccttatacaattaaaggataagttatgggactctattgaggtggcttaatttcttttatatttgcatggattttctacaatttttatttttctttaaaatttgaaggtactaataactttgtttgtaatttgtagactactttcgcactagacaagaaaagcaaaaggaattgtatgcttacattgggaaaatgttttcgatctttcaaaaatatgttgactatgaaatatattcttcctttcaaagatgagccgaagcttcttaagaaaccactaactaaatacaatttcattgatgacgaagattggaatacttttgagcaaaatcagttgtctgaaaaatttattgtacatatataattaacattaaacataatacacctatttagatatactaatcatctatttttaattggtaggaatatagggaaatacaaaaacaacagaggaaaaagcatgtatataatcatcatctgagcaaaaaaggatatgttagccttgagaaagagatggtaagttttggtgggttcttattatagtttaattttatatatttgaataggtggtgaacgaatagtttatgtggatttcttaattgtatcttttttaacaaaaaaataagaataaaaatgttgcaacatgggacatctagtaactgtcttaaattttccatttctattagatgactaaagctggttccacagaaagcattgataggagtttgctttggaagagagcaatgcaaagaaaagatggcagctatgatgatgtagtcataccaatagtggaaaagttagtacattatcattttatgcccaaaaattgtataattaaacattttttttatttgacctatttgaaagttaacttcataacttcatttggtttaggatgagttgatgaaaaagtctcaagagagtggcataagctataatgtgagcaatgacatacttgctcaggcactaggtactccaaagtacactggtcgtgttcaagctaaaggaaagcactacatgcctcaacaatatttcaataatgtgtcagaacgtgttgtgagggatattataaaagccactgaagaacgacaagttaagtttgaggttgatgtgttagcaaaactatctcagataggggtgctacacaacaatctaatgtgagtagttccgacatgaaataaaaaaagttgctcctaccataagtggtggacaaaccaattcataaagttgatgagaacttacaaatgaaaagagaaccacatacaaaggtgtgttattttcagtttccatttgcttgttcaatgacataattgatacacatttctaaacatttttcatatataatttcttacggatacttatattttagctagattgatccttacattttagtttgattccattatagtgcaactaatactacttataatattctattgcactagaacaagcacttgtaaaagatctaatctatgtctcaaatataaccctcactaggtaatatatatcatctcaaataacattaagtgtagtactatttaaggaatacatggtcttatgcatcttgaacttcaattaatacttttgtttttatcgaaattaataatttaaattaatttttgaaggcaacaaaatgtgagttagcaataaggaccagggaaaatgtagtgggtggtggaacaattgttatggattatggtcccaactacctagttgttgtggatgctccctatgaatgaaatgcatcgttgcctattccttattcctgatcaagctacaacaattggagctatagtgagctagcaagttttatggctagcccatttagtcattttgagcactaaatttatctgtgtgtgtaattttcatgtgttatattttataagagatatatgtaatttgataacatgatactttcttttataaggatctcaaaaaggaaagagacaaaaaaaatgaattgaaattcaagggtaaaaaaccctcaagatatcaagaattttgatgcattagtaggtctcatgctaaaggatgggaaagtacaagtcgtggaggtcccaaatgatgtctttggtgaaagttttaagaccattatgaaagaaggcatgaatatgataatttcattaaaggaagtgtcaactaaccgagtcatatacttcatatggtaaagaattttctaacttgctaaaatgtgtttaccttttttttttctaaaagtaaaaaaaaaaaaaaaaatgtgtgtgtgtatatatatatatgtatattcatttcttatcaaagtatgtggaatttaaataggcacttgcaaaaaaagcaaagtgatgctaggctcgctgaacgatttgtttttgtcaatccagctttggtctctaaagctagaataggtgagacaataaaggaaaataggtcaaagttgattgcaaatcgtttaatgcatgcaaaacgtgctaactacatttttattccatacaaccctgagtaagttatggaaaatataaagttttttttgtttgttaaataacttaatctatgctcattagtaaataacatctactatattgttgtagtttccactgggtcttggtggcactagatacgaggacactaactgcacactaccttgatccaatgcaaaatcaaccatgtgatgatcttaaggaaattgttaacatgtaagtatcttcatttccatagttgaatgtagtaaatagtgtctaaaatgttaatttttacccatgtagggcagtatgaattttcatcaaaaagggagccaacacgggtaaaagtagtggtaagttacttatttagagtaagttatatcctttcacttaaatcaatccataaaatttgaatatgattttattttttatcacttagataataatgacatgaaacatcataacattaatgtgtttatggtaccataatttatatttgtgcctatagtgcccaagacaacttggtagtgtggagtgcgactattatgtgatgagatacatgaaagatatcattgttgatccaagcctcctatcaacaaaagtatgtactcattaataatttttttttagtttttttactttagtagtttatttttttaaaacttaactaatcatcatgtatttacaattaattattagtttaaagagaaaaagtcatataatgaagttaagcttaatgaagtgcaatcttagtgggttatgttggtaacccaattaattcttaccccattcttaaaggtataaattaacatctacaatacttgatttaattgtcattattaatgaagtcttgaatggactaatttttggaattttccatgttatgtatgtagatgccctcacttcaatccgtcaaaaagttgtagaccatattttcatgattcacattttctcctctcatggtaagtaatttttcctccataataatagaagataatactttaacatacaaactgcttgaatacaacaaatcaaattatcacattatgatcaatgttgttggtgttattattgttgttgttacatgaagaagttattgttgttattgttgcatggagaagaagcacataatgtttaaacacaacaaatcaaatactattgatataattaccatcacaatcaatattgttgttattgctcgaagaagccattattgttatatgaagaagttcttgttgcatagagaagttgttattgttgcatggaaaaaaatcacataatgtttggacaaaacaaatcaaattattattgatataattatcaccatcatcaacgttgttgttattattgtgttgttgttgcatggagaaattgttattgttatttttatatggagaagttattgttgttggagaggtcgttgttgcatagaaaggttgttgtcagatggagagatggtagagagcttcttttgtctagggtcaattattatattttggttacaatttggaatcgaaaataataagttttagaatggttgctattctgatgacattcaaccaatgatttgtaggtttctatttccttggtaatgctctatttttttattttgatacttttttttctccttagggaatgttagtagttaactaactttggtaacacaagaaagttgtaagaagaaatttaagcatctacaagtgatcaatattaaatgtacgtcttatattattaaatatgatgatttatgattgaaattaattataaatcataattattggtatatatcttcatatatttatttatgagaaaattagtttcatatgttaaacgtatataagaaaatattatactacattccatattgtagaatatatatcattgaaagtcttatttcctttaatttagtaatgaacaaaaaagtctattaactttttagaagcttgttaattatgaaattaaacaatttttcatttttattgaaacataggatctcattaaacaccaaattattttcacttgcacttcttttatggattatttatagacttaaatttaactttcattgcatgtgtattaattaaacataatttttctcttctatccttttattttttaaatatatacaggtaaaagatttcaagttcaagagtggatatgcaaccaccaagaatacttttggtttgttcttcctcttacttgtaatattccttttgataaggaatttagataacttgtttttcatatatatgtacttctttttatgttggagttggaaaatatgtttgttgtaaatattttgatacattaacaaatttacatattaattaactatgtagtaaattagttctttatcatgatattattagcatatttattcaatgtcttttggaagatttagctattaatattgaattaaattttaaataggtgagtaattgttttgtattttataaaaaatcacttgaaaagttatatgtaaaaaatttaaagtgtcaataaacaaataatatttcgggcatcccttggcacttccgtaagtgtcaacatagatagatcaacaatggcgctttttaaagtgtcaatataggtacattaacaatgacactttccagagcgtcattgataatgaatattaaagatgacgctttaaaggtgtcaacatttggaaattcggtggaaataatggcactcaaagaatgtcatgctttggaaagatgacgcttcaataagcgtcaatattagtgtttttatagataacgctttctaaaagcaccatggttgaccttacccagttcttgacaggggaatgcatgacactttcaggaagtgccatcttatacatttcttgacacgtaaaaaacgtcattattgcctttttctcttatagtgtcatagttcaactctaacatatcatcggtacacaaaagttatgataaaaaaattgtgtatgatttgaagagatatatctcaattctttccatggattaaaaagtacttcttaccagtatttttgcatcttgttcttgcattatgaaatgtaaatgtggcatttgatagatgtatgaaattagaaagatttacagtttgatgaccactaatggaaaagttgtttgtatcatgaactccaaattcaagaggaagaaaaaatagaaagggaaagaagtaaagttttactcattgatacacatgaagttgatgtgaggtttattttttagttgtatgagaagttgtattcatgattgatctttccattttttatatatgccttaagcttgcattatatgatttctattgtttaaagcattttgcatttatttagttcattgacttgttgttttgaagcatgttgtgatgtttgttgccatgttctaaacataaacttgcttagatttggcctctattattgattattgcttgggtttgcatggattttctagc

SEQ ID NO: 12847 - DNA, 14769 bp, Vitis vinifera
  Intron number 29 from transcript GSVIVT01014993001 (locus GSVIVG01014993001) derived from phytozome v7.0 (chr-ID chr 11; pos 207901 to 222669)
cttcagcaccaccttctccacccaaggtactcttttagtgcatatcagcttttagtttgcttgggttggaggtcaacccaagatcaacacaaagaataaatctctctgctgatggcccaagccaatgtgatcttagacctgaatataagtttctaagcatggattgggatcctattaagatgaatattgtcaggttggctaccagaagttgagtaatgccattttaacttcctttatattcccaaagctaactccttaaacaagcagcaaaaccaataataagttactgttactagaaattgaagcagaagtgggaaatgacatgggagtagaaagcatgaaacactaaaaaagaattatgggaaatgagaatttaatgaatcatacatgaattctagaatagttgtattggaagatcaaacataaactttagtaaccaattaaaccttttttaatagttaacttttcttttgatatctagaatagtacctggaagctcccgtccataactcaatgacatgagaaacattattgaaagatgagagttaaaaaaatatgaatcattatggcaaaggacatttttttttttttttgataagtaaagacaattttattaaaagaaaaagtatacatgatgtatacaaagcaataagggtgtgaatacacaaaaacaagcaaatgcaccctaagaagaaccttaccaatccacaaattctagcaaggacttagggtcatccccaatgtacaatctaacctaatcccaaaataaatacaaaagagagcttttaaaagttcggtctaaactttcgcaattctcaaaggtttttctatttctctctcatcaaatggtccaaaaaatacacaaaggaactactttccaagcctttttcctttttctaccaaaaaaggaacctccctaactcaaaagcaaccctcttactgaagagtccatcacccattgtacatcaaataaagcaaaaatcagttgccacaaaatacaagcttttgggcaatgtagaaaaatatgatcgcttgtttcttcttcttctttgcacatgtagcatcgattttattcatcttccaacccctcctcctgagctgatcctgtgtcaaaatcttggcccaagttacctcccaaacaaagaagcttactctaactggggcccacatattccaaactatcccatgggggaaagtatccgctcccttgttgtccaaggaagagtagaatgacttaactaaaaagacgttgttctttgtatccacccataccaaaatatccttggaatctaaagagggggaatgatcatgtaaccccccaaagaagttagccacttcctccaattctcaatcattcaactgtctaaagaacctaggattccaactaccactatcccaaacatcaaccacttaaaggaagctatagaaaaaaaaaatatgggaaaacttccctcaatggcacatccccacaccatctatctttcaaaaacttcaccatgttcctaaagctaaccctgaagcaagtgttggctttaaaagtctcccaacaatttctgattgccttccaaacccccactccatacctctctctcacccctttcgtgcaccaacccccctcatcttgcctatacttgtcaacaattacctgtttctaaagaggatctctttcagtcgcaaatctccaagaccacttacctaatagggccttattgaaggtcgaaatgtttctaaagcccaaaccccttttcaatttttccaagcacacaaccagctaactcaacaaatgtggcttgttaaccaaatctccccctccccaaaagaaatccctttatagcttttccaccgctaccctcttagggatgacaaagagggacatataatagattagtaaactagaaaatgtgctcttaatcagagtttgccttccaccttttgagagatacatgacaaaggacatgagaataattgggaaaaaatgttgagaaagtgagacttaaaaaatatgaatcattatggcaaaggacatgagaataattggaaaaataaatgttttgtataagtttctaagcatttctcaaatgttgcctgaatttttcttgaacattttctcaaagtctctaaaaggttcatctcatcctagaacctttatcctagctttaggaattgttttctttgtactatctgtggcaaatggggattggagagtgcttaaagaccacatgggtagtgtgatagagctttttataaactagttgaggttgatctagcttgttagagtacatttattattcttatgttagattgtactgctatattatatgacacgaaatatgggatgaaaaataataagttcagtatcttagattgactatacacacagtttatataggagattacaagagaagaaataggaaacaaaagacataataggaaactaatttatttctaaatcagaaaactatcaactaaatacctcaatttaagggattttaacataattctcctattctatttatagctcaattacagcctatttatagctcgacactcttcctcaagctgaggaataaatgtcttccattcccagcttgaatacaagatcgtgaaatattgaaccgttcagcccttttgttaggatatcagctaattgatgctctgatggaacatatgtcatacacactattccttcctccaatttttctttgatgaaatgtctattaatctcaatatgttttgccctatcgtgttgtatagggttatgagcaatattgatagttgacttattgtcacaatagagcttcataggaccatcccacttgattctcaaatcatctagaataatcttcagcaaaagtagttcagacaacccttgagtaatggccctaaactttgattctgcagatgaccttgttaccacattctgctttttacttctccatgttaccagattacctccaagaaaagtacaataccctgtagttgatctttgatccattagggaacttgcatagtcagcgtcggtgtatgcttctagagcaagagtattgttcttcttgaacaaaattcctttcccggggttgcctttcaagtaatgcaccaccctgtaagcagcttgaagataaggttctctttgatcatgcatgaattgactgatcacgctcaccaagtaggcgatgtttgggcgagtgtgagcaaggtatatgagcctaccaaccagcctctggtacattcttttatccatcactggttcttctttagcttctcccaactcgtggtttggatccattggcgtagagattggtttacacccaatcttccctgcttctgccaataaatcagttacatacttttgttgagagatgaagatcccttgtgtggaatatgccacctcaataccgaggaaatactttagtttccctagttcctttatctcaaactctgctggtaatctctgcttcacttcatgcttttctctctcatcattttcagttactatgatgtcgttaacatagactagaagagcagttactccccttgcagccgagtgcttaatgaagagagtgtggtcgccttggctttgtttgtacccagactctttcatgacttttgcaaatctcccaaaccaagccctaggagattgttttagcctataaatggcctttttcagcttgtacaccttgttacctgtgtttccctcaaatctcgatgggatgttcatgtaaatctcttcatctaaatcaccatgaagaaatacattcttaacatcatactgtaggagttgacaattatagtgggcagccagtgacaacaggattcttacagtattcatttttgcaactggagtaaaactctcctgataatcaactccataagtttgagtgtaccatttggctaccaatcttgctttatgtctctcaagagatccatcagccttatatttcaatgtgaaaatccacttgcaatcaacaatgtttttccctttcagtctttcaacaatctcccatgttttattcttttctaatgcactcatctcctctctcatagcatccttccattccctttttgtcaatccctcagaaacagtgttagggatgatagttgtgtttagactcataatgaaattcttatgggctggtgataggtgcttaagagacacatagtgtgatagtggatagagtggtcggtttgtgcattctctggtgccttttctgatagcaatgggaaggtctaggtctaggttgtctgttgagtcagtggaagtttcaccaggttgtgtatgtaaaggtttatttgatcttatcgtgatttcattcccagggtctgagttggattcttggacatgcttttgttttggaatggcattttcccttgaatacaccttaggaaactgtggaaaattgcgattgacactggctggaacatgggatgacatgggttcagtggtaaaattgggtgactcaggtgtgattagcttagatgactcaggttcttcatcaccatgggttgagacatgaggaaggtcaagaggttcaaagtactcacaaagactatcttccatcattgaaatctctccctgaagagaggacttggggaaaaaatgtttattttccgtgaaggtgacatctgtagagatgtaaaattttctggctgagggattgtaacacttgtatccttttttagtggatgagtaaccaaggaagacacattttatggctcgagggtctagcttatctctatgttggttgtggacatgaacaaatgcagtgcacccaaataccctaggagtgagcccatttgaggctttgaagtgtggatagtaactcttgagtatgtttatggggcttttgttgtctaacactcgtgagggaattctaccccaataggacttaggaacattcccttgaaagagtaaggctcgggttgtgttgagtaaatgcctatttttcctctcagttaccccattttgttggggtgtgttaacacatgatgagtcatggagaatgccctgtgattgaaaatagggtgacaaaatccgattgaagtaatctctagcattgtctgtcctaaagctttttattttaaccccaaattgttttgaactatagagtggaaattaggtataacaatgctaacatcaaatttttgtttaagaagaaagatccatgtaacccgagtgcagtcatcaattaaggatacaaaccaacaagccccaaaaacattaggtatagtcgaaggaccccatatgtcactatgaatcaaatgaaaaggatgaaaacttcttttattgctaataggaaaagatacacgagtatgttttgccaattcataagtttcgcaatgaaactcaaaaatatcttatccttggaacaaatgaggaaacatgacctttaaaaccctaaaagatggatgacctagacgtagatgatacaaccaaatggtatctttatttgaggaactaagaaaagaaaatgacaaattattactagttttttgagatgattcaaggtggtaaagaccgctcctttcctataacggtagctaaagagccattggccactgcaattttcttgttactttggcttggggtttaggtatggaaaagttgagatttggaggtcatatggtctgtgacaccgaagtctattatccaatagtcatcataaaccctgtgtgagacatttatgcaaaaagagaaggtgtacctgaaagagccaaagaacaagttccagtaggtttgtcaagggatcccaacaaacttcttagcttctccatttcttcactattgaacctgcttgttgctgaattttcctcagttttgggctgctctgctatgtgtgcttgaggcctttgctgccctccacggtttccccattcacgactcggtggcttatcattcaacttccaacacttcacttttgtgtgccttgatttcttgcaataggtgcaccagagattgtccttgttctttttccactgattgtctctacctaagtgttttggcagatcattctttccttgctctgaatgttctgtttttgcaactagggctaatccatccaaggtttgtggttcaagcataacactccttgggctttcctcgcctcaaatcagtgccaccacctcaataaagctcagaacctcctgcttaccaagaatctggattctcacttgattaaattctgggttatgcccaacaagaaaatcatagactctatcttgttcaataaaatcctttagaacagcggcatcttcaggacatttggtttttatcaccctataatgatcaagttcttgccacaaagctttcaattgattggcatattcaataacggttttacttccctgttttggagcaatcgtcttcaccttaacctcatatacttgagccgcatctctagcttttgaatacgtctgttggattgcatcccaaatatccttagttggagccaagaacatacatgtgtcactaatctcagaagtcatagaattcctcaaccacaccataatcatagaatctttttcatcccatgcttaaaaacggggatctcttggttttggccttgtacccataagatgattgatcttccatttccctttcagcacagtgcgaacaagttgagaccatttatggtaattttttccatccagcctatacacaacctgaatgttttgcaattccccgagttgttgagattgaacaatctccttcgattgtgttgtagtagtcgtctctgcaaccttggacatcttccacgaaaaacctgatctcttaggaattaaggcagatcgcgaaataaaaaaccagcagcaatgaaggctggtaaaagaacacgtgaaatactctgtttggcctttcagaaaatagagcaaaacaaagcagagaaagaaaatgtgaataaaaaaaaatccaactatgaaggccagaatgatgcccaggttttaaaaacctactgctctgatatcatgacacgaaatatgggatgaaaaataataagttcaatatcttagattgaccatacacagtttatataggagattacaagagaagaaataggaaacaagagacataataggaaattaacttattcctaaaccaaaaaactatctaattgaatccctcaatttaagggattttaaaataattctcttattctatttacaactcaattacaacctatttacagctcgacattatatttaaaaaaaaggatagggaaattcaaggattgatctagttctaattccaagttggaaaaattaacctactatatgtagggttaggaaaaaagagaaaaatagaagaaaaggaatatcaaagaggttaaggttttgttttcttgacttttctatactttccaatctatttataatattgagtctaaaaacccttaacataatatgagaacaacaaactagcttacctattgaggcagaaaccgtatttattggagggattgatagaagtagtcttgatgccctaaagtgaaaggagattcagttgttatcatttcttgggcttcactggcaagggaggatcttggtgattcttctactgtccggataatttacctttatagatataccaaaagctcttttgattggaagcttggattatgaactagttagcaaatcaattggctaagcaaaagaaccattttagttgaagagtttgttagggacttcatgtcccctgaagccccctaggtgcaatgggagttttaatctgtcaatgacttattaagacaaggcatagaggggtggtgggttctggtatttggagccacattgataccataaaaaatccaatagattggatcttgctaaataggccaaaacaaaaagaaaggttccgatctctacactttcttattttctttctccacaaaactatcatgtcactccagtaactccttcactgatcatggcaacacctaagagaaaccaaagagcaagaataccaaattgtccaagcttctgttctgctgcaatgaaggatatgttgaccagatcctcattgatcttacataaacaacaccaattggctagaggccatcccttcttctcggtttatacattgccaagatcatttcccaagttgcctcccaagcaaagaacccacctgtgttgggggggtctcaaactccacacttattttgttggtgaaggaccacttgaaacagactccaaatagttaatgattgattgaataaagaactttccatcctttggatccctttacatcaatgcatcctgacaccatcacctcctgaatctacctaagaaagaatacacactatccaatatgcaatcacgaaagtttcttaaggagaaaggatcccagtaccttctccacactcctaaatgttgactgcccaagcatcctttatgcaatgcagtggagaataggaatggataccattgccttaataaagcatcactgcactaaaaatattgccaaaacatctcttctactatcagccaccattaagctagtcctacaaagaaacttcgtccaccctcttctagtcgttttccacatccccacaccaaacccttccctcccctcattagaatgcaaccattgttcctcctcttcatatttacctaagataactagtctccaaagcctatccttcccatagcaaatctctagttccatcttgccacattgaactcttctataaattcaaaaaatcttttcgtagcttctggggtttgagagcaattccttttttcacaagggagtccaactaaattaaagtccttttgccttttttttttttaaaaaaaaaaaacagcctttctcccaataattggaccataaaccctaaagtcaccccaacgaaatgaaccttgtagcatttagaatggaaagaaattggagcgcacccttgcttcaatcccaactaaatccaacacctaatgatcccagaaaaccatcacatctcgattgcacatctatcatctattgcaaaccctttttgaagacgtgcccaaattaagatttctattaaactctactaacatagtcaactttggtttcttataaaggaaccaaattcaccctttgagacttgaagaaagacttttcaaccttcatgttctccccatcattcaatcatctacaattccaagagattaacttaatctccattggacaacaaaggttagagtgcaatcatcttttattccaaaccctagttacctagattgcctccataattgggggggggggggggaggaagaaggaaaacctaagtctctaagcatctatgtcaagacacttgaaacgactacacagataaaatcatgaatgaagaccaaaacttacatacaagggaacaataaacatatgaaaagagattagaagataaataggagctaaaaaaccatttttttaaaatagggaaaaattaatgaataagtgaaagaaaggaaaaagaaaaaaagaaaaagagagaaaatagaaatatcttcacattatatttgactaaaaaagaagagagaaaaatcttcacataaccaaaggttttagctatatatagatattacacctgaaaggatattgtagacaactccatgaatagaagaagaagcaatggtcgtaaacaaaacaatcttgaagaggcattatacttgaaatggttcagcagatcatcttttcctatattattctgtgtcgttggggttctggcacaaattatttcagctagccaagatggattgggttcttctgagaagcattttagacatgatgtccatatactataaacgttttggcaactccaagagagggatggttttgtggcaaaatgcgtgcataactttaatttgggttgtgtggcgggaaagaaatgccaggatatttgaggacaaagctaggaattcagagaatctttgggattccattcatttccttgcttctctatgggctttttgttctgcgtttttaagggcattccccttaacttgttacaactagattggctagcagtgtgtagttccaacgggatggtctaatcaagggagcttgttcgtagttttcatagtgtagtgtcttgttatcttttttgttgtttagtttcatctctgatgggaggattcatcatccttctattgtacttctttttttatcaatatatgcatgtgttgtttcctatcaaaaaaaaaatatacttgaaatagtttaaaggggaaaaatgaaaaggaaaaaggaatctgaaagtgttttcttaacttgaaaaagatggaaataagaataccttctcaataaatttgaagggaatttgagggaaggaccatcttccttctcttgtatctttactaccattaatacaatattcttcgtttatgataaaataaataaataagtttgaagggagtttgtcgcctcggttggcagctcttaaggcttatgagaaaggggaactgaaggatctactattaaggtaagaaatgcattggaggcaaaaagtaaggtaatatgggttaaagaaggggattgcaactcaaagcacttccatagggcgggtaatgggaggataaacaagaagttcatcaaatccttggtaaatgaagagaaggcaacactagataatcttgaaaacatttcggaagagattgtgtgattgtttgaaaattatactctaaacccccaatacacccttggatgttagaaagtttagattgatctccaatttcaatagagagcactaattgcttcgatcgcccctttactgaagaggaattttataatgctatcttttagtttgacaaggaaaaggcactaggggctgattgtttctccatagcaatgtttttaagagtgttggaatgtgattaaggaggatttattaaaagtgttcacggagtttcacaatagtggggtaatagaccaaagtatctacgctactttcatagctcttgtgccgaaaaggagtcaaactatcgaagtttcaaaattcagacctatcaacctggtcgcaagtctatattcgattatatcctaagttttattaggttgtatttgagtaatccttcacaaaaccattcatttctcgttgggagcttttattgagcggagacaaattttagagatagcactaatagccaaccaaatggtggatgagaaaaaacaaaattgggagagaagggcatggtttttaagttttattgaaaaggattaatcatgggaatggggcttcttggatcaagcctaaaaaggaagaggtttagtactaaatggaggtcttggatgaaggaatgtctatcctcaacaaattttgtggtcttagtgaatggtggcacctaaagctggattaaagcaaccaaaggtcttagataagaagatcctctttccctttttctctttaccattgcaactaacatcttcaatagaatgatgctgagagtgaaggagagcaatctcttggaagatttcctagtaaggagtagaactagagtgtatcacttgcaagttgcaaatgacaccatctattcctttcaagagctaacatggaagatttgcaaaaacttaagctaatcttgatgattttgtgggtgcatttaagggcttaagatcaatttagatgagattactttagttggtattaacatgaatcaagattagaatattagattggtttcaatgctcaaatgtaaggtttctgagtggcccttaaccaaaggctagtgctttttaggatctagtggtcaatagaatgtcatagagattggatggttggaaaaaaaattttatttttagttggaagaataattctaatctagtcttgcttgtctcacattcctagtaacttcctctctttgcttaagattccatcagtagtggcgacaatgattaagaaaatgcaaaggaattttctttaatcaggggtaggagagggaaagagagatcatctcattagttgggacctagtgtgcaaaagtctaagggggaagggggtttgaggttttctaatgtaagtgttgctttttggcataaggtgatattgagtatctatgtgattcaccctaatggttgtcatgctaacatgttaagaatatagccctttttgggaagtggctttcaaaggggaagagggcctcaacaactacaacttttaggagcattcctctcaatgtaatttggctcaattggaatttagtgtgtgaatcaaaagagtcaaaaaagcaaagtgtggagcaaagctccaaacttccagtctctttttgtagatgtattgatccctatagagagtagaattagttttctttgtatagtttcagtttcatgcggtgttatattgaggtatagattttttttgtattttggagaaaacttattcattggtcctatttgatcaaagtttgtatatttgggaaggattcttcatctttcacatgtactttttaaattcttaactaaatactttgttcttgaaaaaagaaaaagtcaaagatatatgagaataaccaaagtttttgttgcctaaagattttagatctagaaggatgttagaaacatctccatggataaaatcatgaattgagaccaaaacttacatatacaaaatcaacaaaatataaaacaaagtagaatataaatatgaagctaaacgaattttttaaaatggagaaattaaaataaaaatgaaaaaaaaaaagaagggaaaaaagaagaaggtaagagagaaaaaaaaagaaaaaagaaaaaagaaaaagaagaaactattggagtgcatgatatacattgtggggcccaaatattacaatcttaagtttttaggaaaattgattatctaatatagtatcaaaacctcgtttgatgggaagttgtcttcaaacctcttagcatgtttattttctcactatattatacccatgtgttagcccaaaaagaggctacccttgagggagggtgttggagtgcatgatatacattgtgggtctacaagcttaagctttttggaaaattggttatgcaacagaacaatgatcatataataaaacaatcttgaagagacatcatacatgaaatagtttttgacaaaaacaaatagaaaaaggaatctaaaagcgtttgcttgagctgacaagttacaaactagaaatatcttcatgatatatttgactgaaaatgaagaggatgactagcattttcttttttgtcaaagggcaaataatttattgatatgaatttttaaatgtaagcataggatgaggaatccttccaaaaatttagaagaaaggatgataagaaaaatgggtaaactgcataagtggcaacatagctttcaaggatgaaacaagaacatgtataagatagagaaacaatgcacaacacaatgtggtacaaattcccttacaaaagaaacctttacctagcttctcagttagctaattgacctgctacacgattagttaagcacagagaccacaacccgagttactagctacatccaaaatttggtgaagctgcttggcgtacttaaaagaaaacactctctgactttagcatccatgagatcacaatagtagaatcccatgccacccataaattgggtagatacaaaaccgtagcctgcaatagtccttcattagagttaaaatctgtctcagtggccaagcccgttcctgctggtttcgagaaggctctcaacactataacatggtgatccctaatcacacctctaattcccaactgacttgggttggcaaaagcatgcgaaccaagtttaagttaatcgaacccactagatgcggaatccaaacaagaaatcactcactgcctatcctctttgattgacaaatcaagttccaatcaagctatagaatgctctaaggagtaacataaaaatctatggagatagaggcccagagagagagagagaaattatcaagtgccaaatagattcccaagttcctccatccagcgcaaaaatccttgaattcctctccttccaaactgctcataacaaagtggatgactcaatcttttaggtatgtagagatattagatctagaaggacattgtgatttcttttagtttgaaacagagcacttggtgaagggatgcctgaacttggagaagccaatccttaaaaattatattctggttaggtctgtgttagtctgctaattagatatcctaacagaagaatcttgaagaagcatcatgtttcaaatagtttttgggaagaaagaaaagaaaaggggaaaacaaagggattcagaaagatttttcttgagttgaggtagaaaatggaaacgtcttcagatactgatgataaataaattgccacagaaataaatagatctggaaggatgtttttgttggtttcagtttgaaactgagtagtgcagcgaagggagtgtttgaacttggagaagctaatatatatatatatatatatatatggtaggtttatgaaacagttatataatatttgaagaatatattccaattaggtctgtgtaagtgtcctaattgaacatttcaaagtaagaaaattgtttaacttgttgaaatgtagttttttttcttggaaaatttgcttgtatttgtgccaataactgtactgcaaatattggagtaatggtctataattgtgaatgattctgcctgcagtgccttcatttcttggtatagaatacaaattcagttatactgtactgaatgctgtttcatctgcttgttaagtgacaggattttttatttattattatgttcacttctttttttccttgatctaataccattatagtttcctg

SEQ ID NO: 12848 - DNA, 8450 bp, Vitis vinifera
  Intron number 3 from transcript GSVIVT01034499001 (locus G SVIVG01034499001) derived from phytozome v7.0 (chr-ID chr1 8; pos 20277757 to 20286206 reverse strand)
ctcggatttgagtttgcgtaagtgacaccttgccatggtttaagttttatgatcagttatattacagctctaaattattatctgattttaatatgtggcttttagtgattgttgttagtagggtcacatacatatgttcattaatatattagaacaactattggaattactttatgtattattagaattgattgatttttactccttttctattgagtaactggatattgttatggagatagaaattaggaacatgttaaattcagctgtggttgcaggcttaaaatttggcaagcaaattatgattgaaattcatttgcattttatatgcatgcgaattctaaaaatttacagggaaataatcaataggcgaattctgcagcttaactgtgtaactaactaccaagaatctagggactaacaagcacaactctaggacctaactattagaacatctagatatctgaaactgaacagtaaacagatcagatttattgaaaacaaataaccaaaaaacatagcaacaaactcctaataattccaaactcccccttaagttggtgcatagatattcatcatgcccaacttgctaacaagagtttcgaacctaggcccagatagactcttggttaagacattgagtatctgttgttctgtcatgatgaacaacatgcagataactttactttcaagcttttctttgataaatgcctatcaatttcaatgtgctttgtacaatcatgctgaacaggattgtttgcaatgttgattattacctagttatcacaaaagaacttcataggaggttctgaactcaacttcagttcttcaagaattctctttaagcataaaatctcacatactccatcagccatagcattgaactccgcctttatgctattccaagctacaacgctttgtttcttgctcttccatgtaacaaaattgccctaaaggaaattacaataacccaatgtggatcttatgtttgtatttgaactagcccaatcaacatctgtgtacatctccacatttctttggttaccttttttgaacaaaagtcttcttcctggtgtactttttagatatcttagaattcggtatacaacttctaggtgcttttcatatggtgaatgcataaactggctcacaacaccaactacaaatttgatgtcaagtcttgtgtgggaaagataaattagcttccctacaagctgttaataccttcctacttcaactaacactcccttggtttgttctccaagtttgtgattttactccattagagtatcacttgatttgcacctactcattcctatttcttcaagtagatctaaaacatactttctttgtgcaataaagatcccatttttagatctagcaacttccattcccaataaatactgtaaagaccccaaatcgttaatctaaactctactgtaaggttcctctctggtctagctatctcagctttgtcacttccagtaagaatgatgtcatccatatagatgatcaaaatagctatcttgaccatctccagaataccttatgaacaaggtatgatccatttgtccttaattgtagccttgattcttaacaaaccttgtaaacctttcaaactgtgccctaagagactgcttcaaaccatatacagacttctttaatctgcacactttggttccaaagatgtccttaaatcctgatggagcatccataaagacctcttcttgtaattcgttaatgagaaatgcattcttgacatctaattgataaaaggcccatttcaagtttacaaccatagaaagtaacacaaatcatatttagctttgcaactagagcaacagtttcttgataatcaatcccattagtctgtgtaaagcctttcgctaccatcctagatttataatgatccaaggactcatctgatctgaactttacagtaaacacccatttacacccccatcagtgtctttcctcaagcaagtttaccttttcccatgtgtcatttttctctagagccttcatctccttgaggacagcctccctccattcaggaacgtttagagcttcctgtatatccttagttacatttacattagatagttgtgagataaaaccagagaaacaaggtgataattttttataggacacatgattggaaattggatgattagtgcatgttctagtgacttttctaggagcaatggggatattgacaaaaaaaatcagttttttattcaaaagaagtgtggcacgaattaggagaagtatatggacttgaagtttctatagcatttgaatccggtcttggattggactcttagccttgtaaagttgtaatatcatccttaccttaagtagacaatttcgcatcctccttttttcttagttgttgaatcattttctgttctagtgtcaactccacttatgagcattgaagtaggctaccttacttctaaatgtaaagaatccaagtccattaaaacatttggattcattaaaacattataatttatcaattttgattttttattcgaaaccatgtcattctcctccagttcaaacaacaaatcttcataaccaccctccctatgaaaatgagtataaaaaaactcatgcttcaaaaaatgtgacatccacagtaacaatttttattttttctttttggatcaaaatagtggtaacccttttgtgttggagaatatccaagaaagacacatttcaatgctcttgggtctaacttactacgatgatgcaactagatggattcatagcaaatggctaagacaatatggtatgcaagttgcataaatccatttatggattaaaacaagcatcccactcatggaataaacgtttcaatcagacaatcaagacctttgaatttgatcaaaatgaagatgaaccttctttgtacaagaaggtgtagaaaagcatagtggtctttatgatcttgtatgttgatgatattctacttattggtaaagatgtagggctattgccatcatttaagatttgattatctactcaattccaaatgaaggatctaagagaagcatagtatattcgtgagattaaggtcttatgagaccacaagaataagaaactgatgttatttcaagccacctacattgacaagcttttagtcaagtatgtgatgtaggattccaaaaaaggtctgctaccctttaggtagggaatttctctgtctcgggattagtatcctaagacacttgaggagaaagagtgcatgcaaacaataccttatgcattcgtagtgggtagccttatgcatgcaatgctatgtactagatcggatatttgcttcacaataggcatggtgagtggatatcaatcaaatctagaaccagaacactgaacaactatcaaacacaaactcaaatgttttaggagaacgatggattatatgcttgtattacagagtgacgagttagtacctaaagagtctacaggtttagactgtcaatttaatcatgattgtcgttgatttacctcgattttgtatttacctttggtggtgcggctgttatttggaggagtgtgaatcaatcttgcattgttgactccactatggaagtcgagtatattgtagcttcttaagcaacaaaggaagtcatttggcttaggaagttcctcatgggacttggggccataccttttgttgtacagcccatgacactactctgtgacaacaatgggttagtgacatagtctaaagaaccaagaaaccattggaagggttaatccattaagaggaagtaccacttgattcatgagatagtctagatgggtgatgtagtggttgaaaagataccttatgcaaagaacatggcggatcccttcaccaagacattgacaaggagagccttttatggttaaagggatagcattagtgttagatgtgtctgctttgctttagtagtatgatgttttaagggctaatggaagattgatagaatagagcccttaaaaatatgacatgatataataaatttgaaatttattatttatttaattatattccaattgcacttttatctatccttgttccatatattattctttataagcattttgacctacatctcttgcattgtacatgacttgaatgtattaggagttacacggaagatccaaatcataggttccatttgagactttaatgcactgccttctaattattctttaattataatattctttataagcatattattctttaataccttccttacgagtagttttgttcatagccagtttgtggacttcaacaatccatttgagactttaatgcactaccttctgattagagggatgactagtttggctattaggatgtggttcccatagtgaatgcactagtgtatatggttacgcattagataggacctacagtaagtcatgacctaaagttatcaattagtcttgcctttgcctagctattatgttgtatttgtctcttaaccttaaaagaatactgagtttatgccaaaattagcagtggttttgacctaggggtgagattttaaagtgatcatatattccctatagattgagtcactattgatagactttggtagcaacatgtattatcaatagagacatcatgatatctcatggattttgagacagtgtgtccccttgggtgatcctaaggacgtgtgttcaaataaactatgatcatagttgttacttaagtgaaacttgacataagctctttgtgagttaggacatgttagttgatcacataattggaggatttgtaatttaaggatggtagagcttatcttgagaaattaataactcttaccttgttagattacgtatagcagtttatggggagactttatacaacgaataagaagccacaaacccaagcacttagtgtacattgggtattggggtgcagttggctatttgtagtgggatgttgaatcagcttcaaaattagattctaggggagccagtactgtcttattggttccactagtcctcgttcaagcgcatatgccttgatgacacggtttataagagttggattggttcttaattcacttatgtgcataagggctttttggtaattacgtaaggccacacaggaatcaatggatgacatctctagaatggactaattgattaattgaatgcttaatgggttaatttatcaattaggaccctttttacgctagattaagtgaccttaacccaaagtggacttcattcacataagcccaatagaattcctatagacaccccttatgaggtttttatttttcttccattattctccctatatcccaaggagaaagccctgacctccaccttttagacttccaccatctaagtgccaagcttcaacgaagagtcattggacagaagataggggcttatgagatctctcacctttgactaccatgtgatcaaatgatgatcttcactacaaggatttgatttgggaaccatccaaatttgaggtaagcattctaaatatgtaatctagatcctataaagttttgtatatgctttgtttccgttgtgcataggatctagtggccctagaaatagtatcatgcatttaacaagttccagggcttaggaatggtgtaatccaaagttcccatcaatgggtgtggtagtgtcttatttcttttttttttttatgatactttgattttttatgacttaaatgaggagcatttggagttcttaagttgggctttcatgtggcttgaagcattttttggcttaaaaatcaattaaataaaagtgagttgattccaatgggggaggttttcgattttgaggatttggctaggatgttggggtgtaaactaggctctctccttcttatttgtgcctccctttaaaatcctcttttaaatctttatgagtttaggatgtgatggaaaaaagattttcgaaatggctcactttgtggaaaaggtagtacttatcaaaaggagggagactaactttggtaaagagcactctttctagctcaccaatctattacatgtctttatttgtaatccctcataaggcgagtttaagactagaaaatattcaaagggacaacttcctttgggagggaggaaagctccaaaataggcctcatttggttaaatggtcattagtttgcatggatgaaaaggatgcatcatccgaaaaaaaaaaaaaaaaaaactttgtaagttttagtacaaataaagatatgtaatcatttaaaatggggattcctagctcaaagatgtttgtttgtacacgtattatatatatatatcataagacttgggataagagaaaagaggaaaaattctacatggatccctttgtgaaagagtagagtgaatgataaacataacgaattttgagccactaatgaaaagagaggataggataaatagttagggagtaagaacgcttttttggggataaagggactttaaccctcacgatttttagatgaggggtttaggtattagaaatttgtttacactaaataaaggactgcttggaaaattgtgttgaggattctcttttgagaataagtctctctagaaacaagtgattgtaaggaagtatggagaggaagagggggactggtgttttagagctttaagggaaggttatggaagggtcgttcgaaggctattaggggcaagtagaaggagtttaacaaaagggttgattttagggtagggaatggtaagagagtgagattttggaaggataagtggtgtggtgatgattccctagtcaaggctttcctagagttctcaatagcttttgctaaagaagtttaggtagactaaatgtgagagcagtatggggaagtgggctattggaatctagtgttcacaaaacaatataacgattgggaaatgagagaggtgaaagctttttatagaaggttgcaagggtaagtgattagaagggccattgaggatgccatgtcttggcgggtgtcaaagggaggtttctttacagtaaaatccttttactcctccctagcaatttgcaatctgagtgtgttcccttcagatattgtgtggaacccttggatcctgaggagggttagcttttttgcttaggaagctacatgggaagaattttaactttggatcagctgaaaaagaggggctggtgtttatcatgcaagtgttacttgtgcaaaggagaggaggaatcaacaaatcatatgctccttcactgtcctaaggcaaccatgctataatagcttattttttgctctatttggtgtttaatggatgatgccatctttagtgaaggatgcccattcttagttggcatagtgcttttgtagggaagtaaaggaaaatgtagagagcaacttctttatgcttattttggaccttatagaaggagagaaattggagatccattgatgattctgaattagtggaccaagctattttatggtcttttatatgtacatattcttggattggtttaggatgcatataggttttagcttcttgtatttatttgatttcattgattggatgggttgcatgtaaggcaagggtgttgttttttgtgtatccctctttttttttctttttctttttttcttttttttggccttaggtgccttgcattgtatacttttgggcacccttctataggcgcttctgacacaactgcttttatctatcaaaaaaactagggtgcaccatcccaaaactaagccaagagagcatatgtgctatatagagaaacatgtatgaaaagggccaggggtagggattaaagggcccctacattgtaaatgtgttcccattcccttttctgtacgagaaagcaaggcccttctcttttgctaaatgcattttctgttcctgttcactatcccgattcacatacaaaatggtcaatgtcctaggcaatgttgctccttagcatcagctcactttataatatgtgatgtatgtgtagactagaaataccccacacatttttttttaactagaaaatatacacttttggagttgcatctattaaaatcaatggtttctatcccaatttttagtaagtgagaattttggacattgagactcatatggctattggatacacccagaagagcaaatttttaaatccttaaatatatatccagatctatatttccttccttcaataagctgattttctctagctaaccacccaacatatagatggtgtaagatattccacaaaataaataaataaatcatatagaactggacatttttaaccgctttttttttttttttaggtatttcaaactatggtatctggtatcgaggaaccaaataaaagatagtggtgtggtgtactctataagtatttattaggttcaaaaatccactgtattcactgtactttatattgctgtttgactaatataagtgaggctctaatcatttagg

SEQ ID NO: 12849 - DNA, 7989 bp, Vitis vinifera
  Intron number 4 from transcript GSVIVT01036042001 (locus G SVIVG01036042001) derived from phytozome v7.0 (chr-ID chr4 ; pos 7750290 to 7758278)
ttcaaggtaaccaacctgtaccttaaatgaaaagccatgaaccattcaattttttgtgcattttgttttctaataaaattagacacccaacaacccacttgttgaagctaggataatggttttgaagggttaattttacttgcatcacattaagtcaccaataatttctaatttcgttgattagcacccctataaatgtcttcattttataaatttattttgtagaaagatttaaataaaaagattttaggtgtatgtatctttcttatatattttttacttatcaaaaaaaaaaaaaaaaggattaggtgcatgtatctaaccattgaaaaataaattttatagatgaaatacatttataggggtgttaattgacggaatttgaaactcatggtgatttgatgtatttgcactaaacctcaggaggtatgagtgaaattgaccctagttttgaatgatcagatgtttcctaccctagcaagcttgtgccaagtgcccaattttggtacttgagacacatagatcaattaaattcacttatcgtttattttcttaaaatgagcagaaaattttgtgtatgcttcgtctaatgatatcttctataacaaaggttgttgagggtgctactgtagaatatttacataatcacataaattaatcatacatggttaaagaatactaacaatagaaaatcactcactataaagaacatacctgtttgagccatcacaaaataaaagtgattgattgttgcaaccaagtcttcctctctatgatcttgataacagctatggtggctctatgggaaaacagaaagaccctttatctagattagagaggggacttagcataactcaatattaggttctcattgtgccctcccataatgggcttcaatgagacccatagcctacacttgccactcaactgagcttctactcaaaaaatgcaaaacccaatccaaaatgtgatcactagttaattgggctcattatataatagactatccattaacccgtttttacaaatacaaattattcaattaatgttagcccatataaaaattttccaacattctcccatttaggctacattaattgttttttgaggattcattaacttcattttgaaaataagactctcgggttaagtacagaaaagtttattttgtgtggccacaccttttttttttaaaaaaaaaaaatgatagtctataagtagcatcttgacaaacttatccggtccaacatggtcttaatattggactatgatggtctatatgttaatcgacatggatcgtaaacccaatagtgtagtaagaaatcaataccaacatgtgatcatcatctatatgcattgtttcttatcagtcctcattacaatttaccagcaaaatgaaattgtaattgcaatttctcaacaaaatgaaattgctacaatttctaaacaatatgaaattgtttgactttaacaagtcatatgtcaccaatagtgcaccacaagatctcaaaatagcggtatttgtgacatccaatagtttacaactgtaattcttaaagttcaatatcttaagataccatgttgtatgtaattcaattatgacatgctataatataatacttaataatgatgatcataataataataataaattaattttgcaagtcgcataacaataattgaaataagggaaatcacaaaagctcccactaaattaaagaatcaaaagacttaatgacacccatattcacaacatgttccttgaacgttatggactttaaacctttggttagaggatcagctagcatggacttagttcttatgtgctcaatcacaatatctccttttttcactaagtctttgactgtaaggtacttgatttccatatgcttagaacccatactaatcttattattcttggagtagaacatagctgcattattgtcacaataaatcacaatgggtcgaaagatggaatcaacaacttgcaactctaaaatcagatttcttagccaaacagcttgagatgatgcaccataacaagctacaaactcagcatacatggtcgaggatgcaattaggctatgtttgacacttttccatgaaatggctccaccagctaacataaaaatgtatcctaaaatagatttgcgattgtcagaacaaccgccaaaatcagaatctgagtatccaactacctcgagatcatccaccctcctatacacaagcataaaatccttcgttctttgtaaatatctcatgactttgtttgtagcaacccaatgatcatgtccagggtttgataaatatctaccaagaacttaacaatgaaagcgatatcaggtcttgtacatacttgtgcatacatcaggctaccaatggcactagcataaggaatagtcttcatggcacccttttccaaatcattctttggatactattcattactgagtttatcttctttcacaacaggtacatcaccagctttgcacgtctacatattgaattttttaagcacacagttgatataggctctctgagatagcctaaagaagtttcgagatctatcatgataaatctcaatacccagcacaaaagatgcttctccgagatccttcatgttaaaattagcagacaaaatacgcttggtatcattcaagagattcacatcgctactagcaagtaaaatgtcatcgatatagagaaccatgaaaatgtacttgctcccattgactttcatgtaaacgcactgatcaaacttgttttctataaaaccaaaagacgtcacaattttgtcaaatttcaagtaccactaacaagaagcttgcttgagaccataaattgaccttttcaatctgcataccatgttctttttcccattttccttaaatccttcaggttgtgacatgtagacctcctcactcaaatcaccattgagaaaagttgtcttgacatccatctgatgaagctctaagtcaaaatgagctaccaacgccataattagcctaaaggaatctttggtagagactgatgagaaagtctttgtgaaatcaatttcctctcactgtgtataccctttagcaaccaaccgagccttgtatctttcaacatttcctttgttatctcttttggtcttgaatacccatttgcatccaatgggtttatatcctttaggaagatcaacaagttcccaaacatcattgtctaacataaactacatctcatctctcatggcaatcaaccattcatttgccttatcactactgagagcttcatgataagtagtagggtccacttcttctccaatgtcatactctccatctccaatgtaaacataataatcgttagataaggcatgccttctagttctttgcgttctcctcatttccataggaggaatctcatttacaataggggttatttcgacagtggggaaattgacagtagcaactccttgctgaatcccataatcaaaagctccacatcaaggttaacgtctgagactggcaaaggtaaagaaataacatccatgggttccagtctttcattggattgagagggtatactatcagcaacatccaactctaaaaactttgccacttgagactcaacaactctagtgccacaagtcgaacaataaaacttgtatccttttgagtgattaggatacctaataaagtaacaccgagtagttctcaaatctatcttctttaaagaaggatcatagattttcacctcaactgaacatccacatactttaaaatgattcaaattgggttttctgtctgtccatagttcaaacggtgttttaggcacaaacttactaagaacatggttcagaatgtaggttgctattttaatggcttcaccccataagtattctgacaaatttgatctactcatcatgctcctcttcatttccataaaagtgtggttgcacctttctgccacgtcattctgttcaggactaccaggcatagtatactgagcaacaataccattatcttgtaagtaccttgcaaaaagtccattttgttgtccagcatcaccatgcttcccataatactcaccacctcgatcagatcttacaatcccaatgactttccctaattgtttctcaactttagttcgaaagactttgaacatttcaagagcatctatcttttctttgatcaaatatacatagccataccggaaaaaatcatcaatgaatgtaatgaagtacttgttgtcacacaaggtagtggagtaaggcctactaatttttgtatgaacaatctccaacaaattttgactacgagttgcaccatttttcttagtctttgtcaattttcctttcacacaatcaacacaaatttctaagtcatcagaattaaggcgaagaataatcccagaactaattaagcgttctacttgttctttagaaatgtgccccaaacgcttatgccataataatgaaaatctttctttagtcaaaggtcttttagcaacgctattttcaacattgtaagaacaagtagataacaacgacaaactctaaagtccgtcaaacaaaacacaattgtcaatcactttagagtcataaatcacctcaactcttttatttgcaaaagtgaaactatatccagctttgtcaagtactgaaagggaaattaaattccttctaaacgaaggtacacaaaaaacattgtccaaaacaagctgaaaaccagaatctaattctagaacaacaatcccaatatgctcaacatcaatcccgatgtcattgccaactttaagctttgactctttttcacttggcttccttagatttcttatcccctgtaaaaaagttgcaatgtgaacagtagcaccactgtcaagccaccatgaatctaaaggaacattaactaaattagattcaaaacagacataggcaaataacataccttgttcgtcttttttcttctctagccaattcttaaacttaaagcaatcaaccctcttgtgaccctttttgttgcagtgatagcacttaaggtctatgttcttagcatttccattcttctgcttctcacttccactcttcttgaaattcttgcttttcttatgattgtggaagttgggctttctagccttttcaactctttttttattattcggttttccaagagcaacgagatgaacagattcattcttttctcttttcagtttttcttccttagtcacacacttagtgatcaggtcattcacaccccaagagtcattcagggtgttgtatgaagttttgatttggttaaaagaaaatggtagagtatcgagggcttgatgaataataaacttattgggaatgggaatgtctagtgctttcaatctagtctgaagatgcaccatttttaggatatactcacaaaccccttttatatcattatacctcatattcatcaattcatccataaaatacccagcttcggcattgtcagatgtctggtatctatttgccacaacaacgagaaattccttatcattgttgctctcaggtattcctctaaggagatgctcaacaatggacctcttgattgaaatgagactcaaacagttcgatcttacccatttcgcataatgagctctcatagcttcaatgctttcattagtgggcttatgaggttcatcttcacgtagagtcatgtctaagtccatcattcctaaaacaaactctatgtctgatctccatttcttattgttcaacccacttggaatttcaattgtagtattattattgttcacaacaaaagaaactgattgacaaaaatttgcaactagatcaattatgggcaataggtaaaatgcttaaataagcataagaaatacaatacaagaatcaattgtattatcataaactcccatttgggcagagtccacaataaacaactattctctaagcatgaaaatcaataaataattcattaaaatttatttcctttgggcaaataaatttatcaaattatttatttcattcaatatcctcatgttgttaaattaatttgcacaataaccccctttgggcaggcgattatacaaattaatctaaaagtttccccatcaacaaaataagaactcataaacttgcaaattttgatggttaaatcactttggtgaaataacctcaacaattcacatgcaacgttccaaaattgggtaaattaaaaaacaatattgcccaacaacaatagtgcatattagcgatatatatgcatatgatcaaacaagatgaagtacgtcacaaaatgtactttcaatgatcaatgatcaattatagttgcaagaatttgaacaacaattttttttttattacactttaaactaattatttaactagtttatgtgatttagaccaagtaggagagtatgcttgaaaaagtttcaatctagagagagtgagtactacacttctattccatatatattagcataatttctggtaaattctcaatagaaaattataccaaagaataattttaagctaattaaaacacataaataagtaataattatttaataaatatttttgacccctaaaaaataaaattatatatctagaaaaatagatgacaaaaaaatgagctcacaagaaaaaacggggctaaaaaaagacactggatgaggttacacgcacctcacacacttgactcacgagtggggaatgtgcggcacatgtggcacgtgtggcatatgctggaggtcatcttcaacctccagcagcgggtcaaaaaatttgcaattcggatcaaatgaccagattgctacccagattataaacaattgaaaaaaaaaaggtttttcgatcgagatcttgaggggttttaaactttaggttgtttctaacaattctaagtcatttaatcataaaaaaaaaacaacttaaagatctccataattgattaacaaaattcgatttttatacctccataaccaagatcaaaaaattctattttaacacctatttcggcctcattttacatgtatttttaccttaacaatataagaaatctctctacaacaattaattaaacaaaaaaccttctcaatctttaaaaaaaatataaaacaaattttctagggttcatacccatattttcgaattttcaaatttcaccaaattgagccaaaaaaccaaaattgatgctacatatcaactataatatatgtaaacaacaaaatctaagagtttaatttgagtaaaacacaataatttgaacaaataaattttttcttgaatctttaaataagaaaattctgaaaatttaaaaacttaattactcccaatttaaacaacgaaattgcacatatgatatatcaatttgaagcttatgacaagaggaacaaaagacctaaagtttcacaatcaaaagaaaccaaaaaaccatacacattcatgaatcacacatttggctccgaaaataaaataaaataaaataaaataaaataagaaactaaaaattttattttcgatttccaattgtaaatcctaaatcatgtaaatctggctctaataccacatatagaatatttacataatcacctagattaatcatacatgattaaaggatactaacaatagaaaatcactagaaagaacatacctgtttgagccatcacaaaataaaagtgattgattgttgcaaccaagttttcctttctatgatcttgataacaactatggtggctctatgggaaaaccctttatctagattagagaggagacttagcataactcaatattgggttctcattggcccctcccataatgggcttcaatgagacccatagcctacacttgccactcaactaagcttccactcaaaagatgcaaaacccaatccaaaatgtgatcactagttaattaggctcattatataatagactatctattaacccgtttttgcaaatacaaattattcaattaatgttagcccatataaaaattttccaacagctactgctctttac

SEQ ID NO: 12850 - DNA, 16160 bp, Vitis vinifera
  Intron number 9 from transcript GSVIVT01017822001 (locus G SVIVG01017822001) derived from phytozome v7.0 (chr-ID chr5 ; pos 3774710 to 3790869)
aaacacccatttctaaggtttgccttcacatattgaatgacgagctactcctttaatgaagtttttaaagctgatgttatgcgagtaattcttttgctagcaatattaacaactaggtgcactttttcattgaaagaatatgggttactttatcactagctccaattgtgacacagaaacctttcacctttcaagtggatgtgctttatcaccaagttatttatttattttctataggttcatgttttttttattggctatagacaaaatattgtacatgtagcttggttttttctttcatgaaaaatatgttgtagtagtattggcaatatgattcagaaaccaccatgcaggtaagaaagagaccaccatgcaagtaagaaatataggaactaaaacaagccgtcacatagctgccaacaatcaagtaattatgagttagggctttactggtttaggccttgtggagaaaaggtagggttatggacaaaattatggttagataacaaaagtaaaagctcactggagtttcaggcagctttgtgctttaggtttctatgcctgaaaatttttttgattgaaagagtgaattctttttggtgtaattagaaatttgggatttgaaagtttttaggattgtaactactctgtatagtaaattaatcttctttctccctacggatgtaggcacgtggttgaactgcattaaattttatattctcttgtgtgactactttctcatttattttctttttttttgtctattactcacttgcgtccacataacagattcattatcaaagagtgggatttttttagaataaaattagggttaagagagggctgcttatgcatacaacaatgtgaacggtaaaaaagaaaagaaacataaagaagacagggtagaaaagttgatagataaaccttagaatctcaagaaggcaaagtaagggcctcacctggcagaaatgattgatggaatctcacttttaaaaagtgaaattatgcacataattcttgtttagtgaaatattaaatcgaagctgatgcccatccaccacaacccccaccccccacctggaaccttcgaaataagaaacttcaaatgcacaaaattttaactcctagaagacaaatagtaaaccagaacaaaattaagctcttgtggaaggcttatagaagcaaaaacttcccataaaggcctaattttacagcatactactcaatattgacattgctgctaaatcagggacatttttgtttgggatggggtggaagagaaagtgaggaggagactagcatggtggaaacgacaatatatctccaaaggtgggagaatcactctcataaaaagcaccttggctagcatgccaatctatcatatgtccctgttccggatgcctaagtcagttgctagaagattagaaaaagtccaaagagacttcctttggggagggggaagcgtggaaaggaaagctcatctaattaagtgggaggtgatttgtgcggacaagagcaagggagggctaggcttaaggaagctagtgctcttgaacaaagccttgcttggtaaatggatctggagattcgcttatgataaagataatctatggaagcaagtgataacggcgaaatatggctaagaaggtcatgcttggagagcaaagagggcttatggggcgtttggagtaggggtgtggaaggaaattttgaaggaaactaaatggtgctgggacaacatggggttcatagctgggaagggaagcaaaatcaatttttggactgatgtttggtgtaatggtacaaggctgtcccaaaatttccctcatctattcgctatggcttcccataggaatgctacggtggaggagatgtgggatcagaatttcggtcaagggggttggaatctaagatttttgagggactttaacgattgggagttggatataataggggacttgctccatgctctgaggggttacaagccttctatggaggaagatttagtttgctggaagggaggaaagaatggaaagtttagggtcaaagaagcgtatagattggtggccagatccaatgatattgtttttctgtcaagatgcatttgggtggattcagttccaaccaaggttgcattctatgcctgggaggctacatgagggagggtgctcactcttgataggctccagaaaagaggatggcagcttcctaattgttgctttctgtgtggttgtgaagaagaaattgtaaatcatatacttgttcactgtatagtggtcagagttttgtgggatattgtccttgggttatcaagtgtgcaatgggtctttccagaaactgtaaaggaggtcttaactagctggagaggcccttttgtgggaaagaaaaggaaaaagatatggaagtccatacagttgtgtattttttggacagtttggaaggaaaggaatagactaacttttagggggggagtgttagatattcaaaaacttaagaattattttgtttgcagtttgtggggctgggctagattgtatattggagagaagcgtctatcccttatagggttcttggaatggttagcgtccaactaaggggtggtgagactttgttggtcttctttttgctttgagagggggtagttgctttgtataccccctgtatactttgtaactttccgtctctttattaatacattttgctttacttatcaaaaaaaatatatatatattgacattgctgctaaaacaaggaaaaacattggaatatggaacaaggttttgctcttgtatttaaattattatttttatataaataaaagagataaaattgtattgaaaagagtcgccaaaacagtgactcacagtgtacaaagtggaaacacctccttcctccctagttggaagaaacaactgtcaaacacagaggagcaagaaaaaccccaccctcaacaagaacccacccaatcaatgaaaccaactaaagtcgaaggaccatcttttatgaacaattttatctctcttcaaagaaagaaaacaaaagaactcgttagtctttggatggacaacgcatcatcttcaaacgcaattctattccttgccttccaaattgtccaaaaattacatatggggctagctctccaaactttgttttttttttttttttcccacaaatgacccgttccagcccaaaagtgtcgccttaactgtggctggcagcacccactgtgctccaaaaagagagaaaaacaacacccataaagtctttgtcttggcacaatggagaaggatgtgatctatcgattcttcatgcattttgcaaaggtagcatctatttgctaaaggtcatcctcttttataaagttggtccaaagtaagagcttttccccatgttgctttctacaaaaaaaaaaaaaaaacctcactttaggctgcacacatgttttccaaataacatttgatggaaaagagactggagggcctaaagctaaggctttgtagagagacataacggaaaacttcccacatttagtctctatccaaaacaccctatcttccacatcccgctaaacactcttcccattgaggcctaataaaaacccgtgcacctcatccacctctcaatcattgaaaggtctagagaaatgcgggctccaactcccccctcccttagtagaactccacacatctttctcccaagcgtccttggaaacaggtagagcaaataaagtaggaaacgaaacacgaaaaggtgtagccccataccatctatcctttcaaaatttcactctttgaccattacccaccacaaaagagagcctactacttacaacatgccactccctcctaattgctttccacaagcccactccatacccatccctcacttccttggaacaccaaccaccttgctccttcccatactttccccttatcacttgattccaaaaggcccttctttcatttgcaaacctccaactccatttgcacaagagggccttatttagagtagagagacactttacccacaacccctcctttgcttttgtctaagcaaaccaacgcccacctaacaagatgaggtttctgctcaagagcctcgccttcccacaaaaaatccctctaaatctgctccatcctcaacttgactgtcctaggtaaggaaagcacatacatgaaataaatggacaagctagccaaagtgcttcgaatcaaggtgatcatctctcctttggagatttccactttgccaatctctttcgaaacctctcctccactccatcccaagtagccatagatttataaggagcacctagtgacaatcccaaataagagaatgggagactcccaatcttgcaaccaagttttgtagctagagtctccgtgttttccacacattccattgggattaactcacttttatccaaattaattctcaaccccaaaatggcctcaaactacattagtgtccaacttaaattcatcatgagaagccccatagaaaaccaaagtgtcaccagcgaacaataagtgagacacttgagcctctttacctccttaacccctcaccttacaggccaatagaaaacccccatttataactctccaaagaaggcaactaggtgcctccatagcaatcacaagtacaatgagagggagtcttcctgccttaaacccctagaactttggaagaaacttaagggagtcccattaactagaacagaaaaactggttgtggagatacgccaccacatccactgaagccatttctccccgaaacccatcatacccataactgaaagcaagaaggaccagtccacatgatcatacactttttctatgtcaagcttgcatatcactgccctctcattgctctttaaaatcaaatctatgactttatttgcaacaagggcaacatccaggatttgtcttccctccacaaaggcattttaggccttagagaccaccttacctaccaccaactttaacctattggttagcactttagctagccacttatccagccctcccaccaaactaattggcttgaaatccctcaagtcttccgttccccttttttttcggatcaaaacaaggaaggttgcatttagatttttgacaaagttgttatggtcatgaaactccctaaaaaaccccattacctcttccttcacaaacctctaagaatgttgtcagaaagccatagaaaaaccattaggcctaggtgttatccctactaaagcccttaaaagcctcaaaaacctccagctcagaaaaaggctcctccaacctagctgctccaacaacctccaatcatgcaaaagacaaaccattaatactgggcctccaccctcctgtagcaaacaacaagaccttaaactcagtcaccattccttctctaatcccattctccttagttaaccaagaaccattgattttaatccgggccatcaaattcctcctcctgtgagcattagccatcttatggaaaaaactagtgtttctatccccttcctttagccacacttcctttgatttttgtctccaaaaaatttcttttaggagaacccactttttaaaatcctcctttgctcttctcctagcttcaaactcgtgaacagtaaaaggccaagataactttactttgccccagaattccacttgattcaaagccaaagccttattagctttaattttaccaaagacattcctattctagtctctcaataatggctttagggctttcaactttgtggccaaaacaaaactagcaaacccattaaaattgagaccctcccaccaagcttgtagcttgtccttgaagccctcctccttcaagcacatattttcaaatttaaaaggctttgggtctctcctcacgtctcccttgtctagcaaaataggacaatgattagaaaccgatttaggaaggacacactgaacaacccctataaagtgaccttcccaatcctccaagaccaaaaaccaatctagcctagaattagattgataattcaggccacccctctaagtgtaaggtcctccctgcagaggcaagtcccttagcttaaatcttcaataatcttaaataatctcctcattgaataggtaagtttgcctcctctattagactccacaaggaacctaaccacattaaaattgattgccatacaccaagggccacccccccacaaccctctaacaaaacctagctcaccctagaactcttccttctccttcttcagagttggaccataaacccctgtaaaaatccagcaaaagtcatcctcatagttgatagttcttaaactggaatgacactgagaaaatcctcacttccacatccaacaattgtaacaccctattgtcccaaaacaccaacacaccactggaggcacccttttgaattaacaaccccccattttaaacatcttcccacttcaaggctctggactattttcttcaacatctcctgcatcttagtctcttgcaagtagaccaagtccaccttttgagacttaaatcacctttctcttatgatttaattctcaacttcataaagcacaatatattacccctgcacacttctcaaaaccaaaaatcacagcttcattaaggaagttgtagttcccccatacacctctctacaccactataattcaccaaacactgaagttttttcaatttcttctctgatcttgagatcttttagactttccttctttttccagccaaattacccttgagttctttcctttctttcattcttttcataagcaccataatctccccctcaaacccctcaataggcattcccagacctcggcagaaagttgtgaagctcatccacgaaatcgaggcactcccttctttctcctccaacccactttccaaatctcttgccagtagcgtttttccaccatacacaccttggccccccattctagctaagatgagactcctttctcactcttatctgcctagatcaccctcaatgggtcaatgaccgcctctccaacctcaacggctggcccatcgagcatcccaaggccctgaccaacaaccaccattgccttgtcccccccagagtaagaagaaaaaggagaaccccgatccccaaagctaagaagggaatgaggctcaaaaaatgagtacatggaagcttcctccagcagggactcatccactacaaacgtccctctcgcctcagtagtcgacacagcactgaggatcacttcgtcgaggctccgctcccaaacaggaatcttaactccaaggagccctaagctcttttaaacctccagcaaaaatgcttgggccagacccttttggcttaatgttggagagttgggttgtcccttttccataggcccaacaatccctttgtccaccaagctttggcccttattgaggcccataggctcaatcctaattgagccctgcaacttaggctcctaggctctagaatccagtccacgcctctctttgttgaactcggcccagtaatctttaggcccactcacttccccacttaacgtctctccaacatctgaaaaagagcacatttcctcaacaattgccttcctcttcccatattttgttgcacctacctctgcacccccagccatacccaaatcgtgcaagtcaaagtcaacacccaccttctttgctctgacttcgcctctggaacacgctacttcatcccttggagtctgtgcttgcacctgcaaaggtcccacacccatggtggcacttcccaccatagttggattgcaaaacaggaaaaacccaccaccaactataacatcccaagaaggtctttccccttagacctcactaaaagcctagcccattgaagctgcacgaagtttgttgcttcatcgttcacaacaatgaaacctccgcaactatcccccaacttcctaaacacctcccagttccagaagtgtaacggaaaacccaccaccctcacccaacaatgattaacgtgaactccagcccgagaacaacctacctcaggtccccacctctccagatgaaacaccttgtccccaaagcattgaatccctcttcttaataccctctctgtttccactgcagcctcaaattctgccaggaaaagcccactgcccaaattcgaaaagcttacttcttccttcaaattccacagacgcactccccatcttcttaacaaagccaaatctgggactgaagctgttgctcgaccccaccgttccactagacagcgccccaattgcttctccctactcctcaagtctctgcccccaagttaaagccacactgtgtctcctagtctttcagccttcgcctttgcaacctcaacaaaagtccttcttgcctcctctacctcaacctgatcttcacctttcctgcctactctatcactaatagggccagagcccaccttggcttcatcagggtgtaacaacaccaagagaacacaacttttcagccagcttaacccagccccctaggatccctcttccctccgaaaagacgaaacagaacctcttcgcttccacatcacgaacagagcagaggatgaaccttcctgccttgttagagcacctttccaatctaaatttcctttcctcctcttcccaacttcttacacctctcccaaaactctcctccctgcagtacacttccaccccttccagcaagcacctcaaactggattcgccaaacctaatccacaagaagaaacctctgcatctctccaagataataccacgtagcttccccccaacatcctcaaccgaaatctcaaaagactttgactcaacagcaaaccagcaactaccacctaccttgcacctcattccacctccaagagtaccaattgacccactcataattctgctcttttagttaaacctgcctggtagatcttgcattttgcttgggaattgcagttaaatgaaataattccattttgtttctcatgccattttatgatacaaagtcattatctaccagtgatgtgagctttttttaacacatgcctagtggaaatgacacatatggtagttgacccaaattacatttaccaataactcccatgcccctaggatcacatgtgaaatactcacctgcacattatacaaaattgaaatcccaaatcatctactcttcatgaggtgattttcctaatttacataaatctttaatctttgttgtatataccaaagcctagagttgtagcaatcctggttaagaaaaacccaaaaggaccactatggcttgtagtatacacattttcattctttgagattgtaactcaaccaaggtatttctcaattcccttatactttattagaggaataatacttatatatatatacaattgagagtcctaaattaggaaggtattatccctaaggaaacaaccaaattatggtatgtacagagatatatacagctaacactccccctcaagctggagcatagatgttgatcatgcccagcttgttacaaaagtactcaactcgagttccatttagagcttttgtaaaaatatccccaagttgctctccagtcttcacatagccaatagagactagattttcctcaatcttttcacaaatgaagtgacaatcgacctcaatgtgtttggttctttcatgatagactgggttcacagcaatatgaagagcggcttgattgtcacaccaaagctttgctagcattgtgcacttcattcccacttcacataagagttgatgtatccatatgatttcacaagtagcctgtgccatggccctatactcagattctgcactcgaatgggatacaacactctgcttcttacttttccaaaccactagattcctaccaaagaacacacaataacctgtagtggatcttctatcaaacttagatcctgcccaatccgcatcagaaaaacactcaatgcgagtgtgtccctgactactatatagtatgcctagaccaggagccttctttagatagcacaaaatctgctctaaagttgcccaatgctttattgtaggcgcagatgtgaactgactaacaacacttactgcatatgcaatatttggtcgcgtcacggtgagataattcagcttcccaaccactctctgatacctctcagggttgtagaagggatctccatcatctggcataagttgtacattaggaaccatcggggtagtacatgactttgcttctatcttaccggtctctttaagcagatcaagcacatacttcctctgtgataagaacatccctttcttgctccttgatacttctattcccaggaaatacttcaattcacccaagtcctttgtatgaaacttggaatgcatgaatgccttaagatcagagattcctgcatgatcatttcttgtaataactatatcatcgacataaaccataagaagtatgataccagcagttgatttcttgtagaaaacagagtgatctttctcgctcttgttcatgccaaatgcttgaatctccttattgaattttccaaaccaagcacggggactctgcttcaatccatagagagcttttttcagacaacaaaccttcccatactccccctgagcaacaaacccaagaggttgctccagatagacttcttcttctagatcaccatgaagaaaagcattcttgatgtctaactgatgtatcatccactgttgggaagcagcaatagaaataaatagtcgaactgaatttagtttggcaactggagagaaagtatcagaataggctactccatatgcctgagcatatcctctagctacaagcctagctttcagtcttgccacagagccatcaggattaacttttaccgcaaagacccacttgcagccaacaactttctttccttgaggcaaatcaacaagtttccatgtatgattatcctcaaatgcacagatttcttcaagcattgcattcttccaaccaggatgattcaggccctctataatagttttaggtactgaaatagaatctataaaggctacaagaacacttgaagaagatgataggtgatcataagacacaaagttagcaatggaataggtagatttgcaatgttgtttactttttcgaaggctaatggaaaggtcaagatcactggaaggatcagatgacgaaggagctagtgcaggacatgtatctgttgtcactgggcgccgagagtacacctgtacaattggtggtttgactggagaaggaggaatatcaacaacagtacccaaatgagcaagagacgcatcaaaatcaaccacactggagtgcccaacagttggtcttgaattaaccacttgatacacaagccattcttcattctcctcctcactttcagaacttgtgggtgaagagaaaaaggatgtgtcttctgaaaacgtagcatccgttgatactagatacttattgagatcaatcgagaaacatctatagcccttttgcagtcttgagtaccccaagaaaacacactttaacgccttaggatcaagtttagtaacaaaaggccttgtatatctaacatagcatgtacatccaaaaattattggttcaattggaaaaagtgatttctgtggatgtattactttgtacggaatattgcctttaagcactacagtgggcatacggttgatcaaaaaacaagctgtggaaactgcatcagcccaaaattgtttcggaaccttcatttgaaacatgagtgcacgagccgtctcaagtaaatgtttgttttttctttcagtaaccccattttgaaaatgagtatcaacacaagatgtttgatgaagaatcccattatgactcatgtagttctgaaatgagttagacacatattcttttccattatcgcttcttactattttcacaaacacatcatattgggttttaatctcagcagagaatgcacaaaaatgtgaaaatacttctaaacgattcttcataaaataaatccaagtcattcgagaaaaatcatccacaaaggtaacaaaatatcgaaacctagttttagaagtaacaagacaaggaccccaaacatcaaaatgtactaactcgaacaaagactcagcccgtttattaatccttgggcctaaagaactacgatgatgcttcgcaaaatgacacgactcacaatctaatgaaggtaaattatcaaactgaggacataatttcttcaacaccggtagagaaggatgtcctaaccgacaatgagcttcaacaggagaggcagtattgacacatgcaactggtcgaggtacccactcatcaagaatatagagtccatcagatacatgtcctttaccaaatgtccatttcgtcataagatcctaaaacacacaatgatcagggaaaaatgagacactacaattcagatttttggtaagtttattgacagagattaggttaaaggccaaatttggtaagtttaacacagaagataacgtaatagaagatgttggtttcacagtcccagaccctttaatctcataggtagaaccatcagcaacaataacaggaggagcagaatgtgttctgaaggtagagaaagttttatgattacctgtcatatgatctgtggcacctgaatcaattatccatttgtttgaggaggagacaagacatgttttacctaactctgccagagcactaacaggagtagatgctttcagtgcttcttgatactgtgaatatttagcaaactcttctgctatcattgtgacgatcttgtctgaggagtttgaaaatgtagcagtatcagatgtagcaacattggcagtttgaattctccgatttcgattctgcaatttcttgcaattcttcttggtatggccaacctcatggcagtaaaaacacacaatagtacttgaatcattgccacaattttcaaatgccctgtttccgcccctgttattcaccctccttgtattttctgtatttcctccttttgcagcaagaacattgttgtgttgagaagacgagacattctcaattcgtagaactctattgaaaacttcctgaagggaaccaatgtcagaaccagaaagaatctgagattttgcagtctcaaactcagatgggaggccggataagaaactcataacagccatctgttcccgttgagcttgttgtactctaacatccagactgaaaggcataagtgcattcaattcctcatatgccttcttgaagtccataaaatatgcaatgagggatttagctctcttctcaggacaatggaaggcattccatacatcatacatccgagatacatttccttttccagagtaaagaaaatctagataatccattagctctttaacaaattcacaatgactcagcagaccaacaatatcactattaatagagtttttcatctgcaaaaataaccatgcatcatcttgcatccaaagttttctagtgttatcattaggaggttcctcagtcaagtggtcatctttagcaacacttctcagataaattttgatagtcttgctccattcaatataattagacccatttaatttgtattcagttattttttacacaataggcactatatcagcaatagattttttattctcttccatgacaataaaattcaatctccaaagtaattttacaccagctcagaccagaaattacaattcaccacagcaagaagaaggaaagagacaagtacctctcttacaagaaagtgtcaaaggcgtcaaaagcgtgcgtcaaaagtgtcacttataatttttcttcccccatttttgtcgtagcaactataaaacccttgactccctctctttctcaccccgaaagttgtgagggaaaatggattactgacatggcggccaaggtgggcgaagaagagtgtgtgagaaactcagatcgacccagtttctaagaggagcagttcaactggatcggcatcaaagtagtggaggttcgagatttactccgacgaagtaacaacagcgagggtaacgaaggattccttcgtgttcctcactcctccccggaaagctacgcgattccgtaatcgtcgatgaatcgtcgctatccctcgatcggcgtctagattttccggcgaagggagctgatcaaagatcgaagagagaaattttggttacaatggtgacaaatctgataaatctgatcagtcaaaggaaaagaggaacttcgtcgacgcgtcccaagagcagaatctcacagtccaagaacgagatcaccctggccggaaaacgggattgcaacgccaatggaattggtcggaggtcaaaagaagctgctacgctcctccacgcgccggcgcgtgagcttcatgcgttcagcttcaggtcgtcggacttcaggtaccggctgatcttgacacctcgcttccccctctgaaggcagtgacactaccaggtcacttttattctgtgacccaagaacaaacctagaatttgagccaatggctctaataccatgtaactcaaccaaggtatttctcaattcccttatactttattagaggaataatacttatatatatatacaattgaaagtcctaaattaagaaggtattatccctaaggaaacaaccaaattatggtatgtacagatatatacagctaacagagatcaatactaatatgtttagttatttaagttaaaaagattaactgtctgctgaatctaaataaaatcttaatctaaaataaatgtgaatgaaagttttctaaaatatttaatgattttaaacaaaacaaaaagagaacattcaaagagtttcacaatccaatgttaaatttgtagagagagagagtatgatcaagggtttaagatcaaagtctatttgagatcaaatttgaatcttaagaccaattcacatttagaacttggatatttactttggaaaacaaacctcttaaactaattaaataggtgagttaatttaatttctactttatgtgatcacaacccatatctattttgtagattcgattgttagaatcattaaaaatataaataaaccaatcaaagactttaccgcgaatgcaactcctttaaattctttatcttcatgctacatcctctggatccaacataatcaaccaaacatggtggagggttcctcctcattacccatgtttggttgccaaggaaatagaaaagaaaataatagaaaactaaaacattcttaaaaaactaagcagaacaaatagatagatggagaattcccccttaaaaccctaacaatgagaatttatatatgttttctaaccctaaaaagacatgtgacgtaatcttattgttattacaaatataacaatcgatatcctgcaaatacaaagataaagtctgatttaggaattctgaaatgaaaacaaactcaaggccattgatttcaaaatcacttcttatttctaaattctgaaataagccactggttgaaaaccgaaatgggagtaattttgattttgcaaaactgaaatggacctccttacttcaaaatttaggaggtattggtttcctcccgtaatgctttcttcaattcagtttggaaggttttgggttcaaaattccaaattcatgcactggttttgttgctctgctccttttgatttccatttgattcctttcatcgatttgagttgtttttgctcctttttggctcccactacttttaggtttccttacatgattccatcaacttcatgaaatctttccttccttggaaatcgtctacattgtgtgttttattctctttttgctgtattattcgttagataaacacacaagtcctcaattggggatttagcatacatttaagttaaaagagtagattaacacttaaaatgcatttaaaagtcttgtcttaagtgagagaaacttcggttttgagtgttaatcacaatctcctaacctcttattccaaacaagcatgtgaaaaagaacggaatcaattctagtgtaaaggtcaagtaattggtttaacttgcatgtgtttctccaaacattggcatatagatggtaaattttcctcttccatgtggaatgtattgtttttttgataatcaaaagctcatatgtgatatttttaaagaattgataataagaaatgtgtgtttccccaatgtcgacttaacgaagtggctatccattttatgcagc

SEQ ID NO: 12851 - DNA, 7173 bp, Vitis vinifera
  Intron number 2 from transcript GSVIVT01037107001 (locus G SVIVG01037107001) derived from phytozome v7.0 (chr-ID chr1 8; pos 29087917 to 29095089)
tggggtgagaagtatttcttgaacaactacgagaggttggtgagagtgaagacactcattgatccaaacaatgtattcaataatcaacagggcattcctccaatgctcacagccggatttaaatgacaggagtgagtggctgagagagagagatgcatacttgtaagttaagatttacatataaaaaacctgtgtatgtatgtgctatagacgtcttgtgatgacagaaactactagagggttgtctgtttgtatgtttgaggtagctcgtgtgtatctgccatagggttgtgtgtgtgagagagaggagaggggggtggttggctatttggggtcattcttgtgagagtcctattagtttgtagtgcatctattattgatggcacttctttcaaaacatgttttaaaaacatgtgtttttaaagtgttttgatgataagatatatagtaaaaaaaagtgctttttagaagtagttatcatgtgctagtttaaaaattacttctaagtaataatttagattttttaaatataattttaaaactttaccaaacaatttttatgagggaagcacttctaaacaccaagtctagttttcttgatgcatgtttttggtctattgttctatgaaagtatgaggaaaggaaaaaataaagtattaaaaaaaaaatcattttttcatgtgtcatttacaatgaaaaactgaaagaaaaatctaaaagaaatgcttcaataagtcattgaacatgaaattatttttttcttaatattctagaaatgtttcaataaaacagcctccctaattttttttttaatcatttaatatcattgaatatattattattattattattattattttttttttttttaaaaaaaaagattttttggcaaatcatactttatatttttattatcaatgaatcgctttgaaggattctttacattttaagagtaattttcgaaattttaattttaattagaaaacatgctctcaatcatatgattagagagcacctagaatgttatcaaaattgctcccaaatagactttaattcatgattaaatttcatgaattttgttggatccttcttggttgactccaagttcttaattgtggcccaggaaacttatggtgggcccaaccttggacgaatggcctagaggagatgggcttgggataatgacactagaacgaacacctttcccaattattagattagaacttgaaagagaattagggaaattcaatgcccaagatgtctcatgcatactcctaacaagtgaggttgatatcttttttgtcattgtgatatgaataggtggattttaggctataagattaaggtgtggttgcgaatgtttctagttaaggtattttttttttttttggaataatgtttttcatgttaaaagtattttttagaagtactaatgaataaacctaagaattgatttgtgaaagaattttgttaaaatgcttttaatttattacattttcattaaaaatacttttataaagaatcccttgaagtgttaatatacatatatatttcaatcattaacaatcttaaaatcactttcaaatgaactctaaatgatgactaactatagtcaaaatcgaattttattactgccctcctagattccaagctcttgattgtgggcctgaccaactggccttgaggatatggtcttgggcagttgggatccttcatctacatcacccagctggttcagcttggcccttggcaaatctctgtcgttttgtgaagttccttttacaagtgctacaactctagctcattaaaaacaagatttttggcaaatcatatacacctcttaaatttttttttcagtaaacacctattaacatccctaatgttataggtgtatgtgaatatttgaaatgtcttttgtagtggtctagtgtcagcccgttagaccctgagaaaaatttggagtgaatttatggggtgtgacatctagcataggcaagatttgttagggaacatgcaaagagaagtagtttatcctaattactaattattttgataaagataagatttatttactgtgaaaattgtaattattaattatttagatacgaatgaaataagatatgggacaaaaccttattccacttcaaccaattaatataacatttagctaataaaagggctttgataccaaacttatgtacaaaaagcacaagaataaaaggaaaatagaagcagcaaatgaagattctaacttttattgaagctctctagaggagttgtatggtctcaattttttctccaatgttttcctttttactagttccttctatttatatacaaatgacaaactaattaaaggtaccaagaaaagctaagaatccttttctttattcgcatagtagtacatggtaatgaggagccaatttgtagagcaaaagattagggaaagcaacaatgtagagacttttccaaatttttacattgtgaatcttgccaactctttcaatgtgaatgttgacaagatgtgtcacgccccaagacccactctaagggcgtgacggtcatttcacacctcaaacctaaaggcttgaactgtaatctgaccaaaacaatcatattgtaactagaagtaaccaagtactaaatacctatttagagtaacggaacaaaattctaaaatatttaaacttaactttaaaactaagcatccatcaaccaaaatccattatccaaatagattgcaaactcaaataaatcaaatgctaataaattttcataatctcaacttcaaactatcataaaaaaatttgtaagttcaaatctaaatggcttccaaaaaccaaataatccaaatgaacataaactcataagctaacaatgtccaaaaataacattctaagcaaaatcctaatgatgacctttcctcgacctagccatcactcctcgcctgaactaagggtatttgaaaaattatcaataaataggaatgagctcaaagcccaataaggaacattaatgcagtcaatggatcaaatatttcaagttcacttgcaaaataggagatattataactaattattttcataaacatttgaatcagttttgtcaattcattcaaaacttttaactgtacactttcatttctgattcaaacattttcatatcaaattcaatcaaaacattcaaattatttatttattctggttatcaaacatcaaataatgcccagttatgtgagacttttcaaataggtggctaacctcaaattgttcctttatgatggacggaaccaaacactactagtactaataacctctaactaaacccgtagaggctggggtccaaatcaattacattattcaccaaaaaatgtaaaagtcaactattataccccgttgataagggttaaaaagccaaaagtcaactattatattctgttgacaagggccaaacaaactggagtcaaacacttatttcaattattcaaatttgtaaaatataatatcttcacatttctctgttataaacaaaatgtaaggttctaacatacttttcatgcaaaacatatttgatccatgcataaaacgaataataactgaaaacgttttcaaatgatgtatatgaaaatttgtttctaaaaaaaaacaactgtattaatttcccttacctcaaaagaagtcctaaaaaactttagagaaaaataatactgaaaatctactcttcacctaacaaaatataagagaaataaccattactatttatctaaaattataggtttgacaatcctaaaattttaggtattcaaattaacgtttttaattatgaaagataatttaatctattcctattttagaaaaattaataaatttctaattcatataaaacttaattttattttcaatttatttcttgggacacaacttaatttaattaaactataatttatttcactaatgaaattttatgttacttattaacttaatatttattattaatctaattataattctataaatttaactaatttgtacttcaccttatttatttatacatagtttattctatcactttcatattttccaaaattaccataacactcacacaactatcattgtaatatatataaatatgtacataccatccacctactcacacactccacattttattattaataatattattattttcctcgttcctctatcttccagtcccacacacatgcaactttttttctcaccattcttctatttttagtgcacacacgttccttttcattttttatttatttcattacttaaatctattcatctaagaaattttgaatttccctatttttatcaatagagcaatctatattcataatttcaatattttgacctaaatttttttaaataaattaaccctaacctaaaatcgaaatcttccaaagaattttttttttcatctaaaaacttaagatttctcaatttccaacaataaatcaaaatattaaatttccaatattttgacattaaaaaaaatttaaaaaaaataaactaaccctaatctagatttggattttccaaaatatatctaatgtgtttgaaattaactaatgaatctaaaatattaatctaggggttagaatcttacttatagagatttattcttcaaaccttgaaatttgattccaatcttacgttctttgtaattttgtgaataggaacgctattcagaaaagaacaagaagaacataatttctaatttatacatagagtatttattcaaaaaattgcatttttacccctctttcattttattaaattaatcaattaattcattaattaattaatttaattattattaatattttcctaaattacccttaaaaaaaacttgggcattacaagatgacaagtcttggcattttttttcctttaaatgctaaccaatctttatttgtacatgtttataatattattgcatgaaatacatcaatgctgggcattgtctttattgttgtttttccttattatggtttcattgcattttccaaattgtaattattatgatataatatttaaaagcatgaaatgatgtaatacaataacttttcattaattaattaattaattataatttctagttccttaatatgttttatgtatataaagtggtagaccaataccatacaccaatcaatttagaataaaggagcaatgatttcaaaagatatatcaatttgttatttcattgtaaaagattaggttaatatatttttcaaattttcaagaaaaatatcaaagatttcagttatatgattcataaaaatgttaaaaatttcttgatccacaaattaaggcataagatcaaagatttccttttttacaagatatatatttatataggcgaggtacatgataaaaatggatctaactaggtcatgatagactatagactatgtttcgtgtccttgtttcaagacttttttttgttctaaattgtttgtacaaaaaagaatatttttcaaatatcttattattcagggtttataaaaagaatgtttgggctaaggaagagttacatgctctaactatgttctcaccaacaagtttgcattattttaaaaataaaaatgttgactagtctgattaacttgatctgagtaaccaaattggtttgattagttgatgatacatcagttatctaaaattttcttttggttttttccgaattttaaggtttctaaatttataggttgatcccaaagtttttaaaggtgttaggctattactaatacagtttcataagcgtattctacattttgattaaaaaaaaattttggtttaaaaacaaaagattatctataataactttgttttttctcaaaaatgttttaagaatataaagacttaaatttcaaatcaagaattaataatttgttgagatgtatgattcatagtaaaagaaataagaaaatagtaaatattttcataaagtaaaaaaacaatgttagcataaccatattcataatctaatcaaactatattttttaagaacatcccaagaaaaggtaaatgagcctacaatatatctccataaactataataactaaaattatgtatcatgtgttatataaaaaaatacgaacaaaagtttaggaaatatacaattaatgtaataaaagtatacatttttagataaatcttgaagtgacaaatgacttctactacaaccaagtataatagagaagttagctgaatttccagttacataaaattgagcaagcaattgactagatgatcaattttcataattactagtgttgcaaagaattttcactattgttaaccacctttaaactacttttcaactagttaatatattcatacctaactaatcattttcttaattgattagttaatcaattcattaattgagttattaatccacattaaaaaaagactaaacaacttatattagctattaatgatttacaagtcatcacatctttgatgtgaatgctaacaagtcttcctctactcgatgtgaaggtttgacaagtctaatatgaatcctaacaagttttcctctcttcaacaagtcttctttttttttttttcacaaacaatttagcaattcaatgtgaaggttaatttgacaagtctaatatgaatcctagcaagttttcctctcttcaacaagtctttttttttttttttcacaaacaattaagcaatttagaaccaaaagccttggaataaggacaagatgcctaccgtttcatggccctgaatcctttttgtcaggtgcctatgtaaaatgtctttaaattggaaaaacaaatagcacctcaaacttacaaagaattaagataaaaaaaacaaaaaaaacaaaaaaaacaaaaaatgatgagtatcatcgtgggttgttgtaagttttcctttttccttttttttttttttttttttttttttttttttttttgcctattcgagacaacttttccatagactttcgatcttcttcttcttctttttttttttttttttttttttgagttgccacctatgactttcctgtttgaaacaacttttcggtagactttcgatccaaccaaacccgtttttgtttgaacatgtgttttagttggtttattaaatgcttttatgagtgttttcgataattta

SEQ ID NO: 12852 - DNA, 11740 bp, Vitis vinifera
  Intron number 4 from transcript GSVIVT01026068001 (locus G SVIVG01026068001) derived from phytozome v7.0 (chr-ID chr1 8; pos 25007512 to 25019251 reverse strand)
aagtattggtgtctccctctacctcagcatcataggtgtagggagctttctgagcagctttcttatctatttcattgagaaagcaactggtggagatggccaagatagctggttcaatgataacctcaataaggcacatcttgattacttttattggctactttctgggctcaatgcagtaggattggctacgtatatgcattttgcaaaatcttatgtttataatagaaggggtgtaccaccatgactatgcaattcattttattactattgctctaattgttgtaacaatatccttttgaagatcttaagtgagaactttaatttattgcactttactaaaaaagaggcattatgttgtatatattttgttaatattttttgagtatatatttattatattacatgatttatgtcgtgcaaaagatatctttaatattatatattggtgtattaatgtaaaaataaaacaaattcatatgtaaggttgatgtttagttatggttccaataactgtacctacatttacttatgagagaaaatcaatatatagtaccataaaaagattataacaaaaaatggtaaaatagatataaccttaaactctaaattaaataatctcatatttatcttattttcatatttacaccctaaaagacgagctttcattttcttacatctctgtccatttttgtttagttttacatgcccatctccatctccatgttataattttttcaatctcatgacatagaatattttcaaagatactattaagaagttttccattattttagagggaaacctatttttataaagaagtataaatatttgaaatattatatataatatttttttttataatatatatgtttctagtttttgtttttttttacaaggaaaaatcatgaaatttttcacatgttctcattatttaaaattattgaacatgaatttgatttctatttctatttctatttctatattttatacattttaaaaatgacattttataactactatttgatacaagtgtagttctattcatttttttttatgatattttatcataagatattaataaacataaatttgatttatattttactttatttatttaatgtattaatgtatcataagatattaacccagttactgccattagtagcagcatttgtttcggattcttatctgggtcgatatcgcaccattatcgtctcttctcttgtctacatcctggtctgtcaatctccttgtttcattttactagtctccttactagttgaatcacgcaatgaaaacgggaccaagttcagttgttttcttcagtactgtttcataattacttcagcttaacaagtgttaaaaatattggatcatgccatatatgtacttcaagggcatctttggtcaatgttttccaaggtagttttctatttcccaaaacaaaaaattaagactatggtcacacttacatatccaaaaatgaaattaatttaataagatcatgccacatatatacttcaggggcatatttggtacatattttcaaaagtacttttttatttcccaaaactaaaaaaacaagaaaatatgtttgataataaaaaaaatagcaaaccgttttcctttcttaaaaacagacgaaatggtatggtttttagataacatcttttttacttgctttcttatacctattttaaaaataattatacaaatatcaagaatgattaaaaataaaacattacttataaatattacgttcaaaacatatttaaaaacataaaaaataaatttaaaatatttcaagttgtaaaataaaacatttgttttacaaaacaataaataacagcttaataaaataattatcagaaactattttttcataactatttttgaaaacattatcaaataagaccaaactcaattccattttattgtacattgaaggacttaatttatattattgacgtgtatccatttcatgccctaaaattttcctttacattttaaatggaattagtctagattgtcatacatgcctcaatcaagctaattgagttgacatctccaataatattttttgatttatcattgaaaataattattttatttttattaattattatttttatataatttttacttttatttttgaaaaaaaaaatcatcaaagaccactaccacacgtgcagattccttttccaatgaagaataatatgagaattaaaaatttgagtcccattaaaatactacctgtacaactcagtgagaacagatgggcatttgtttattctacattatcttttcttagctcaatacaggtgttcagtccctccactgattacttcaatatatatgggcattactttctttgattatgtaaaattcacctttgattttagatcctaagctttaactaaaaactattatgactaaaattaagtggttttaattttttttaatttaattttccgatcttttttttttaaattttttaattaatggaatgaatatttaaattaaataaatacatcagaaaattatattaaataaaagttccatgtgtaagccatcgacttaaagccacaaaagacatcttacttaaaataaaattattaaattatcacataaatttaaaatttattttgtaaacaacagaaaaaaaaaataaaagaataaaaaacctccaattccaaatgttaaaaaaagaaaaaacaaagagaaaaagagaaaaaaaaactaacaacttacaaattaataaatagttctaataaacgtattggtctaattaggactgccacattgtctctttcaaaccatgttatttaaacttaatcatgcccggccgtcatcttttttcaatttgaccaatatttctacctcaattgactttatagaaatgtctacttaaaagcattttttttctcctttactaactcacggaagtaaattttaatattaatatgtttgcttcttggatgaaaactggattcttggttaatgcaaatgttgatttaccttcacaaaaaattatttataggaacttcttgagtatgacttaatttagaaacattcaatgcaatcatatcgcttgagtaacacctttactagttattgttagtatataacccttaaatgatgtaatcgaataacttttcattaataaatttatttattataatattcttaattgcattaattgttatttgagctttcatatctatatcacttgtattgtataacttgagtgtattaggacttaaacaaaaaatttaagtcataaaccttacaagataataagttattcacaatcaattcgtggaactagacaattcatgaaagactgtggtgcactacttctaaattagatggatgacttgtcttagtcattaggatggtttcccattatgagtgcactagtgtgtacaattacatagtaaatatgatctacttttaagtcattacattaagctattgagttttcataattcaccaaactattatattgtataagctctcaaccttaagagaatattgagctaacaaccttcagtgactttgacctatggatgaaatcctaaggttgtcatatatatattccctatagaattcgtcactatttattaagctatgtaagtggcaaatgatattctcaagattgacattataatatcacatggatttgagacaatatgttcccttggatgatcttaaggacatttgcttaggaaatctatgaccatggtaattccttaaatggaatttgatatacacttttaaagagttgtatgtcagttgatcacataataagaggatttgagactcaagcattatagaggtaatcttgagaggttgatgtcattcacctcaatagattataacaaacatcagttcatgaggagattgcatacaatggatggtaagacatggatgcaagtttagtatctcattttaatatcataagacactaaagtgcagttgactctttatagtgagatattgagtcaatttcaaaattggattctaaaggagttactattttcctatgggtcccaatgatcctttctcgaccttatattccttaatgacacatttattaaggatatttggtttctttattcatgtgtacatgagggtgttctagtagttgtgcaagattacacaagagcttataaaagatctttttgaattagactaataaattaattagagtccaataggattaattagttaattaagacccaatgtactagattaagttatgcaagcctatagatgggcttaagttacttaaacccataagaaagtttatataaactctcttagggattaaggcttcatggttttgttgggcggtcttccaaagagagagaccctagtcttcatcgagtgctaggattctacctccttcaaaaaggattccacctcctccgttgtcaggatctaggaaaaagagtcattagatggaagatccattagttttcaagattcatgttatcttttttattgactggaattgatttgggaatatttaaatcacatgtgtagtctttaatctcaagatctaaagttctaaaatcccttttgcttctattgtatagatcttgcatgcaccctagagatctagtgcaaggaatgaagtaatctagatattcctacaattgcaatgtacttggcttctactattgataaaacaactatttattgttttgtttttttataactatgaaaacactaaattcataacctaaagtactttctacttctttaaatcacgtctctaataactatctatgtatccaataagctcaatttttattaggatgtgcataaaaagatattatcacattgcacacttttgatttatctattgtaagctatgcttattgcttgcaaacgagactaatgtagagagtccatgaatttgcttaaaagcccaactccaaacacaatatttggtcacatagaagttaaataatgcaaattcaaaattttgtaagatcaataaatttaccaaagttatgtttccctaatttcaatatttttctgttggagttacaaatacactcataatttctatgttgaattttagtggaatatcacttacatacttcttctgaaagataaaaatattatcatctacttgaattacttcaattctaagaaacgggatatcaattctacaattgtcatctcaaaatgactaatcactttcttaattttgcaataatcttcaaattattactagtaatcattatatcatccatagacgaacacaactagaattagtgttaccttgtaaatttgatttgacatataaattgtcttcataaggacatgcatctttgaaatcaattgttacgtaaacatttatcaatatgtgtgtaccatgctcttagagattgtttcaatctatacaagacattttttaacttatatttttatttatttatttatttacatacctagaaagccactcaacatgaacctcttctcgttattttccattcaagatagcttacttgacatcaatttagaatttttttaatgtttttctgcaacaagagaaataatcatggaaatagtgtcaagtttaggaacatgtgtaaatacttcaaatagtcaagatctagtgtagaccctccattttgtccctttagcacatgtctttaagttcacttctagtgttccatagtggttcattgatgacccattactacttgtgtagcttatctttttttagctacctcggagactttagttgaagggtttatctgactccacattatgacattagctgcccttcaagtttagattagtcttcacttaggtgcactttaggttagacttagttaggcccacttagtctcaccttaggcccgtataggtatacctggcccattaggcaccaccttagattatttagataccttaggtttgtctaggttcacttaggccctcttaggcacacttggcctattagacatttttttagcatttcttgcatgactcacatagtcgcatgacttgcatgacccgcataggattgactattttattttattttattattttgttttactttatttatttattttattctactttattcttttatatgttgcaagattgctaactctttttggttttttttttttcatttttatcatttgacaagagaattgggggttgttgatcaactctcactaaggcacgtgcactcaaagaaggtaagaaaaatatttttggagggaaaagatgattaatgtggctgcatacatatggaaagagaagaccctacataaaaaaagagaagcattctgattttcggaaaggaagggaaataaaagaaatgaaattggatttccttcaacggtttgaatttttgggaggttgatacaaatacataaaaaaaaaaattgaaaaaaagaagaaaaaaaaagaagaaaggaaatgggggattttcctttttggaacagatttaggttttgggggctgatacttatacgtgagaaaggatgttggaggggaggattctttgattgtcttggtggaaaagcacacaagagtgggaaatgggtgattgcagccaaggttcttccaggtacgtttctggttattcttggtgttcttactcacattcgattcctccatttgattatttcagaatgttcgtttcttttctgctgtttggtgtagacgttaagggccacaaattgttctattgagattggtcgtttatttgtttgtcttattttgattttaattcttttatgtgtcattgatgtcttctgaaattgatgactccatgcctgaatatgatcatgctctattctgcattattccctctattcttagcccagggattaatatttgaagttgagctatttatgtttattgatcaacatctttcgctttcttcttctccgaattttacttcatttttattcattctctatcccttttcctgcacgatttttggatccttattatcatatttgggcatacatcggggaatgatggaagtgttgatacgagggatgaagtgtacaacaacctcactcaagtattacatagttgattctgaagtattgtagtgaactagggaaactagagctggtgaaaggaatgccaaatttcctattgttttaaggccatgtactcatcccaagtttgattttgatgacaaccaccaagagcatctaaggcttaatagtttggttggaattgaggtctttcttggcattaaaggtcgagaagacaaccagcagattgagggtttttctcggggaagaaatgagatggagtttagtccaagtgttgtagaattttgctctagatccaggtggaatagtgtttagtctgaggtcgcatcttcagaatctgttgaaatgctattaaaattcgttgggtaagaagaaattgttccaggttaaactactatcaaggactcaggtgtctatgatgagttgggttagggcatgtcattgaaatcaacaatagaggttcagaaaattgtgccatattagagaagaagatggactctcatgtgcgtctaacttatggaaagagcaatttcgtgaagaaaaatgatgatttgttggaaaatgggagccaatcgaataatgagatttcaaccaatcacttgaacacttctctattatctaaggaaaccagtaaactttcgaaaggtaattatggtggaagtggaagccatcacgagggagatgtttctagtaagctcgtggtatcttcttcaacttaattgcgtggggaatcacatactgctgaaaatgtagaatgcgcaattggaaactgaaaaggatgatggtcttaacaattgtgctctttcttggagatatgttgttcgtaggcttatccgtggggtcttattctcaagagagtgtgtgagggtcaggaaggaaaaagggccacgaggattgacaagcatacacatgtagtctcaagtgcacctccagatctcactcacatagtggcaaccttgccacatgtcatactctttctaatgttttttcttcttctttttgtgatcttacacatcttaaatctagatttcaaaacccttttatgttaaaaataactctagttttctttaaaattccttaggaatttctaggcataaaatccagattctaacatactatttgctgccattttcttttcggcaagtgttttcactattttctttgattttcaactgattttcttgatttttcacaagcatgaacaaaattcatgattccaaataatggaattcattgaaccaattcatgcaaaattaatcaaggctttggagagggcccgaaattcatgatattttcctcaatattgattgtttgatattttattgatcgtgcttcctctttgtggatacataagattgttttacacttgttattgagctaaccttatttctcattttagcactcagcttgctgtccaggtatactctccatatcccccttttcgaaatctcacaaattttccatgtctttatgtactatgcccttgcttgatatcatgcttgattgccttgatatatatttaattgtttgatcatctttgataaaaatacatgtcgtgtgtcatatttccaaactaatctttgatgtttttttatagcgtttgagaagaggtccgggtacgcatcctaactctcctttattatgatttgatcttgtttggcatgctatgtttttagaatcatcttagtcaaccaatgtatccttaatttatcaattgattgtcatatttccctcaatttagtttataaagacctttatagggcttagaggggtgctacctcctaaaagtaccttcccaataagtaacctggtcctcggattcagactcgggtttttcaaggacacgctctttccaaaaattatggagttacttttttagggttttatttcttgttttattttccctttaaaataaaataaaataagtggcgactccgactttttcaaaaattaatttttcacaaataaaagcaagtctcgctgattgagtgaggacggacgtgaaaaatgcgggtccacacctagtttttatttgtaatccttggccatcaatcttactttgaagtggttaatttctacatttggaatgtagttgatttcgtacacctatttgatactaattggcttcttagaagtacgaagatcaataagctcccatttattatttttctcaatgacatgaatttcattatccatatctttaagccaatagacatcatgagttcacaaataaaacaaaattcattattgatttgcctcttgggtaattgtcattactaagcccataatattgcaagcatgtaggtaaaatatgtggatttgatggctgccttgatgattttgtggggcactaattcataattggttcattagttggttgcacactttatttttcactttgcttttcaagattaattataacatttattggttttttttttattacaagaccaatattgggtttcctatgacttgaagtttcttgttgggtttttctataaacacttttaatagggcacctgctcaataaataaactacaaaagaaattacttccttctaaattttttggcaattgttttaagtgtagcatatatctctccatatccacaattgttttagttgttctatatacaattttgttttgatgtatagagtaccatgcaatcaattggttcttaatacatcatttttttgcttcaaaaagtcataaaaaatattatatttagtacccctatatgttttcaaaatttaaatacaacgtccattttctttttccatataagattcaaaacttcaaaattttatcatgcatttgattttttttctttaaaaagaaatcccaactcttcttacttaaatcattaataaaagttataaaatactagtgacttcaatttaaggaaaccttctttgaacatagatctaaatgaatcaactcaagagtcttccaagctctttatgattttcctctaggaaaatgatttctatccttcttaggcacaagtgattttagacttcaaaaatttaagtacccaaaacgtaagtgccataaccaaatcttattgtctgttataaaactaaaggaaaataaatttctataattaatttttaatagaaaaaataatttgacatttttacctttactattagtctttgctaatcatcattaatggtacaaaagcttttataagtccacatatcatatccatttccaaaagttgcctcatacttaatcgatttttgtgaagagttagaacatataatatattaggcataaaatttcgtagtttttccttgaatttaacaaaaatcttacctttactcttaattggaacccttgtattctaaaattttatctttgaattaaagtctcatatgactcaaaaaaccatatctttcctatcatacatatcttctagctatgttatgacttgtaataatgatataagatttattatttccttaagttaaagtattatatctagtctagaatttcctcatcctttgttttgtaaacttggacatttcttacttgattcagaattattttaggactcatattttttctcttttaagatttagttggttttgcaatgcttctttcatattaatttaggtgttgggaatcacacattactatgttccttggccttagatctcataagatgaatgcaactattctcataagatgcatgttttaaataaaataaataaattaaaaacacttcttaaaatcagtactaaacacatttttagtaagcaacacaatcaaatcacattctagattcaatgcttattctactattctactaattattctttgggagcacgatcaaccaattgggtacttttgtacattaaaagttcaataaaagagacaaatccccatatcaaatgaaaattgtaaatgatcaaagtgggaaaatttttaaacaaaagtattagatgttaaaaaaatatttaaacaaaagaagtcgtgaacataggtttagttaatcccttggtagtaaaaatttcaaataactttttgttttaattactaaaaagaattttagaaaaattactgaataattttctttatattttttgaacttataaggtgttacaaaatttttattaaacaatcaataattattgttaaaaatttgtataattatttctccactgtgactaaataaaaatggcctaaaaagaatttagataaactttatttaagcatgctatttactacttgcttttccggtcaatgaaatatttctattgtttcaaatcattaataattgaagtttgtcttgataaagtggttgtgactatatattttttccatagtagttggaataaaataaaataatcaaaatcattgcatgacaaaacccattaagagaatctttttatttttatttacttttttattttttatttaaaaaaatatatatatattatatttgaatagaaaactagcctttggcatagtgatgttgactcagcttctaaaatacaagacaaacaagtcagtcgcaacgctacactggagctagaggcaaaataagaaggggaaacgctcctatccaactgtgcatttgcctcaacacatggccattaatggcatgcttgaaggccctcaatctccactcctggaagataccgtcgtggagccgtcgaccacagaggccttccggccaagcgatcc

SEQ ID NO: 12853 - DNA, 12412 bp, Vitis vinifera
  Intron number 7 from transcript GSVIVT01015197001 (locus G SVIVG01015197001) derived from phytozome v7.0 (chr-ID chr1 1; pos 1742107 to 1754518)
ctaatattcaggtaaaagaaatttgcttttagtgtcttctacatatgcttaatgaaatgatggcaaccttttgtcttggatttatttatttttgataagtaaagacacagagaaaaaaatatattagaaaaagggcaccttaaggctgacccaaaagcatacagggggtatacaagaggcgccagaaggcatgaacaaaagaagaggagatacagaaatcaccagccctcatctagaacccaaccaataaaaaaaactgaataaaggaagaggaccttcatttacaaccgacttagtccaaaaccaaagattacatacaaaagaatttttcaacctatgaatcgaaagttcctcgttttcaaatgcaatcctatttctttcctccaaaccgcccaaaaaaagacacaaaggggttgccttccacacctttctacacttcttgcccatattagaaccacgccaaccaagaagggtatctctaaccaaaagaggaagaacccaaataactccaaaaagagcaaacaataactcccataaaactcttgccttagtgcaatgaataagaatatgatcgatagactctttttccacacaacaaaggaaacatctattagctaaaatctactccctctttttaagttgatccaaagttaacaccttaccccaagaggcttcccaagcaaaaaaacccactttggtaggaacacagggactccaaataatgctattaggaaactaaacaatacttcttgaaactagagcactataaagagaattaactgagaaaatcccatccttagtctctttccacaacactctatcttccaaaagaggattatgcctcctttcccggattgttgaaaataatctctccacctcctccacctcccaatcattgaagggcctagaggacctagggctccaaaccccttcctctcccgaagagtcccgcaactccactagccaagcctctttataagacgcaaatgcatacaaagagggaaaagaattacaaagagcgaagttcccacaccaattatctttccaaaatttcacctttctaccatcccccacagaaaatacaactttgttttgcagaagagacccttccttccttatttccttccataagcctactccaaaaccgtccctaacttctctagtataccaacccctttcttcctccgcaaacttcctactaatgacattcctccaaagagtttccctttcattcacaaaacgccagttccacttacataaaagggccctattgagagtagaaagtcgtctaactcccaaactacccttccttttgtccaaacatacagtatcccactttactagatgaggcttcctctccaaagcaccccctccccacaaaaaatccctttgaatcttttccaatcttgaactaaccactcttggaatccgcaataaggacatcaaatagatagacatactagacagtgtgctttgaataaggtgattctccctcctttagagataaattgtcttttccacatggtaagccttttccgaaatctctcttccaccccatcccaaacagccacggacttatgatgcgcacccaaaggaagccccaagtaagaagttggcagctttcccactttacaaccaacctcaagagctaaaacctccagattctctactctccccaccgacaaaatttcactcttatccaaattgattctcaaacctgagatgacttcaaaccacatcaacaaccagcttaagtaagtcatctgatcttgggaagcttcacaaaagactaaagtatcatcagtgaacaacaaatgagagaccaaaaccccatcaccacttcttccctttatcttgcagcttgaaagataccccccctcactgctctaaatatgagtctactaagagcctccattcggatcacaaataagtagggagaaaatggatccccttcactcaacccccttgaactgttgaagaatcccgatggggtgccattgatcaaaacagaaaacgttgttgtggaaatacaccaggaaatccaaccagtccacttctccccaaaacccattctttgcatcacaaacaacaaaaaattatagtttaagtgatcatatgccttctctatatccaacttgcacaacaccccactctcattctgattcaacaaagagtctattgcctcattgacaattaaggcagcatcaagaatttgtcttccttcaacgaaagcgttttgagctgaagacaccacctttcctactaccttcttaagtctattagctagtacttttgccaacagtttatacaaacctcccaccaaactaatcggtctgaaatctctaaggtcctccacgcctggattttttggaattagaacctggaaagtggaattcaaactccttacaaatctaccatgctcatggaactctttcaaaaaacccataacctcttatttcacaaaatcccagcaaaactaccaaaaactaagagagaatccatctggactaggagccttatccctgtttagatctgagagagcgaaaaaaacctctttctctgtaaatatctcctccaatctagctgcttcctcaacgtcaattctatcaaattccaaaccttctaaagatggatgtcaatcaccaagatctgtcagaaggttcttgaaagcactaaccacaccccccttaatatcctactcttctgttaaccagattccatttattttaatcttagacaaacaatttctccttctatgggaattggccatcctatgaaagaagtccgtatttctgtcaccatccctcaaccacacttctcttgatttttgtctccaagaaatctcctccataagagcccatttcttataatccccttttgctttctttctagcttccagctcctccagagataaagaacgcaacttcttctgatcatcccagaaagccactttgtccaaggccaatctcttattcacctctatcttcccaaaaacatccttgttccaaaattttaaaatagccttcagagcctttaatttctctgcaaatatgaagctaaaggatccactaaaacttaaaccttgccaccacccttttagcagatccttaaaaccctcctccttcagccacatgttttcgaaccgaaaaggggttggccccctcccccatccaacaggatgggaaagtgattagacactggcctaggaagagtacattgcaccagcccattgaaatggccctcctagtcctttgacaccaaaaaccgatccatcttgacatggcttggctattcaacccaccactccaagtaaacgggccccccctaaagaggaagatccctcaaatccagatcattgatcacctccgagaatcttctcattgaaggagacaccctccctcctcttttacactcatctggaaatctgatcatattgaagtctcctccaatgcaccaagggtcatttcaaagcctgcgaatggcccctaactcttctaaaaaaaattccctatatcttttcatagtaggaccatacactcctgaaaaaatccatacgaaaccatctttacaatttttgaatcaacaggaaatggagaaaagacccacatccatccttaccaactccaacactttgttatcccagaaaactaccacccttcccgctgcaccccaagcattcaaggctccccactctaaaaatctccccactcctagactacgcaccacccctaaagacatctctgtcattttagtctcttgcagacataccaaatccactttttgggaacttattaaagctttaattattttcctcttatttttgtcatttacccctcgaacattccaagataagatcttaatcttcatttaaaacacagagctctatcccctcctcttttgtccgtaccattcttcttgctcactccgtcataattaattgaacattctaacttttttacttctcgatcaaacctagtcgtccctaaagttccccgcttcttaccttggtctcttatgtttttcaatcttagaagcaattttaggatttccccttcaacaccttctgtcgtaaaccccaaagatttgctaaaatttgccagactactatcatcccaactactgccaaaaccctccctttcttgcattgcctcaacaaactcgggctcaacaacttcctccttactctaatctcaaccaaagacttttccctctctgtttccatcacctacgaacttccatccgtcaacacatcacacaacggtgcctgaaacccaacttcttcaacgatgtccacccctcccgagccagaaaaatctcccaccaccaaagcccgatcaaacccagaggaaggagaagaagagaagatgtctcgattccccccaaagatagtgggaaaggattcgtacctggacgcctcgactaccaacgcttcatcagtgatctccgctctagcgttcgccgtaagagcctccgattccttcatagccccttcgagaaagcaagcgagcccgttatcctctctaacctgagcgcgcgaatcctcctctgaagccctaacttccatctccaccaccgccgaagaggaaagagccctatctccttttaagccccctactccaggcccaaagcccatttcggacaaccccacgcagcccactaaagaagccttcaggaagaagggcctctcttcacaacccaacacccatccttttaacaggatgggccttggctcgctatccatcccttgcagtggggcctccacattagcagtctcgtgacaaccgtcccctagcccacttctattctaggcctcccaaagagcagtcccaattttaagttcttcaggcctagaaccatggccacccactttggctacacctcctgcaccttgacccctattctttaggcttttttctccatcaatccccttaggaccatacccctttgcagagtagtcagaggaaaagcttgtagcactttttgaagaacttccacagggcggcacaacttgtactccagtctgcaccttggactgaacctccttctccaacactgcacgcgacacgaggtcttcctcctgctttttcttcaaccactggaaccccctccctaagaatccttcccgtcggcacctcctgagaaaaccaaggcggggattcccaccacagatggactgagaaacatctcgacccaaccacaatctgaacagaggtaggtaagtccctaccaaccaccttcaccaaaattctagcccattgcaactctgccatagaatccgtgttttcgtccactgctatgaaaccaccacaaccatcacctatcaatttaaacaccttgcggctccaaaaatgaagaagaagacccaccactctcacccaagcctcattagatttggttccattacaaaagcaccccacctccgggtaccatttttccataaataagacattctctttcacccttctcttccctctggcaagaacacgctcgacctcacttaacaactcaaactcaaaaggcaagagtcctcttcccaacacaattatgttcaacctccctttgaggagccaagcttgaacaacctaatttttcagaaaatccaactcggggaaaggggtcgaaacattttcccatctacccactaaacagcgatcttgctctagtcttccatgcatctccctccttcccaactccagccataccttatctcctaacctatccgttttcgattttgcaacatctgcataggtccttggtattagctcattttccttcataagcacctcaatggaaaaaggatcctttaaacctccagtgggaactaccccaacctctctcaacttctttgccaaaatattccaaccaccaaacaaccctttcccttctggaaaaattaggcaaaaacattttgcctctagatcacgaacagagcaaaggagaaatcttcccgcctcatttgaacgacgctccaaactatacttccttctctcctcctcccagacgagggaccaacttctatcaacactacctctacagcaagtctcaactccagccaacaaacaactaaggcttgcatccccaaatctgatccaagaggttagtcctctgcatctctcccaaatgcaccctctcaactttcctcctacatcatcaatcaataactcaaaagatttagactccacaacaaaccatcttcttccaccccttggatttattgagttgcttacaagttgatataattgttaccactccccaaccccctctctattctgtttctttctatctcattcttatgaatgcacaaatttcttattgaagtccctttttcacttcaagtttaaactactcaaagatttttagataatgttttggttccatacgttttctacatggctatttgataccattcgttgaactaagagcaactgaagatgtcattttagtgcacttattccaagcaaataagaaaggaaaaggaaagagaaggtgggttttgtcattgacatggttgtcaatattctgaaaaccttaatcttatgtgtttcttctgttggttttgtgttctcaaaattcacattgtaaggtttgtgattagctcaatcaattttgaggtgagttaatatttaatttacatatattgccgatcaaaaaacatttatttatgtatattgtaaatattttctttttattttttattttcgggaaaaatatgtttgagatgtttctttttttccaatatgtatatagactctgtttccatatttccatgcctagtgacgtgttgaatataatgtatgtatagtatactatctttccttgttaatataggtcacatgtatggtagttaggactcctagccttgtatatatatatctctcaattgtaagtagagattacaatgaatgtgaataaggtttttctcctttctctctctctctctcaacatggtatcagagccaaggaagaaaacctaattctttcctgttttccgtgtcatcaactccgggaaaccttccggtgaccgtgtttctttccggtcaccttccccatctcccaatactttccggtcagtcggatcgtcgttagaaaccactcaccgctggcaaattttccggcgaactttccggcgaaatttcccggcgacctatttttcaaacaccgaccataccagaaggagcgcctggaggagatctccaacttttgtgaaggcaccagcaccaaaagagcagccacacgccggccacgcgcaattttccgtccggcggttgaatctcacgcgccggcgcgtgggggctcgtgagagcttttccggcgacgcgcctcctcctccagcttcgcctgacgccgatcagccttcccacctccctggttctcccatccgagccctacacgtacctcttttagggatttttgtctccgtcggccctccaaacagtctttccggcgaagctccgaccactttttctccactccaatccctgcacgtgccttgggaagtgttcttctccctttctggtggtaccacaccgcgatctgaggccgtctccctttttcggtggtgccacgctgcaatctgaagccgtattagggctctcttcgatccaaacatacttcattctccagataagtggatatggctactaaagcttccattttttcctctgtcatatctggatctcctatgattacttcggagaaattagttgggagtgaaaattatctttcctggtctgcctctgttgaactttggtttatgggtcaaggatatgaggatcacttgattacacaggaggcagatatccctgaggtcgaccgcgtacagtggaggaagatagatgcatagttgtgtagtgtattatggcaatcggttgatccccgaattcttcttcatcttcaggcctataaaacttgttttaaattttagactcaggccaaaggattatacacgaatgatatccagcgtctttataaggtggcttctgctattgtccatctcagccaacaggacttggatctatctacttatattggccagattgcctctcttaaggagcagttcttgactgtgatgcctcttactcctgatgttggggctcaacaaacacagcttgacaagttcttcatggtccttactcttatcggcctccatccggatcttgagcctattcgtgatcagattcttagtagttcatcagttccgtccttggatgatgtgtttgctcgcctcctccgtatctcgtccactcagactttgccatctgatagcgcttcagattcttctgtgttagtttctcaaactacctctcgaggaggacgcagtggtacccgaggtagaggccaacgtcctcattgcacctattgcaataaacttggccacactcgcgatcgttgctatcagttacatggaagacctcctcgcactgcccatatggcccagtcctctgattctccgctgcctcagcctccgagctcctccgcatctcagacatctcaggcttctattgcctctgttgcccagcctggtaatgcctctacctgccttacccacacatcttctcttggaccctggattctagattctggagcatctgatcacctatctggtaataaggatcttttctcctctattactactacctctgatttacctactgttaccttagctaatggttctcaaactgtggctaaaggtattggtttggcccttcctttgccttctctacctctcacttctgtcctttatactcctgaatgtccttttaatcttatttccatcagcaaaatcactcatactcttaattgctctattaccttttctgataaatttgtgaccttgcaggaccggagtacggggaagacgattggcataggacgtgagtctcaaggcctctatcacctcacctcagattcatctcctgcagtttgcatttccactgatgctcctctcctcattcacaatcgtctgggccaccctagtctctccaagttccagaagatggttcctcgtttttccactttgtcgtcgcttccgtgtgagtcatgtcagcttgggaaacatactcgtgtctcgtttccaaagcgtttgaataatcgggcaaagtctccttttgagcttgtccacactgatgtttggggtccttgtcggactgcgtctactttaggatttcagtattttgtcactttcattgatgactattctcgatgtacttggttattcttaatgaaaaatcgagctgagttattctctattttccagaaattttatactgaaatccaaacccagttcaatatttctattcgtgtgttacgcagtgacaatgccagggaatatttttcagcccaatttacttcgtttatgtctcatcatgggattcttcatcagtcttcttgtgctcatactcctcaacaaaatggggtagctgaacgcaagaatcgacatcttgttgagacagctcgtactctcctcctccataatcatgttcattttcgtttttggggggacgttgttcttaccgcttgttatttgattaatcgtatgccctcctctgtcttacacgatcagattcctcactccttcttttccctgaccaaccactttatttccttcctcctcgtgtctttggttgtacttgctttgttcatattctcactcctggacaggacaagctttccgccaaagccatgaagtgcctcttcttgggatattccagacttcagaagggttatcgttgttattcccttgagactcatcggtactttatctccgctgatgtcaccttctttgaggactcaccattcttttccaccacttctgagtctcttcctgtttctgaagtcttgcccattcccattgtctccccacctgatgctatgccccctcgaccacttcaggtttatcatcgtcgccctcgtgtcgttgctcctctcccttttcttgaggcacctgctgactcacttcctatcccttcggcttcacctgccccggctctgccttctcctaatgacttacccattgctgttcggaaaggtacgagtagaagctctttcccatccaggctggcgacaggcaatggtggatgaaatggctgctctgcactctaatggcacttgggatcttgttgttttaccctctggtaaatctacagttggttgtcgttgggtctatgcagttaaggttggtcctgatggtcaggttgatcgccttaaggcccgcttagttgctaaaggctatactcaagtttatggttctgattatggtgacacattctcccctgttgccaagattgcttctgtccgcttgcttctgtccatggctgctatgtgttcttggcctctttatcagttggatattaaaaatgccttccttcatggtgatcttgctgaggaagtttatatggagcaacctcctggttttgttgctcagggggagtctggtttagtgtgcaggttacgccgctctctatatggcttgaaacaatctcctcgagcatggtttagccgttttagttctgttgttcaagagtttggcatgcttcgcagtacagcagaccattcagttttttatcatcataactccttggggcagtgtatttatctggttgtttatgtggacgacatcgtcattacaggcagtgatcaggatggtattcagaaactaaagcaacatctttttacccactttcagaccaaagacttggggaaactcaagtatttcttgggaattgagatagctcaatccagttctggtgtggtcctttcccaaaggaagtatgctttagacatcctggaagaaaccggtatgttagactgtaaaccggtagacacacctatggatccgaatgtcaaacttgtaccaggacagggggagcctttaggagaccccgggagatatcgacggctcgtaggtaaattgaactatctcaccattactcgtccagacatttcttttcctgtgagtgttgttagtcaattcctacagtcaccatgtgatagccattgggatgccgtaatccgtattcttcgatatatcaaaagtacaccaggccaaggtgtattgtacgagaacagaggtcatactcaagttgttggttacacagatgcagattgggctggctcacccacagatagacgttccacgtcagggtactgtgtttttattggaggtaatctaatatcttggaagagtaagaaacaagatgtagtggccagatctagcgctgaagccgagtatcgagctatggctttggcaacatgtgaactcatatggttgagacatcttcttcaagagttgagattcggaaaggatgaacagatgaaactcatctgtgataaccaggccgcattacatattgcatccaatccagtctttcatgaaaggaccaagcatattgaagttgactgtcatttcattagagagaagatcgcatcaggatgtgttgctacaagttttgtcaattcaaatgatcaactagcagacatcttcactaaatctctcagaggtcctaggattaaatatatttgtaacaagcttggtgcatatgacgtatatgctccagcttgagggggagtgttgaatataatgtatgtatagtatactatctttccttgttaatataggtcacatgtatggtagttaggactcctagccttgtatatatatatctctcaattgtaagtagagattacaatgaatgtgaataaggtttttctcctttctctctctctctctcaacatgacgtaatgaggaattggaatgaggtatcaggaaaaatttgaagataaatcctaaatcgaacttgaaagttagaaagtgaatgcatggtaataaaataagcaaagagtttccaatccatagtcatttcaaatacttggggaatttttgaaaaaatcaggaactattcaccttgttcagggtgtttggtagttgttaaaatgtttggaaataaatttatgttttatttctatgataaagaagttggaatatattggtggtttttggaaaattcaagaacctagtcaaaatgcttctgtatacatggattttatgtgaacatatcgctgcatcagttttggtcactggatgcagaacaatatgtgggtacagggttgacctctttttttcatatgttcattgtgcaagtgcaacaatgaatatttagtaattaatttaggatgctatgacatcagttttcatcaatttcatagagaatccttaaaccatttttattttttattttttcggtaaacaataagcacagaggagctttaacttttctatgttggtttgcagaatctcttttccctcctctttttgtagattttcttttagtcttctgttggtgaatgcttattttgataatctattctttttttgcaggctgttcctattccactatctagggcttctgctgt

SEQ ID NO: 12854 - DNA, 6648 bp, Vitis vinifera
  Intron number 3 from transcript GSVIVT01035793001 (locus G SVIVG01035793001) derived from phytozome v7.0 (chr-ID chr4 ; pos 4396531 to 4403178)
catccaggtaccccgttcttcactctcgtcctctcttttctttgggcttacggggtctctcttgctctactcctttcttgttgccctcaagaggaagagggagagccgtcagaagggtggtcctccagttgcctggctaagtttagccggtgcttaggcatgctgacagaggattttgaagagaagattctgtaccttcttgggaggatgaaagcgagaattgaccaaagaggtcaggaaggggctaaaagaagggcgaattccttgtcttcaaggttcggaagggaactcaagaagcttgaatggggcagtgacatataagggttgaggagcgggttgggcaaatatggtggggcctctgtttcgggatgcggatgaagataagaatcctgtcatggaatgtgagaggggcgaatgatagtggcaaaaggaagattgttgaatccttggtctagtcgcaaaggatggatgtggtttgtttcctggaaaccaaaattcatgagatgtctggtgggcttgtacgtggccttgggtgggcagatgtttagagtggagtgccctcaattgaggggtgcagcaggaggtattctggtgttctgggataacagggtgcttgaattagttggattggaagcggggatgtacttgatttcgtgccattttaagaattgcgaggatagtggtttctggatttttattgagggtgtatggcctggtgtgcagaggaacagggagagtttctgggatgagcttggggtaattaggggttgatggagtgatccttggtgaatccaggtgatttcaagcgtagtaggggaggaggcctttacccagccatgaggagattttcaaaggtcaaagaggagttggagttgagagacatccctttgctaggggtccttcacctggagtggtgggttgaataatcagtcctagtctagatttgattggttgttggtgtcaaaagattgggataaccttttcaacgggaccttgcagtgtgttttacccagaccagtatctgatcattttcccaatctgttagatgagggaggcctgaggaggggacgttcatatttgagaatatgtggttggagtaggagggtttcaaagaattgctgaaaaattggtgggtgggtcttaattttaatgggtcccatagttttgttttgactgccaaactgagagctctaaaagcagtcttgaaatcctggaataaagatgtttttggcattattgaagctagaaagggagcgatgctcaatcaagtggcgttttgggacaaaaggagagggttacaacactgtccatggaagaggttgaagctagaaatgaggcaaggaaggattataaaaagtgggttcttagggaggaaattgcgtggaggtagaaatcaagggaagtgtggttgaaggagggtgacattaacaccagtttttttccataagatgacaaatgcccacaaaaggagaaactggatggccaaggtttaaagtgaatggtagttggcttaatgaggagaatgaaataaaagatggtgcggttggggcttttcggaacctcttgaccgaggtagaagagtggagacccattataggtggtttgtctttttagtgtctagaagactaaggctgcaaggctagagcatccattggttttcactgctcttttagatctaggcaaggagaaagtgccaggtccagatgggtatactacgacattttggctttttagttgggagtttgtgaaggaagaggtgatgatgggattttttagcgagttctatgaggaaggcagatttgttaagttcttgaatgccacttttctggttctaattctgaagaaaggtggtgttgaagacttgagagattttaggccaattagcctattgggcagcctctattagctgtggggctaggttttagtcaataaacttaagaaggtaatggacaaagtgatcactgaatcccaaaatgcatttgttaaggggagacaaattttggatgcatttttgattgctaatgaggttgtagacttaagattgtaaaacaatgaatgtggtgttctttgtaagcttgagaaggtgtatgataatgtaaactagaatttcttgctttcagtgttaagaaagatgggatttgggaagaaatggattaaatagatagaatagtgtatctcaaaagcagagttctctgttcttgtcaatggattcctaatcggtttttttcaaagctctaggggcttgagataaggggaccctttctctccctatttatttgtgattgctatagaagtttttagctgtctcttgaagaggtcgtagagtggtggctatttgggtgatgggtgaggggtaggggaggggatgagattcagatctctcatttattatttattgatgatactcttgtgttttgtgaggcatcacaggatcaaatgacttatttgagttgactatttatgtggttcaaggccaattatagattgagaattaacttggaaaaaagtgagttaattcgtgtggggtgggtttgcaacatagatgaattggtcatggagttaggttgtaaggtgggcagtgtggtcttgcatttttcattaccgggatgttaacttatatgggtcaagggcaaaatgaggggtctacaatggtctttcctctttttacttaggtcttcctttggaggctttctcactctaattcgaagtactctttctagtatgcccatctattttatttctctcttttgcatgtcaaagcagattagactaaggttggagaaaatttagagggattttctttaaggtggtggggctcctgtgcagaaacttcattaagatggaaaatggtatgttcaaagagaaagaaagggggcttgggtgtgagatgtctattaacaatgaacaaagcccttacttatcaaaaaaaaaaaacaatgaacaaagccctactttgcaagtggagctgacgttttgccaatgaaagagaggcactttggaagcaagttattagttagaagtatggtgaagatgaaggggggtggcaatcttgtgaggtgagagataggtatggtgttggcctttggaaagccataagaaagtagtgagatcttttaagtagtagattgtttctcttagtggaaaataatcagagagtgagattttggaaggacaagtgatgtggagatgagccactttgtgtttccttcctttccttatctgcttagccatatctaatgaagcttgggtggcaaatgcttggaacttggaaggtaaaaggggtgaatggactccttggttctctaggccctttaatgattgagataatgattgagaagtggaaagtgtggagcgctttctgatgaagctccaagcaaacagggtgtatagggatgtggaaggtagggtgatttggacggttttgagaatccagaacttttcggttaaatctctccattttgttttggagcccggtgactgtctattgttcccgagaagtatcatttggagatcttgtgtgctacctaagatggcttttttcgcgtgggaggcaacatgagggaaaactttaactttggatcaggtccaaagaaggggattttctttagcaaacaaatgttttctttgccactttgaagaaaaaactattgatcacattttttttcactgtgcaaagatgtggattcaaaggtaactacttttttctttctttggggtgacttaggttattttctatttggttaaggagacactccttgggtggcatggttcctttatgggtaaaatccgcaaaaagtcttagaaggtagcccctttatgtatcttttggacggtgtggaaagaaaggaatctactagcatttgataatgcggagttcttggtccaaaggatgaaaaattcttttgtttgtaatttgtggtcttggtctagggtgtctatacatatgagctctatttctcttgttaactttattgattgactaggttttgagtgaggataggtaatgttttttgtttttctccctatttcacttgggtgagcctttgggtggccggcatatacttcctttatactttaggatgctgtcttggtgtttccctttttttttttttttttacatatatatatactttctaatcttacctatatataaaaaaatttatagttttgataggttttctttatcgggggttttcaaaataatcttattgttagtagttaaaaagtccaccatttcttttttgtaggcaaatgagaattagtattagtagtgcctaagaggagacatgccaaactacacacgatgtataaagtagacgcctaatttaagtgagacgaggtcaacaaaaaggcaccctttccttacttgaagcttagctaatctataagatttatcagacattgattggttctctatgtatgcactaactcaattcacagaagtatacatgaaatcagatttgattgcttggtcaaattactcaatatcattaaataaccttctattccttaacttgccaagagtctaaaacaagtacaatggagcagctctcctagtttttttttttctgcttcttgcctgcaaaagactcgtgccaccccaaaaggttctctttcacataagagtgcattacccaaacctctccaaagagagaatatcaattgccccaacattctagctttggaacagtgaagtagcagatggtccattgtttcctcttcacctttgtacaaaaaacacctatttgacaaattccatcccctcctttgggctgatcaagtgttagaattctgccctaagttgcttccctagtaaagaaacctaccttcataggtgcccacgtactccacactacaccctttgggaaaggcttccaatctcccattgttaaacatgcatatagagacctaaccgagaaattgccatgcttggtttcattcctactcaatttgtcttcctcttcccttctaattggcaaggaatggagtttccgtcataagaaattctcaacttccacgagttcccaatcattgaatttcccagaaaaattgggtttccaaccccttccccaccttgctccctcacatccgctacccaatcatttttgtccaaagctatagagaataaagttaggaaggctcattccaagggtaaatcatcacaccaaatatcatttcaaaattttacccttttcccattcccaactttggaatgatacctgcttttaacaacctcccacccttttctaatagctttcctttgtgatttgaatctataaggactttctttttattgcaaatctccaactccacttaccaagcaaatccttgtttaaaatggattaaagagctcacctgtgtttgatttaaaattgtttagtttgatgatatctcattgtgtgcccttctcatgtgggacaaatggacaatttctaaagcactttaagcattatcttctctgaaaataacatccatcttggttttctgaaaacaagaaaacacaattgttatggaagtctccaattttctttggctaacccgggtcaccttggcaatattggttcccttcagaattttactatgctaataaagaagaatcatgagcatttttcttgagtcaatgggaagctttcaagcttatagtttgtattttttattgtggaaggtgatatttccaacatcatctagtggagtaaagattgtggtgtaaaagcttgtagactctctgtccttttgaataagctgtaggtattcctgattagttggatgtttcttatctatgggttcctgagttgcttattgtgaagttaattttaatgctgacagtggagctgtgactttttactatgtgggaccttgatgttaccctagtttattgttctaatagttttcattgttttattctattttttcttctttttattggcctcatctctttgaggatttttttttccttctttaatcttcttctattagaccttgtctttgtatttttatcttcctgttaataagtttagttgcccaattcaacaattggctgctatgtttataggcattttaactttgtttgatatgccccactttttactctcagaatctgggatggataatctctgcaagatattaagcactttagttcactttctaaaaaaatggttgattttggtattttaaattcattaactttcagtagctgcttatatgttgtgtgattgctcaaaaaatcttaccccttctaaatagtcctcagcatctagttgtacataaaatatttctttaaagttcaaattgcataatttgtttccattaatatttatccactgtaatatattattattattattatgtcattatttacctactagagatgcacttttttaattatttttattttttaaataaaataaaaaatgaaatattccatctatatttgttttggtttttttcttgcaataccagttccccaatgccatgacaggcacaaccgtaaagtaagatacttttaggaaacaattatgaattagtaatggatgaaatttcacatttgtgcttgtagatggtgcaattctctctcttataaaatttgaaatttgatgtttgcattttatttcagagtttacatttacggaagtcagctccgttcaagcg

SEQ ID NO: 12855 - DNA, 8143 bp, Vitis vinifera
  Intron number 1 from transcript GSVIVT01023959001 (locus G SVIVG01023959001) derived from phytozome v7.0 (chr-ID chr3 ; pos 2132496 to 2140638 reverse strand)
accaaaaaacaaaaaagtctaaactagtatgtattatatatatgcatttttaaaattttggtctaaattattattagtagctttttttattttattttttatttttttttgttttcttagaataagtttatagatgtcctcattgatcttctggagttgtcgaaaacgctattgacgataatgtttttgttttcgtgtgtcatgcatgtttagttcggcttctttgccacctcattttagctttaagaaaaaacctaagatacggattttgtagatagcaaactttgctatcgcaatcaaaatttagatcgtgaaatagggcatgcataatgggatttagatttttaaaaaagaatgatactagccataaattacgaaacaaaataaaaagatcaaatttgatacaaaataatgcgatagagtgacgtttttttatattcggtactgtagctgggcttgaggtttcatgcagtttgctctcgtcacatttgagatgtaacccactaagacaagttgcaattttttaaggagcgatatgattttggaaccattagctatggctcttcctcgaaaatagacgtgtctaatattctttagtctggcccaccatgtcatgttttgtcgttttaatgcttttagaacccgttttgtcattttccaaaccgaaaattctcgattgattgcgaaggtttccataaatttttaatgccataagtaccttctcatgcgcctaaagtgggttttttaatgccctaaccggatgcaacaccagtcaagaacttcataataacccgtcaatatttttcttgtgagatatgagaagaaattgaaatataataatattggttcatatatatatatatagaagaaaatgttctctattgatttaaactttctacaagagaaagaggaaaaaatccaagatttttacatattattttgattgaaaaatcaatttgatttactccgtatcctttgctaaatgagaaaatggggcacattctacgtcatcaaacctgtgggagttgaggaatgatggaagggaataaaaaacaaaaagagagggaaataaaaatatgaaattcaaagatatacaaaaagaacgggagacaggcgaggaggacttgggtcaaatgctactagtaaactataatgcgaaatgaatgcatattgattggtgtccatgtgcacaattattggtggctttgaaaccatgctataagcatgccataagcacgaatccgacataccaactgacttctccggtcaatgaatcattattaggacccatcaaatcaccaagtggtgcccatccacaaaacgttactgcctcctctgttatttatttatttatttatttatttattattattattattattattttctttattttttttagaattaatgaagaaatatagacttatttgagaattattttttaaaataattttttatttaaaaaaaataaaaaacacatttaacaaccaaaaaaatattttttattcttcaattaaatgtttttagaaaatatctttaaattatttttacttattttatgatgtctatttaaaaaaataattatataatgtgtaaaataattaaaaataaaatattatatataaaaaatatttttaaatatatgtttaaaaatattaaaaatatattaagttttcaaacaaacttttattcataaaataatttttaaaaactatttttcataaatgttttttcaaaaaaattactaaacaaagtcgtatttatcgtattttaataattttatgatatacattgtatttaatttcatgacagtatttaaaagcatatatattaagaaaaattatcttactatgtgtggtctagtataaaaaaataataattataattataattataataaaattgaaatttttgttagtgagaaattagcattagaataaacttatgggttgaactaattatgtatgagctgtcaaatagttaccagcagaagtcccaaaggttcgacctaatctttgatctattgttaaactctcatataatttaatcataacctctccctttcaattactatctttgtcactattgatattgatatcaccacacgataccacactctcaatgagaagcccactatgaatgagaacccaattgtattcatggaaaaattaaaaagaatctcaactaaatagcatacctaacccttaggtggtgtttgttttttatcactattaatattgatattttaatttttttattcaattaaaagtaacgattgatatcatctaatataattaaactaaacttattgataacaagttcaaattaattatattgaatgatattgataagttatttttagctgaatataaaatatcaaatattttgattttttatattcagtcaaaaaacaaacgtcatctttatataaatattctgttaatattttattcaatttttatcaagaatatttgtcaatatctcccaagatgtgattgaatattatttaattttaaaataatattaaatttataggggtgagtaataagacaaccttttaaattaaatattttatgagtgacgttgaaaaaattaaataattttttatcaaattatattaatattaatttctgcttcaactttgactttagcttgtaagtaaagttaaaaataaataatattttaaacttatacttgagtaaaataatatttgaaatttgtacggttgtatgagaacatgcaagtattaaatatttgagaattaatactctattagaaaaatagaattatgccaaatgcaacttttaaatatatcataaataaatggaattaattagttaaaatggaggaaataatccatatatttatgaatttaacccttctcatatttttgtttaaagagtaactttttttttttatacatataaatattcttgattgtttcaaatatttacacgtatgtttaaaaaaaatggttatttttacaagaaaaaataagggtatttttatcaaaatgagactaaacaatgatgaagagttagaagtttgtttgagaattatttttagagcaactttctgttattcaaaacaaaaaaatatagaaaacacaatttgacaactaaaaattattttctattttctgttcttattttcagagaatatattttctcatatttttacttattttcttatgattatttaataaaataattatacaaatatgtagaatgattaaaaataaaatacgatataagaaaaatatttttaaaacatgtttaaaaatattaaaaacaagtaaaaaaatattttaggttttcaaataaacttttattatacaaaaatcaaaaaataatttttaaaaactattttttagaattattttttaaaatagttaccacacaggtcgtagatttctaaaattgggttttaaataacctgattttgccatttttattgtgaatttgatgttttctctaagtaggttttaacttattatttttttcacaatttgctcataaaaattttaaatcacccttcccatagttcacaatggttgaatttttatttatttattattgaatgattaaatggattttaattaaattaattttttgttagcatcaagacccatttagaagaggtaatgagattattaaaagtgatttttttttcataaaacataatattttttaccttatattttttcatagcatccaaacactaaacaaattatttttcacaaaacataaatataattagaattaattaaaattataaaaataaaaacaaatgtaattaaaattaattccaaattatttaatttttatatgaaaagttgaaataaataaaataattttaaaatcacatataaacagaatttattcacttttcttttttctcacattgttgctcgaattttccataaccactggtttatgaatggcacaccgcagacggcacaacaaatatctgtgatattttttcttggtttactccactagcagactttaaactaactcaaaacggcatttcttttgtcgttttcagctccactcattatcacgtgccttggatttttccctcagtttcggcccgcgggcgcgtatgattaattggaagtcaacttcctctcacggtctcacccgttgagtcggtgactgcaccaccacccacgtgttggattcgcatcatgtagtgaaaaggccggtgactgttgccgttcttggattgatcttcaccacatttttagtggtcctacgttattcaatgtgacgcccagcgcataaaggcaaaaacacgcgtttctggagtgaatatggctcgctgttcgacaccacgaaggttgttattcccattttgcccttagtctcagtgcgactttagtttatgtggttccagtaaagggtataaaagctagaaggtcaaggaaggtgaaatgccatatcggagctagaatattaggaaatatgtcaaatcataataaaattgtaattttgttagtgaaattatgactataaataataattcaattcattctcaattcttaaaattcaaaagtaagaattttgataattgatgtattcaaatacatgtatgggatctagtgaatatcggttataataaagtaacagatttaaaagaatttaaggcactatcaaagtagcaaaaagattaattgaaagattcttgaaaaaaataaataaaaaagcactttatataatatttcaagtaatagatgaatccatatttgagaaaatctcagaggtagaaacatcaaaagaggctataaaaattatataaaggtaatgaacgtgtcaagtgaatgaagttgcaaacattaaaaggtaaatttgagtatttttgcatgaatgactctgaatctatctcaggttattttgatcgagtacaaaccattgttaaccagatacgggtttatgatgaaaagcttgatgatcaacaaatagtaaagaaaattatgtgatctttaagtgcaagattcgactcttctattacaacaattgagaaaggaaaagatattcactcttatgattgaagggttaatgagttcattgtattcacatgaagaacgaatgaatcagagaatcaactttacacattttaagcaagctctgcagagtaaaacatctactagaggtcgtggtggccaacaaggtggtagaagccatggtcgtggcagaggtagaggaagacacgataacttcaacaataaggatgaagatagtgacacaaattcttttaaaggaaggggcaacacttctagacctaaaaacaagtcacacatacaatgctttagatgtaaaaagtatggacattataagtcacaatgttgaacgaaattacaaaatgaacaagacgagcagcaaacaccgtcgaggtagagcagaatttagtatcagcctacaatgtagcaacatcaaatgtatatcgccaagatgtttgatatcttgatacaggatgtaataatcatatgtgcgataagaaaacattgttttcacaattatatgaattagtctatgacgaagttaattttggaaacaaatccaaagttttgatcatggacaaaagtaatgttaaaatatattctaaagatagtattgatgttactatagtagatgtattttttgttccgaatcttttttggaatttgttaagcataagacaattaacaggaaaaaaaaaacagatcattaatatttctaatggagcttgcacccttagtgataaaaataagaagatgtttgcaaaagtgcagatgataaagaatataatgtttcctatgtttcttcaagcaaaaactttatttagtttgaagacaacaatggaaaatagcaattagctttggcatattcgatttggtcatctcaattttcatgggttgaagttgttagtgcaaaagaatatggtaacaggattacctatgattgatattccaaatcgtgcatgtgaaggatgtctcattgggaaacaacatagaaattcttttttagttgtaagatccaaaagtgctaaacaacctttggagttggtggataaggtaagatctcttggtcacaataaatatattctgacctttatagacgattttacaagaaaattttggatttatttgttaaaagaaaaatctaaggtttttaacaaatttaaagaattcaaagttcttgttgaaagacaaagtggttgcaatattaagatattgagattggatagagaaggagagttcacttccaatgagttttataattattgcaaaagttagggtattcaacgacaattgacatctaattatacaccttagcaaaatgatatatttgaaaggaagaacaaaaccattattgaaatgacaagaagtatgcagaaggccaagtcttttccaaaaacttcttggacataaattgtgatatgtgtagtgttcttattgaatatgtgttctactaaaacaatttttggaagaacacctgaggaagcttagagtggtcataagcttataggtttagttaacttttatctatttgtagattatgatcttatttcatatgaatgagcagcaagcaacaagaagttgattcaagtaataaatgaagaaattcaatctatagagaagaacaatacaagagagctaactactcttccaattgaaaagaagtctataggtgttaaatgggtttataagacaaaatataaacatgatggtaaagttgattggttttaggcaaaattggttgcaaaaggctataaacaaatgtcaaacattgattattatgaagttttttcaccagttgctaaactagataccatttgcatgataattgcacttgcaacttaaaaaatgtaaaaaattcaccaaatggatgtgaagtccgcatttcttaatggtgtacttgaagaaaaagtttttgttgaataaccactaggatatattacggaaggttaagagaaacaggtttataaacttaataaggtattttatacacgcggaatattgatacctattaattacaacatggatttcaaaagaatcattgtgagcacacactttacatcaagttaaattttaatggtgatgtagatgttgtatgcctctacatggatgatttaatatttataggaaattgtcaacaaatgtttgaagattttagggaggcaataaaacaataatttgaaataatagatttggaattaatgttttattttcttagaattgaagtccaacaaacaaatgatggtatatttatctcacaaaagaagtatattatagacattctaaagtgactcaaaatggaatcatcatcagtaatccgtactcctcttgcaaagcaactagaaatgaaaaaagaaggttctgaagaattagtaaatcctacatatttcaagggcatggtaggaaatcctacatataacccgaagtataattgatttattataaataggatggaaagtataataaataaatttttatttttaacaaagtattatcggttcgcgtgggttattcaaggcattgttttattgtggttcaaacgtaagttttctatgttgcattggcgattagaaaataggaaatttgataggattgtgaagcgagtttccttctgtttctctgaaaatcgggagatatgcagttttgccgagaaaagcagagaaaattagtgcgttattttgttggcacacaaagcaaggctgataccttgcaatgccgttagagtcggaaatttgatcatgaagcggtatgatggattctcttaataagtcggttatgagtgcagtttccgaaagattttttaattttttaatatatttaaaaaaatttatttttcaaatattagaaacactaaaaatacttataatttcgtaataacgagccgacgtacttaagtctcgtggttcttataagaatacacgtctcggctggtggacctgacgattccattggtgaacaacagcagccgattttgatgcatcacgagggtgacagaatgaggtcaggagattctggcgaggctgatcggaaagaggttatagtgaagatcgacggcgaggatgagggtggcggaggccccagcagcagcggcggtagtggtgtcggcggcagcagtggtagccgtggtagcggtgctagcaagat

SEQ ID NO: 12856 - DNA, 12970 bp, Vitis vinifera
  Intron number 12 from transcript GSVIVT01011334001 (locus GSVIVG01011334001) derived from phytozome v7.0 (chr-ID chr 15; pos 8666395 to 8679364 reverse strand)
atagtaggctgaaactcattccctcagttcccaaggtgccttttcatgttgcaattcttctcacattggcaaataactgatgttaagatttaaaaattgtttgaagcagttctttttcttatgtggtatttaatatgcattgaaactgttgtggttttcttttgggatatcacctgggccaaatcttgcaggcactgactcgagtgccattattgctatcatcaatacagttccttatctcaattatctgggatcaacaaactgttctgttccattagttaattaaggggcatttttttgtagataatgctagattttccagagcatgcttaatgtgtaacatgcttctaaaatagctcaaaatgctgtgcacatgaaaatggaaatttaaaatagcatcagcaccgatgctccatgagagttgatggggaggttagagttggtccattatttttcttcattatttgaatcatgagaagcaaacaaacattttctttcaaaaagattctctatgtttgtttggaaaataaatcaattttaaataactgtgtagatggccaggtagatgatcacccactgagtcatatactaattagtccctgaagtggactcagaaaacaaatggcggcaatgctttatcttacatcaattcaatcatatgttgtttcctttatagatcttgtatgcagagctaaagagaaaaatcttcctcatatttcccgtgcataataatttcaaactttacaatcctacttatttactacactgactatagaggaatacatagatacacggaatttagcctaagaattagcctaaagaaataggaactgctgtatttagaaatgaacaccagatttataggagataatttcaaaaatcccttctaatttgatgctcctaatctgttgcaccaatcttgcctaatttactgcaccaaatttgccaacactccccctcaagctggctcaaagatatcttgcattactagcttgatcctagggtcatttggtgtatcttagtagggtatgcattcatttaaaaagaataggagtgttattatcatcctcctactcagtaagatacattactagagatgtgacctttgtgtccttacagaaactctcaccttgatattgtgccttgccactcagttaacaagctataaaattcctatatcaatccatgaagcattgagcatggaaccatggaaggagggtatgaaagaggaaatgcaagcattagacaaaaaataacacatgggagattgtagacctactaaaaagggaagaaaacagcagggtgcaaatagatttacacaaaaagtataaagcagatggactgctagaaaggtacaaggcaagacttgtagtgaaagagtatacaccaacatatggtacaaggacacttttgcatcaatagcaaagatgaacaccattagaattctattatctctagcagcaaacataaattggcctttgcaacaaattgatgtgaaaaatgacttcctccatggcaacttagaagaggaagtgtatatggatgttccttcggaatttctccacaaaatgtgggcaaacaagatatgcagtatcaaaaatccctatatggactaaaacaatctccatgggtttactttgggaagtttacaaaatcgatgataagaaatggatataaacagagtcaaggggttcatactttatttatcaaacactcttctcaaggcaaggtgacaactctaattgtttatgctgatgacatagtggtcactagagatgacttagaagaagtcggaaggctcagagcatacctagcaaataagtttgaaattaaggatcttgaaagtcttatatacttccttggaatcgaagttgccaggtcaaaacaatgtatttttatttctcaatggaagtatgtattggacatgcttaaagaggtaggcttgttagattgcaaacatgttgagacacctattgaggcaaaccacaaactagaggagcaaaatgaagaacctgcaggttgcagttgactgaggtacttatcaaagaatcataagaaaactgatttatctatcacacacaaaactcgacattgcatatgtggttagggtagtgagtcaattcatgcattcgccattaaagcctcattaaaaagttgtttacaaaatactcaagtatctcaaggtagcccatggtaagggagttttgtttcaaaacaatggagacctatggttagaagcttatactaatgcagattgggtaggttctatagttgatagaagatcaacaactaggtattgtactctactaggagggaatctcatcacctagaggagcaaaaagcaactagtggtagcacaatcaagtgctaaggctcaattcagagctatggttaaagggatttgtgagttactttagcttcaaatggtaattaaagatctttaagttatacaatcttcagattgtgtgctatgtttatgacaacaaagtcgccataaacatagtacacaatctagtctattatgatagagcaaagcatgtggagatggatcgtcactttatcaaagaaaagttgcaaaagttgcacagtggacaagtgtgtacaccctatgttacatcaacaaagcagttggccgatgcattcaccaaagttacaaagctctacatttcatcagttcctagaaaagcttgaaatgcaaaatatctttgcatccgcttgggagggagtgttggaatatttgacaacattgtgacttaattctccttcctaaatatattgtatagctgtataaattaatataaaagtccagaatgatttgtgtaattcctagaagtttggtgtaattcctagaaatctggtgtaatctctataaatttggtatagttaaagtagtagttgtctttccattttgaggtcttagaagtcaactatgtgatgtattataaacttgtgcaactattcaaaaagaaaaatcatcataatttttttttttatcttaggtggtgtttgtttttttggctttttgctgaaaaccatttagttttagaatttaggttgtttgtttttttactttttcattacttattataaactttttactaaatagaaaaagccagaatatatggctttttctaaatagaaaaaataacacaatgattttttttactttttaatacttaatagaaataaaatactaaaaaaacaaacagcctaatatttaatactattaagtattaaggttctatttagaattaagtaaaaaaacaaacgccaccttagtctttatcctttcagagtgttataatactttgtaacacttcaatcaccttgcttagtctaatgaatctttgtcattatttcataaatccatgctgaatttcctaagtcggaatatgtctcacctactgcctcccatatttcttctgtagtagtgagaaacatgtacatttgaccgatttttggctccatagagttcacaagccaggacatgatcatcaagttgtttgcattccatacattggatcatctcttcttagagcctttgttgcatcagttagatagtcgatatttccctttcctaatgaacaacttcacatactgagaccatcttaagaagttttgtctgttcaatatgtgagtggtaatttggaaagtcagattgacctgatgatacaatttgtgaattattggcagaagtttgctttggcgagtcacccaagaactcctcataagaaattctagacatgtcaattacatgccactgatttgctgaaaagcaattgaagaacaataggagaataatatagaacaaacgaatattgttgatttaaagaaccaacaaacaaattaaaataaaaataaaaataaaattgtcccaggaaggaatgctttgataccatgtgtgcaaagctaaagagaaaatcttctttgtatttccatgcacaataattttagagtttacaattctatttatttacaacattgactatagaggaatacacatgtacacatggaatttagcataagaattagcctaaaaaataggagctgcaatatttaaaaataaacataagatttataggagataatttcaaaaatctcccataatctgtttcacgcatcttgcctaattcgctgcaccaaatccaccgacagatcgttatcattcatatcatggatagttatgcttctttacggtttaggttgtggaccaaagagtagtttttgtaccttctatattcagcaaggtcccactctaaaactgtgattctatgccttttatgcagaaccttgtaatactcatgattatctgactgactcttaactatatcatgacaaaacatcaaaccaacttgagagaaattgaagttggtaagaaaattcaagtcactttataatgggaaatggtttataataaaacagaaaaagaaaagggcatctttactctgcaatttatcatgcaaacttctagattaagaataaattgttttttgcttaatgtttcaaatttaaggaattatttactatcctccccttcattaaactaccatatacacatatgtgtgtatgacacattttacatgaagtttcacctttcaagaatataacctggtggatttagcaagaactttaaagattagaatgaaggtgccaagggaattttcggaaaatgatctattgattggtgttatcttgactttgtttactgggagcagatcatatctacctcatgttcttcaatatgtgaagactagaaaacttaggtgatcacctaaaagattggggtgggggttgagaagggtgttttgaagtagttaataatctcttttaaccattttagcagatattcaatacaagcaatataaatattagtaatagaaattaaaatgttgaaattaaagagagtaaaggaatagagaatgcgaacaacggaacttttatcttggtctggcaaactgcctacttgcacaccctttggctccttcacaagctttaaggtgttgccacgaacacaagagtcttctcctcaaccaagacttttcttgttcctttttacacttgaatttcttaggcttgaattgacctttacagcttttttagtgtattcccatacctatctcataatcgtaacatgtttacaatgaggaggaggagaagaaatatctctctctaagagtaggtatacaaatttaatgctcaaatgaaggtacttttgtatatatatatatatatatgtgtgtgtgtgtgtacgtgtctctgtacataagaattaagaagaacaattttctatcctctttgatctctcttctacatggtattagagctctaggctcgtaaatctaggaagagaagtttttcagccttcattaccgagttgaagatcatagttgaccttcatcgttgacattaaggtgtccctctttgtgctgcaaacacaacttcacattgacgcaacaaacttagatcgtgaaagagcgataggtgacccttgttcctgttgtgttgttgaaaaagggaacttcttgtcgtcgcaccactaaggtcacactgctacatcacactgccatccactttcctcaatggcaacaatgagatcttatggtaacggcgacggtgaggaaagtggatggcagcatgaggtagcggtgcgaccttagtggcgcaacggcaagaagttccctttttcaacaacatagcaagaacaagagtcgtatgttgctctttcacgatccaagtgtcatgcttgtacctcaaaatatggaaggctcaactatggttgctaacaaaggcaatgattagaaggttatcaccgctgataacaaaaggactcatcagttaaaggcttcaaaccgtgataacaaggataacttatggtgcactcactgttagaaacctagacatatacaggaaaaatgctaaaaacttcatggtaagctaactacatctggcaaagagtggggttacaatggaggacaataaaggaataatgggcaagcaaacttgtcctctacttagcaaaatgaagaaaaatccatggaacagggtggattcaatcaagagaagattaaaaaaataagagctttgttgggaactcttgagaaaccttcaagtacctgctcactagtgcttttaggaaagtttcctatttccattggattaaaagtctaggatgaaacctttgtcaaatcatgggttatagattcaggcgtcacagatcacatgacctattcgtcacaccaatttaaaaattataacccttgtccaagtggtaggaaaataaccatagcagatggttccttaaccactatagcgagcataagagatgtccaaattagtcctacactcacactaaaaaatgtgatccattttccaaagttgtccaccaatcttgtttctatacaaaagcttacataagatttgggttgcattatgacctttttccctacttattgtgtatttcaggactaagacttagggaagatgattagacttgctaaaaaacagaatgggttatactaccttgagacaccaagtgagtcatctgtatctttcctttcagagcaccatcttttaaataaagaaaaaatttggcttcatcatcgtaggcttggacatccatcatttcgaactcttaagtttttgttcccttccctattcaataaattagatgttgagggcttccattgcaatgtatgtgaacttgctaaacacaagcattcaccctttcccatcaataataaaagaagttcaaaaccttttcatttaattcatagtgatatttagagcctttcccctatccctaatatatctaatgcatgttggttcgtgtctttcatcaatgattgtacgagggtctcttggattttcttacttaaaacacaaatttgatgagttttgttcgtccaaattttcgtaagatggtaaaaaaccaatttggtgtcactattaagaggttttggtctaatgatgccagagacgatttcaattaagtcttaactccatactttcaacatgaagatataattcatgaatcatccatcatgtgtcaacccctcaacaaaatggagttgctgagagaaaaaatggccacctacttgatacaactctgagtctttttgtttcaaaatcatctgcctaaatcttattggggggaagtcgtcctcactgccacacatcttataaacccattaccttctagagtccttggtttcaaaagtatcatggaagtactcccatccttctatcctaatatgagaaccacaaaccatctcattcctaagatatttgggtgtgtatcctttgtgcatgttcacaatccaagcaggggaaaattggacctaagagtagtcaaatgtatttttgtaggatattcctcaactcaaaaaggatacaagtattaccatccaccatccaattttttttttgtcttatcttcaatgaaagtgagtcttattttctcgctccttatccttaaggggagaattccttcaaggaagacaaggattgagattcctatttcatcgatccctttcccattgaccctcccaaagtcactggtccggtacttgtgccctttgccttcaaacctgtctctgaacttgagtcgtaacccactgagcctgttaaaatttgaatgactggcaaagtatactcaaggatgaaagttctagtccctagacttatacaagtccaagaatctgaatcggcttttggaaatgcggtaactacttctcatcctcccttacaaactgagtcagaacttgagcttcctattgccatcaggaagggaatgagggaatgtactaaatgtcccttgtatccactttcccatgttgtgtcattcaaaaagttgtttcaatcctatcagagttttcttacgagtttgaacaatatctatattcctaccactctatctgaggctttatcttatgaaaattggaaataagccatgaatgcataattggaagccttggaaaaaaataaaacttgggagttggtagattagcttgtaggaaaaagatcagtgggatgcaaatgggtttatagtataaaatagatggatcattagagaggtataatgcaagattggtgcccaagggatacactcagacatatggtatggattatctagaaacctttgccccagttgtaaagatgaatgctataagaattttgttatcattggcaactaactacaagtgcgatctacaacagttcagtgtcaaaaatgcatttctgcatggagacttggaagaagaaattttcatggaaattcctcctggatttggcaatgacctagcctctaaaaaggtgtgtaaactaaagaaagctctatcgagctaaaataatctctcaaggtgcggtttgaaagatttgcaaaggtaatgaaaaacatagggtacaaacaaagtcaaggagatcatacattgttcatcaagcattcagattcaagagaagttataactcttttggtatatgtagacaacatcattatgacgggaaatgatgaactagagaagtagactttgagacaatgtttgaccaaggaatttaaaatcaaagaattaggaaggttgaaatacttcctaggtattgagattgctcattctaagcaatgactgtttatttatcaacaaaaatatgtaacagaccttctcaaggaaatagggaagttggtgtgtaaacaagcaagcacaccaatagatcctaatcataagcttggagaggctgagaaagatactgtggtagatagagagatgtatcaacgtttggtaggaagactcatttatctctctcacacaagattggatgtagcatatgttgtgaatgtgattagccagttcatgcacaatctgaaaaaggttcatttgcaagtctctaagaaaggacatcatgtttaaacaaagttcgggactagcacttgaagcatacacagatgcagattatgttggatttgtggttgatagaagatcaactattaggtattacacctttcttggtgggaatctggtgacatggaaaagcaagaaacaaagtttggtagcaaggtcaagtgcagaagcaaaattcctagcaatggcccaaggagtctatgaactactatggttgaagattattttggaagatttgaagattaaatgggatgggccaatgagactttaccgcgacaataaatctacaatcagtattgcacataatcaagtgcaacacgatcaaacgaaacacatagaaattgataggcattttatcaaagagaaactagatagtagattgatttgtaccccttatgtgtctactgaccaccaacttccagatattctcacaaaaggtttaagcagtataaagtttcaagcaagcatatccaagctgggaatggaaaacatctattaaccaagcttgagaggggagtgtgaaagattgaaattaggaaatatgtgattttgaatagagaattaggcaatcccataatcaaaggggttttttgtaattgagttaggaaagtccctaatttgggttctaggatttttgtatatatgtgtgtgtgtgtgtgtgtgtgtgtatgtgtgtctgtacataagaattaagaagaagtttctaccttttattcttcaatctcttttctacagttgtatataactccgatacgatctactttaagcctatctgctcagacgtcaaaaacattaatactcttaacccttcttttcttgtcattaaaatctaggattacctaaactttgggctaactgaatgtgtttttcttgttcaagtatttagttttaatttgaacaaactttttcctttcatgcaactgatttgttttatgtgtgtacctaatggtaattctgattatagacacatcttaatatgaagctcttattaatatttttttgtgtgctttgaaccttctaagattagacacctagtggatgtagcacatattttaatcatcaatacgaaggtgccaagggaattctcacaaaatgatacatagactggctattattgtgaacgtgtttactgatatcagaccatgtttcccaccatacatccttgaatatgtctctcttagtaactagttttagtttgtacaaatcctctcgtgtaactattgtgtgtgtgtctctctctctctctcccccttttccacatgctgagagcaatgctcaaatttctgtgtcatagtactgacttatccttgtttttaagacattcaattccttccctatcgaggtatgttgatttggtcatcatcattgggagaaatattttgcctctttagctttcctttttcttggatcaattataaagaattgatcaaattgataagaacaaaacaaaattaatccaaattttaattaaaaaaaattatcttgaaattcccaatacccttcactaagctaaattccaagatgctagtacatttttttttaattttcaaaaataaaaatgaaataaaaattggtgctgctttcatacatggctgtgtggcacaggcatggaggtatgactgtgtgggtgcttacagccatggatgtctacagcatattcaggtaggcctgtgcaaaatgatccttgcattccttgcacacattgaggtatgcaagcaagcgtctgcagaaaattcaagctttgagaatgattcaaatcacaaaaaaaatataaaaaatttgggaattgattggggactagtcattgaaaagacaggaataaaatgttggcacaaattttgacaagaatcccaagaataatttagggaaagaaatacaaagataaagttcttttcttttttttaattttcatttttattttttcctggccacacaactttgagcatggttatgggattgtaagaagccatggctaccatggtgttgcaattttattttattttgtcttttaattttgatttcatttttatttatttatttattttatttttttgttttgttgttgttgttttttttttttttttctttttgagagaaagtccattaatttttaggaaaaaagacattgttagaaaacaagaagataggttaaggtttactcatttggattagggatttgggcagagggagaagcaaagtgaggaagaaggggaagaatttgcactcactaaaataggaaaactttgtttgtgtgtgtctttgttaatgaggatgtggggacaaaacctaaaagcagaagttagttatttcagaaaatagagatgttaaagcaattaggtcaaatgtcatgggaggttaatataagttacccatgtgtatttatatacatgtatgtatccatgtgcttgcatgtttggctctaagtacgtatgtttgcctttgttcatcagaaaatgagaaatagattgttgataatgcatgtgcatgggtgtgtgccatctatctatttacctatccttttgtgtctgcatgcaggcatgttacaagctaatcttaagaattaggataatgtaagtttggcaaacggaaaaaaacattacaggaaatccaagggttgttagatgtcttggtgggaagaaacaaagtctgcactttctgataccagtggataaaatcatattgaagttatttctatggtctagttcttgcttggattaatgctgtgaaggtggtgcagatttacaccaagggttgcaagcgattggatcagttcaaggttaattaggtcatagtcttctttgttagtggacgttagaacaaggcctgcaatggtctgtagctgtttgaggttaggttaggttgaggattaatggtgttgatcatgaaagcttaggttaggttaaggattgatgatattaatcataaaagcttaagaataagctttagatggataaatagatgaggggaggacttgaacctgagatttctagttaaccaacattctgatgccatgttgagttaccaactttcctaaaagcttaagctgttgggatttgagcccatttaaatgaatcgggcctcgtgcactcaaggccaactgaatggaaaagaggaaaggaagcccctgcctgtcttctcaccctcaaccaagccaagaaaaataaaaggaaggacatctgtaagttgaaaggagagaaatatttcccttccactcacctccagggctacttttagaagtttcaaagctcttaattgcgtgtccctggaaacatctaggatattcatttgtacacaagctaacgttctctggtacacagctttgtcccttatcagtgcccgtctgtacaaggaataacactgcaagcctacttgtttggtagaaaccgaagatgtttatgcacaatgctatggcttaaccatggaaacagtacgagttcttgaacatttgtaagatattaaaggaatttttgtaacatcatccttaactgcataattcgattgatggtatggttgttacccaaatctagtaacttcaagacaagtaaacttagaaaggggaaacatcatgagatcttcatctgcaggagccagaattggtgtaaagtgtggctaataataggcatgatcatgaatagtcttcacatgtggaccctgaagcactgcttttttgagctgcccatcagcagttctaacattgctatgttgaacttatattcacacatctctgcaaaaacagggagttcaatatttttccttggagttcaaaacttggtttattttgttggtgtgtaagtcaaatagaaatgtgaaattgttataatttgcaaaaatttcagaggttgtgctgcaaagcatgcaaatagtaagaagccctgaatgggaaacttcaaaaagtagaaatgagatatatacatgatatgaatccatggaaaacatcttcactttgaaccagtagtatttcatctgtgcagcgttgatatttctccctgtgttcttaacattttcagtgttgcagtcctgaccctctaactaaaactcacgcagggctcttggatcgttcgccagagcgttggaagcac

SEQ ID NO: 12857 - DNA, 9929 bp, Vitis vinifera
  Intron number 17 from transcript GSVIVT01030062001 (locus GSVIVG01030062001) derived from phytozome v7.0 (chr-ID chr 12; pos 9343816 to 9353744 reverse strand)
gatacctcagcaactaacaaggatagataccttgggttcttcaatgtttcccacaatcacctcacaacgagggagacaatttaacacatttcaaaacagctcacatgaaggcaacacatttcagactctgagccatcaccaccaccacttttaatctctgagcaagatgaagactcaaagtacacgattaaagttggtttgatgctagtgtcgatggaatatggaagtgagctagttgtggtggttattaggcataccttgaccacaaggaaatatgaacagtttgtgaagacttttagcaggaggaggaaaaatcagagaagggaaagaaagaaaggatccagaagtttttttgataggcaataatataatttgataaacaaacaccatagaaacagcacattgaggaacaaagggtgtatacgacaagcaacaaagaaacaaccaaaaaatggagccaaggtataaccaaaactagagtacataacagagaggagccagaagttgaatttgtgtttctttaccatttttatttccttgtttctaacttcttttgactggtgggtaagggtggtgatcacttgtttgggaaggaaggatgagtttggtattgctatacaaattatttacatgtatgtagtgtaactagcttgtccttattactagataattttctgtctgcaatctccgtaaaaaaaaaaaaaaaaaaaaaaaaaaaaaaaaaaaaaaaaaaaaaaaaaaaatctgtgcctttccttcaactattaatcttctttttctttcctctcaaattatatttttcgttgaaacctgcagctcgcttttgtctctttcttcttcgaagctggtacaacaatcaaggatattttggggaaagaaccaccacattgtaggattctcttttcccccaatgttgttccagaactttctccattttcttttcctagaattgaacaaccagcctgctgctccacttcatcccatctggatatttaatatcattttcaactttttccatttgggtatccttcaaaaatattattgtttgggcatcttccaaaatacaatctattgtcctcctgtgcttgactctgtttcttgaaatgtttcttgaaatcctgaatggtgaaacttgtttgtgttcacagtatccatggaccatcgattcatcaaaagtccttgattgcatttatcatcccttttcttccttgttcccttgtaatctatgcctctttgtgtttcaagttgtcaaatcttcagttgctcttgaaattcgttttttttttttttcattttttggatatttaaaacataaaactgtcctgtgatctaccattgaggctatctcatactactattcaacgtatttccttccctccctacagttatgggatcttccaggaggcatgagatgttattgaatccacttcctcactccaggggctttcaatcaatctcagtgagaagatattccataagacaaacgccatagccaccagagcagtattaggtacttttttgataggcaaaggcacagaaaaagtatatattaataaaaacagggcgcccaatggccaacccaaagcatacaagaagtatacaaccaggcggctatagacacaaaacaaaagaaagaggggtaccaaaaaatctcacccaccttcatctagcgcccaaccaatcaaaaaagttgattaaagaattaggaccttcatccatacacaacttaatccaagatcaaaaactacaattttaaaggttggttccaagttcactttgcaacctcaccagcttagctgtatcaacctttcaaacatattttatgatcacttgaagtatattctaggatggttttaatcatatatttccactgatcatttgaagttagtctagttaactgtttctctaattacaagtacttttacaccttcacttttagagacctaatcaaatagtcacaaccctcacagggtaaagtatttttcaggtggtttatacaagcaactttcttgcataacattgccagagtggggataatattgctttcagttttgataacaggaaggagtcaaccttttgtgtgcatgatattgaccactcatttaatccactatatgtaattaatttaatccttggttgcttggtcagtaagttttgtttcttgtcttcttattgcatattgtatattttcttcttccaatcctatttttcctagaagtttgctgacaaaaatttactcatccaacatactaaacaatgccttagacaattggataagactcagaaaattggtaaaagatgtccataggaactctaataaaggcattgccaaacccccagcagcactagtcccaaacatacccctccaaaagaaagctgattccattttactcaggagtttgttgtaaaacaattattatttctgagatcagttgaagcaataatacaaataccagtaaaatcctaaccctctacctgaattttaagcaacttctgcatttatgacatcataactgaaagatgaaatgataattcatcaacactatgcacataaacatgagaaggatcactgcagaagatgaatatagaatgtgaatgatgataaataagataatatcaaatcaaccaaatgtaagtggactgcatatttacaggcagaagaaaaggatgcatgtggaaaatttgcttatgaattttttctgcagttacaaaacaagtacagggaagaaagatcttataaaacagagcacaattcctactgtaggctcaaagttggaaatgtgcttccaaaatgacaaataaatagcacctaagccttaaaattaacaaagataggactagtatatgtgaacttaaaaattctctccattttctttttcctcactttctgccctaaaattgatagttttggatttatcaaaaccttctggcatgagatgtttcatttccatctctttgcacaacttcagagccaattcttccttccctgacaaccaaagtcccctacaaagttctgacaatgtatctgaatcaggagctatagatctttctgacatttccctcacaacttccactgccccatcaaaatcctcattcttgcagaaggtggatatcaacatcttgaaagtgtgataatttggatgacagccactccttatcatgctcttgtatagctgaaatgcacgctcagagttttttctcacacattgcccagtaataagtgcagaaaaggtcgaggagtttggaactaaattctccctatcaagttctttaaccagatacgcagctttctttgtcctaccctccatgcatagtcccaaaatcaatgcattataagtcaagatatcagccttaattccatttcttaacatctcgtcatgaagtctcccacccatctcactgtttcccacttggctgtacccatttatcaaagtattataagttatagtattaggaactacatcattagctttcatctcactaaaaatcttgtttgcttcatgcaatttccctcccctgcagaacccattgataagggtgttgaaagtaacatcatcaggccgcacaccattcttctccatcaggattttaagcttcatacctgaattcagaaggcccttattacagtatcctgcaatcaatgtattataagatgtgatagttggactaaagcccatggtttccatccttttaaagacctcaatagccttttctagtttcccccatttgcaaaatgcgcacatcaccatgttcagagtataaacatttggtgaaatcctataacgctgcatctccctataaaatgtcaatgcaatatcccctcgttgtaaactaattgatgcactaatatatgcattgcaggactcaactctaggcaaaaacccataatccttcatttggcagaacacatcaatggcattcctaagcttcttcatctgagcataagtcttaaaaagtgagtcaaaaacgcaaggcgaagaatcacatattcggtacgaatacagtatcgcctcaaagagcttagaaggatgatctattgaacccgatcctagaatacccttcaaaacagattctgcagatttgaatttgtgattcttagtaagaatgtggagaattattgagtaagtctcaagggtttggcaattggggttttgggctttaacccaattgaagaactcaaacgaaagaacatgatccttctttatctttaacataatgtgcttcattctgtatggtgttagaccggtcgacattgaattgagcttagcccaatccgagtttatgaggtgactgtgtgctacattcacaaaatcaaggtcttgacctctgggttcaggaattgttctgtgtggcactggaattggattccaactccgcatgtaattgggggttttggccgctccattgagcagagttgagaatccacgaaatgggatactgatcatagctttcccagttgcagaaactgggttgagaaaatcaatttccaaaatagcttgtaacaggaatccaaattcttcgaatcaaaggatgaaatttgagaagacggaattgggtactgaccttactggaagagatgattgaatgcaaaatcccaaatcagggtttttcccgaaacccaagttcaaacaatgagaaagaagaagggatgatggaagatgaacctggatatcacagcaccggaaaacccacatcacctccgacccatcagcgtcaccgccgccggcgactctacctctacctctccggtgttcccagaaaatcaagagacagaaaaccgaacaaaatttgaaaacaagaaaggaaaccaactaaaacatacccttcgttctccagttttagaggaatcaactcaaatccattctgtgaatacagttcttggattgcctggtttaaattgtctaatgacatcagaattaaatacttacaaaaattaaggagattcgtatcatgtgtccactcagagaaagattatgtgaaatctattagaccggcatggcattaatactttgctaccaaccttaaatcttttatttatttatttttcatggaatttcatatttagaaaaattatactttagcataatgttttatgaagaaaaaaatgtgttataattcataagagaagtaataattttttatatttttatattaaactctttataaaaatataaattattttaataaaattatctaaacagtagtccttaaaaacctttattttcttaaagtcaattaaaataaatttgtaaaattcgattatttggagaaaggtgtatatcataaatgtaagaaagataagaattttatttaaaaaaaaaatttttcttacttttttactattatcctttgagcatctattaagtaataaccaactaaataatataatgcaattagtgaaacgatgtcatgtattcataaattaatggaataatgtcatatcatagatgtgtggaccaatgatatagtgtcaagtgtgcgtataatcgatttatgggaaaaatatacatgaataatggtatctatccctcaaagtagtttacatccctctcaatcgaaccaaaacaaactcaccttaatagacttcatctccatctattaaaccaaaatctttaaatcatcccataaatttgatggtagagaagatccaacccaccactaagatgcattgaacctaattaatcaaataagtataaaaacatctcaatttatgctacctagtaccttaaaggaaaatataatcgattcttaattcgaatgcgacaacaactatatgaaagtttagattatcactcatcctaataatttggagagacaacaaagaataggtttatgaaactagcaaatgaaaatggggttatgacttatcatcactcatcctaataatttggagtgactccttttgtccataaaacaaagtaaatggctccatcctgagatagaaaattaatgagactttccctcaacatttgtcacaagcaaacatccatgacacaagtatatctatcaaatttatattagattatcacctcatcttaatatattagagaaatagaaagtttagattccaataacaccttatgaagacaaaaataaaaaataaaaaattgcacacatcagggaccttccacctccccccccccccccccctctctctctctctctctctctctctctctcttgtttgagaaatgatgaaatggtcacatccccaatgaggtggagtatttttcaagtgttttacatgggtaattttcaatagcggtgtgagttggattaattaagctttatatgaaaagtatttttgaaaatacttcttaaaaataatttttaaaaagcattttatgatattttgcttaaaataaaattatttaggaatttgaaaggttgttaacatgttttctgcttttaaataaggtttaatttttatattttaaaatatgttttaaaaacaacttttatttataatattttattttaattattctttatatttgtataattatttttaaaacaatatttagaaaaacaagaaaaataaccaaaaacaattgaaagtgatttttaaaaatagcatgttttttttttatttttaataacagaaaaatcttttctgtttttgaatgctaaacatgttttgctgttcttttattttactttggagtataaacaatttttgctccaaaaaaattgttttcaatcagaatttaatggagagcttaatgttgctttcagggtagattagagaaaggaaccaatcttttcctgcacttgacattgacgattactttaagccactatagataattaactcaatccttggttttcagtcaatgaccattatctatatagttttttcctccaggagcttgctgacaaaaacctactgatcaagcactaaacaatggttcagaaagtgggattaggctcaaggatgattaaaaggtgcctgtgaaagagctggaaacaagttaattatcagtaagtgtgatttggccatatgttgaagccatttaccttaatttttgtataatggattaggagttttgccctcaaaggtaccccatgaaacaagtaatgcccaacaaacaccaccacagagaaaacttacaaccatttcttcctaatttttcagtgatgaaagcttcagattccgggatttttcacttccagctaagagggcagttagcaggcttaaggccctggctgtgacctcatggtttgttttccaagtattcttctgcttaccttttatctacttgtttgttggctggttgcattgtttctatcattttatgtacttgggagctcaacgtgcctttagactttgattaaacaaatgaatttgtttaattctccttgaccttactcattggtatgtggtatgtgggattcatatatgttatagaactagttgttaatgaattccctaatcaagccatgcaggccacatcagtggacatgtgaagttaatctagacccttttatgttatcattttctgggcacccaaacagtttccatacccttgatgggtctaattttgactggttgctgcaaatactgtagaggactgactgactgaccatggataatctggacacatgtgctcaacctttttcgatcaatttgggttggaaatctatgccttgggtttaggaatcaaacaactaatttgagtaacttttggtcccaaaatctaccaataaggacctaacttggctttgaacatgatggaccttcacagctttgtaacaactttatatgattaagagaagttaataattttttttttattcaatgtggaacatcacaatttctctttatgtggatacaatgtcatcgtgtgtgtcgcatgagattacatgtataaacaaacaaatattttttgtaggtctaaataaatgttcacactagattgaaaatcaactttaatacaatttataaggatatgttcctaattgtgtagattttaaagccatgagagtgctttgggctcaaaaccaacaatatgttggaaacagttcattacataatgactcatgtggaactccaaagaatcttgggaatgatggaccccacaggagtgttgagcttttgtagtgtgggctatggactgaagtttaatgtatggtttgtatatagacatggagagaacatgattaaaatgttgatcattagtaagtggcagataccctacaccaaccaagtacaaatataatagtcagctgggagggtgagagtgagtgaaaactctgaaaatctttgcgctctttgcgggttcttcttgtaatcttgcaattatcaaattcctcctagcaggactcgaacaagtgcccctgtgtaatgtgtccaacagacaagtccaacacaatacaaaacaactgcccatgacaatctcctttcacacacaaatttgtggggtagtcccccagaaactttatagatctaatgtcaattccaaaccctgtattttaatgatattttatcatatgctttctgtctcagaggacttggggctttcctttccgggccaaaagccaacaccatgagacaaccacatcaatactacctgaccatgatcttttataaaaggtcttctcctttgctttggttgatatccaagatacactattatttgaagaggaaacatagagatactttgatatgacctggttggtggtgtcactaactacaccttttctttatgcttgctagctagctgccttctcaattgaaatgggattaatgagcttgtggaaaactagatttggttgttgagtaggtggtgccctttctacaagctgtaatggtgccccaaggaccactctgattggatcaaaagcccactagatttccagatttttggaactcactagctacccttctatctacaccttatcacctgacaaatcattttcttatgctttagaataaagattttcattgaagttgccattattcaatcatatcatgctaatagaaaaaattttgggatctgggttcatcaaaatcttgaagatatgaaatgggttttcaaggaatgcctcaagaatatggttttgagctcagataattccctatagttgtttctaacttgtaagggagacagatctcagtctagattttgaagatttcagcactgccttttagataaaagaagagaagttttaaatttgcaaagaaattctcaaatgggttctgagattagatttgaatacagcaagaactgaactttcctgtagaaggggaccatcaatcaatgggttttagatacagatctgcaaaagaaaatcttaaagaaaacatattaactattcccatatggatttgcaaattataaaaagaacaatatatgatgagagatgggtcttctaggctatgacccaaaaaagcacttgccctcagatttcagacccccacctagggctctgccctaagctacaaatatggaccacacggtccactctacacacattattattcaaatataacacacaaaaacaaagtcacaaacatagagttacaggcccatccatgcatgcatgcaaagaagctaaagagagctataaatgaaacacagaaaaagttaataggatatcacaagaggaacctctagggctatataataaggacactttgaaaaaaatatgcaaacaacaaaaaaaacaaacaacacttctgcttaacccgaaaaacaatattttaaaagaagaagaaagaaaacaccattattcaaaaggaagcatagcattggttccagttctttgccttggagcgtttcctttggccccttctcttcttccctcgatgcccgcatttctctctctttctctctttctctctctctttcttcaagtcaaatccctcaaaccccacgttacacactacaaatagctactatttcctcaagagtactctctatttctct

SEQ ID NO: 12858 - DNA, 3010 bp, Vitis vinifera
  Intron number 1 from transcript GSVIVT01032945001 (locus G SVIVG01032945001) derived from phytozome v7.0 (chr-ID chr1 4; pos 24501162 to 24504171 reverse strand)
accctacgtatcatctcaggtcagtgggtaaattctgtttgattgcccagaaagtagaggaaaggaaaataatttgaaatacatgttatgttgccgattttctcttgggctgtggggagtggcggaaaggaagagattttttctccttaatttagattttgtgctgttagggatgttgagcagtggggatgttttgtttgttagccggaaagtggaggaaaggggaaaggaaggttatatgtatcttgttttatttgtctaagttcacgttttatgctgttccgaatgatgagaaactggggttttctgtttggattcctagaaactgagagaggaatattggtttggaaactgcttctttgcctttttatttccttgtaattgacaaacattggagtggaaactctccaattgttggtatatctaaagggtggaatgtgaatcacagaagtaattgaaggaactgatattgtttattaaaaaaatcttgaactggaccacaaatgagctgggttgagcctctcagtctggcttgaataggcttatgggcactgaatttgaatatgggttcagttagggctatgcctagctaaatccacacgcagtcctgctgaattaaagctgggacattatctcaataatacaaattatgttcagatgaatcaaattctccaaagcccacacactcactagttcctgttgtcctctccctggccatttcaattcaacaaagggagcacctttgcttaattttgtgcatgtatataacttcatgcaactctcaggatcaatcagcttgatcttcgcctcactatatataaatatcatatttggttctactgcatatatttgggttggatgcttgattgatgtctatttgatttcatagagaaactaccccttcttgggttgaaatggaaaaggagagggcatgtaaatatcatctaattgtttacatttttggttctgcttacaacattgtttacctgggtcaagttcaagtttaactttgatggtagctcatggaggggtagtttttctatgccagttagacagcacttgatgctagaggccaacttgcaagccttgtgtagaggcttgaatcaagcaaattgtttaggattcagtaatttcttggtggagggtaacctactgacagtcatatcctaggtgttttgtgtagtgccagcgaaagctttgatgccaacaatgttagttcaacacaaagataaaacaatcacacatacggtacatgaggttttaacgtggttcggctaaccatgcctacgtccacggatgagagagaataattccactatacaatagagaatattacagaggatagaaccagatacaactattgggttcccgaaacatcccatatttccccactccttgtatccataccttactacgagccctctcgctccaccaggtacctcccgttcttcctcacatctctatccacctcgtacagtctctataggcccatcttcatctcataactttttcccctcatgacctagaatatttatagagatatttccaacaaccttccttattctataaggaagtctaatattacaataatatatcaatctataaatattctatataatattctttacacaaaaaagaatctatactaattaggaatttgggacacttcctaacaatctccaccttggaccaaattctatgaagttaatcttcaatctcttcatgacacaaacctttttgtatcatatcaccaaaagagagtaatcgactccaccttcagtgaaaattccttttgttttcatcttgtatgctttgtgatcttttgctcttccagaaatcttcaacccaagctctgataccaattgtagtgccagcgaaagctttgatgccaacaatgttagttcaacacaaagataaaacaatcacacatacggtacatgaggttttaacgtggttcggctaaccatgcctacgtccacggatgagagagaataattccactatacaatagagaatattacagaggatagaaccagatacaactattgggttcccgaaacatcccatgtttccccactccttgtatccataccttactacgagccctctcgctccaccaggtacctcccgttcttcctcacatctctatccacctcgtacagtctctataggcccatcttcatctcataactttttcccctcatgacctagaatatttatagagatatttccaacaaccttccttattctataaggaagtctaatattacaataatatatcaatctataaatattctatataatattctttacacaaaaaagaatctatactaactaggaatttgggacacttcctaacattttgaagaaaaagtgacctttagaaattggattttttttttaagataagcaaacgattttatgggtagaattttaaatctctctttggagttggggtattcttttcagtgggtttctcattcggtcaatcattagacagattctttgtggtgcaattgacttagagaatgttttattgaacttcatgcctacctgagtttttctttggtttgtgcaatttttcttgtttcatgttttgctatatccaatttattttcagtttccttcgggcctttttaagtttcatcggtagttatgctttgaaggatatatatatatatatatactgtgatgatgttattttgcgaatatgtataatggtaggagtattactggctgccctagagattgctggtcttgatccatagcaagcaagtcctgataaagagggaaggagggatgagattgtgcctgtgccccagccacacaagtttatgaccttaaacatatctaaaattaacggattggaaatccacatgcttgaaaaagtcaaaatcaaaataagaattttactttatgtgattctttgtggagtttttgcagtactgatcttttttctgtgtttgcctttttagagttttactaattttctagtggaacttcaaatcat

SEQ ID NO: 12859 - DNA, 14214 bp, Vitis vinifera
  Intron number 10 from transcript GSVIVT01021897001 (locus GSVIVG01021897001) derived from phytozome v7.0 (chr-ID chr 14; pos 5861706 to 5875919 reverse strand)
atcctggtggtgcacgtgaggctctacatcgcaaggtgtgtcatactcctgttcagcttgactagttttattcttctacagctgaaaatcaccatatttcttagtgttcttatttcttgcgatgtcccataaaatctgcacaatcattttgttataatttttttattttgctgctgtctttttataactggaatgataaattcaaaactccaacattaaaagacattaatattctaactgaagtgcttttttggctacggtttatgtcaaatgttgaagtgtaaggtgtagaaaatcagaggagaaactgatgttttcataaaattgatcaaaaaacgaaatacaactaaggcctaaataaatagaaatcgggagtcagttcaagtttgaatctgaccagttttctttcctacttctatggtactaactttgaaagattcgaagtttacaattatttaaatttggataacaataactaaaatcaaataaactttaaactaaaacaagataatatcctaaaataattaaacagaaaccagattattcaaacgcaggtaattcaggattatcttcagatttgattttccacactccccctcaagctggtaagaaaatatccaacatgcccagcttagaacaaaggtcttcaaaaatcggcttaggtggactttaagtaaacacattggctacttgcttggtggttgggacaaaggtcatgctaatgatcttctgcttgattttttcttttatgaaatgatgattgacttccacatgtttagttatgttgtagtgaactggattatgaacaatacttattgtagccttgttgtcacaaaataatttcataggaccattaaatggaattttcaattcgtctaaaatcaattttaaccataataattcgcaagtcccttgagcaatggattgaaactcctcttctacactactccttgtgacaactgaatttttttcacttttccaagttaccaaatttccccaaaggaacgtacaatagcccatggtggatcttctattggaaactaaaccaacccaatacattggtgaaggcttccacactgctctcttcatttcttccaaaaaaccaatccttttcctggtattccctttaaatatttcaaaattttgtaaatggcttcaaggtgttcttctcgtggtgagtgcataaactaagtcacgtagctcttgacaaaggcaatgtctggtcttgtatgtgataagcatattaaccttcctaagagtcactaataactccctcgatcaaccggttctccttcttctgcatgtttgagttttaagtttgcatacaccagtgtctttgttggtttgcttccaagtgttctggtctcctctagaagatcaaggtgtatttcctttgcgaaacagaaataactttttttttttttttatctcaccacttccatgctaagaagttctttaagtttccgagatcttttatctagaattcttgtgccaaagtgctttttaatttctccatctctttaagagcatctcctgtaataataatactatcaatgtacacaataagaatggtgatttttccattctcattatatttgaaaaacaaagtgtggtccatctatccttagtggaagctgtgatttttaatggaccgtgtaaatctcttgaaccatgttctcgaggattgcttgagaccgtataaagactttagtagtcgacacaccttattgtttgaaaaataaagtgtggtccatctatcctcagtggaagctgtgatttttaatggaccttgtaaatctcttgaaccatgttcttgaggattgcttgagaccgtataaagacttcaatagttgacacaccttattgctcccaaatttttcttcaaaacccagtggtgcatctatgtacacttcttcctcaaggtcaccattaagaaatgcattttttttatgtcaaactgcgagagtgaccaatcaagatttgcaactagtgaaagaagaacccgaattgaatttagctttgcaactggagcaaaagtcttctgatagtcaatgccataggtttgggtgaaacccttggcaactaaactcgaacatgtagaagaaggagaatcgattgattgagggagttatgttttgctactaggaaggttaatatacttatcacatacgagaccagagattacctttgctgtgagcttagtgagtcagtttatgcattcactgtaagaagaacaccttgaagccgtttacataattttgggatatttaaagggaactctaggaaaaagattttattttatttttgggcagaaaattagaggagaaactgatttttcataaaattgataaaaaacgaaataaaacctaggcctaaataattataaatcggaagtcagttcaaatttgaatctgaccggttttcttttctacttttatgctactaactttgaaagattcaaagtttacaattattcaaatttggataacaataattgtgtaactcaaccaaggtatttctcaattcccttattctttattaaaggaataatacttatatatatatacaattgagagtcctaaattaggaagatattatccctaaggaaacaaccaaattatggtatatacagatatatacaactaacactccccctcaagctggagcatagatgttgatcatgcccagcttgttacaaaagtactcaactcgagttccatttagagcttttgtaaaaatatccccaagttgctctccagtcttcacatagccagtagagactagattttcctcaatcttttcacgaatgaagtgacaatcgacctcaatgtgtttggttctttcatgatagactgggttcgcagcaatatgaagagcggcttgattgtcacaccaaagctttgctggcattgtgcacttcattcccacttcacataagagttgatgtatccatatgatttcacaagtagcctgtgccatggccctatactcagattctgcactcgaacgggatacaacactctgcttcttacttttccaagccactagattcccaccaaagaacgcacaataacctgtagtggatcttctatcaaacttagaacctgcccaatccgcataagaaaaacactcaatgcgagtgtgtccctaactactatatagtatgcctagaccaggagccttctttagatagcacaaaatctgctctaaagccgcccaatgctttattgtaggcgcagatgtgaactgactaataacacttactgcatatgcaatatctggtcgcgtcacggtgagataattcagctttccaaccactctccgatacctctcagggttgtagaagggatctccatcatctgacataagttgtacattaggaaccatcggggtagtacatggctttgcttctatcttaccggtctctttaagcagatcaagcacatacttcctctgtgataagaacatccctttcttgctccttgatacttctattcctaggaaatacttagttcaccctagtcctttgtatgaaacttggaatgcatgaatgccttaagatcagaaattcctgcatgatcatttcctataataactatatcatcgacatagaccacaagaagtatgataccagcagttgatttctcgtagaaaacggagtgatctttctcactcttgttcatgccaaatgcttgaatctccttactgaattttccaaaccaagcacggggactctgcttcaatccatagagagcttttttcagacaacaaaccttcccatactccccctgagcaacaaacctaggaggttgctccagatagacttcttcttctagatcaccatgaagaaaagcattcttgatgtctaactgatgtatcatccactgttgggaagcagcaatagaaataaatagtcgaactgaatttagtttggcaactggagagaaagtatcagaatagtctactccatatgtttgagcatatcctctagctacaagcctggctttcagtcgtgccacagagccatcaggattaacttttatcgcaaagacccacttgcagccaacaactttctttccttgacgcaaatcaacaagtttccatgtatgattatcctccattgcacagatttcttcaagcattgcattcttccaaccaggatgattcagggcctttgtaacagttttaggtactgaaatagaatctatagaggctacaagaacacttgaggaagatgacaggtgatcataagacacaaagttagcaatggaatagatagatttgcagtgtcgtttacctttccgaaggctaataggaaggtcgagatcactggaaggatcagatgacgaaggagctggtgcaggacatgtatctgttgtcactgggcgccgagagtacacctgtacaattggtggtttgtctggagcaggaggaatattaacaacaagacccaaatgagcaagagacgcatcagaatcaaccacacttgattgcccaacagttggtcttgaattaaccacttgatacacaagccattcttcatcctcctcctcacttgcagaacttgtgggtgaagagaaaaaggatgtgtcttctgaaaacacaacatccgttgatactagatacttattaagatgaggcgagaaacatttatagcccttttgcagtcttgagtaccccaagaaaacacactttaacgccttaggatcaagtttagtaacaaaaggccttgtatctctaacatagcatgtacatccaaaaattcttggttcaagtggaaaaagtgatttttgtggatgtattactttgtacggaatatcacctttaagcactacagtgggcatacggttgatcagaaagcaagctgtggaaactgcattagcccaaaattgtttcggaaccttcatctggaacatgaatgcacgagccgtctcaagtaaatgcctgttttttctttcagcaaccccattttgagaaggagtatcaacacaagatgtttgatgaagaatcccattgtgactcatgtagttttgaaatgagttagacacatattcttttccattatcgcttcttaatattttcacagacacatcatatttagttttaatcttagcagagaatgcacaaaaatgggaaaatacttctgaatgattcttcataaattaaatccaagtcattcgagaaaaatcatccacaaaggtaacaaaatatcgaaacccagttttagaagtaacaggacacggaccaaacatcataatgtactaactcaaacaaagactcagcccgtttattaatccttgggcctaaagaactacgatgatgcttcgcaaaatgacacgactcacaatctaatgaaggtaaattatcaaactgaggacataatttcttcaacatcggtagagaaggatgtcctaaccgacaatgagcttcaacaggagaggcagtactgacatacacaactagtcgaggtacccactcgtcaagaatatagagcccatcagatacatgtcctttaccaaatgtctgtttcgtcataagatcctgaaacacacaatgatcagggaaaaatgagacactacaattcagatttttggtaagtttactgacagagattaggttaaaggccaaatttggtaagtttaacatagaagataacgtaatagaagatgttggtttcacagtcccagaccctttaatctcataggtagaaccatcagcaacagtaacaggaggagcataatgtgttctgaaggtagagaaagttttatgattacctgtcatatgatctgtggcacctgaatcaattatccatttgtttgaggaggagacaagacatgttttacctgactttgccagagcactaacaggagtaaatgctttcagtgcgtcttgatactgtgaatatttagcaaactcttttgttgtcattgtgacgatcttgtctgaggagtctgaaaatgtaacagtatcagatgtagcaacattggcagtttgaattctccgatttcgattctgcaatttcctgcagttcttcttggtatggccagcctcatggaagtaaaaacacacaatagtacttgaatcattgccacgattttcaaatgccctgtttccgcccctgttattcacccttcttgcattttctgcatttcctccttttgcagtaagaacattggtgtgctgagaagacgagacattcttagttcgtagaactctactgaaaacttcctgaagggaaccaatgtcagaaccagaaagaatatgagattttgcagtctcaaactcagatgggagaccggataagaaactcataacagccatctgttcccgttgagcctattgtactctaacattcggactgaaaggcataagtgcattcaattcctcatataccttcttgaagtccataaaatatgcagtgagggatttagctcccttctcaggacaatggaaggcattccatacatcatacatccgagagacatttccttttccagagtacagaaaatcaagagaatccattagctctttaacaaattcacaatgactcagcagaccaacaatatcactattaatagagtttttcatctacagaaataaccatgcatcatcttgcatccaaagttttctagtgttatcattaggaggttcctcaatcaagtggtcatctttagcaacacttctcagataaattttgatagtcttgctccattcaatataattagacccatttaatttgtgttcagttatttttgacacaataggcactatatcagcaacagaattcttattctcttccatgacaataaaattcaatctccaaagtaatcagcccagaccagaaattacaattcactatagcaagaagaaagagacaagtacctctcttacaagaaggcgtcaaaagtgtcaaagcgtcaaaagcgtgcgtcaaaagcgtcacttatattttttcttcccccatttttgccgtagcaactataaaacccttgactccctctttttctcaccctgaaagttgtgaggaaaaatggattgttgtcgtggcggccaaggtgggcgaagaggagtgtgcgagaaactcagattggtccggtttctaagaggagcaattcaattggatcggcgttgaagcggtggagagtcgagatttactccggcgaagtaacagtagcggcgaagttacagcagtggcaagtatcagcagcgagagacaacaaccctttcaatgaagttcttctcggaactggggtcgtgctgccgagctccagcgtcggtgccggagacagaggtctcgtcagggctgctgacaaacgtgggttgtgtgtcgggcctgaaaagcagcaataaaaggcgctcctctgggcagtggaggttggggctttcaatgatttcggaagacggcatcgcttcggcggcgaagagaaggcgtgagagggtggcgggatctgagaagaaggcgtctcaggaaggtggatcgaggggcagggttcgccggactagcgatggtgacaaatctgacaaatctgatcagtcaaaggaaaagagaaactccgtcaacgcgtcccaagggtagaatctcacagtccaagaacgagatcaccctggccagaaaacaggattgtgacgccaatggaactggtcagaggtcaaaagaagctgctatgctcctccacgcgccggcgcgtgagttgacgcgtcctgcttctcagtccggacgcgtgagcttcacgtgttcagcttcaggtcgtcagacttcgggtaccggccgatcttgacaccttgcttccccctccgaaggtagtgacactaccaggtcacttttattctgtgacccaagaacaaacccagaatttgagccaatggctctgataccatgtaactcaaccaaggtatttctcaattcccttattctttattaaaggaataatacttatatatatatacaattgagagtcctaaattaggaagatattatccctaaggaaacaaccaaattatggtatgtacaaatatatacaactaacaaattgaaactaaataaactttaaactaaatcaagataatctcctaaactaattaaacataaaccaaattatccaaatggagataatccaggattatctccaaatttgattttccacacaaggtttataacttattttttttaaatgaacaattagaatttctgaatgaaatgtaaaagtgcttgtgtttttttttttttttaatcaatttgtaatttaaacttgtttccaagtgtggcaatgtgaagttattgcctaggctgacttctagctttttattctttaatttttgccctatacaacgacctgaagtgatgctacttgtagtagttgatgctttgtttcataggtacatgaccaactgaaaatgcatcctcgagcagaaatcatcccacctactcttagggcattctacaagctcgaccaggagacttctctgttctctctagatcttcatccttctttctcctcttcatactttcccacaattacctatctctaaaaactatcatgcttgtttcaaagcttcaaaatcatttcctagcaaacccttgttcaaggacaaatgtaaaatttttttttgtaaaattatggaagtgactttcttgttagaactcaagtattacccaaaataggaatgtgaactagtagtggtagttatcattttggttgtcaccatcatgtagtcctaaaagctttcatcagtaggcactgtcctgggacctggtgtagcaggtctgtttgcatcctaccctttaggatacaacagctgctaccttaggatccctcccctcaaattaccgggctcatttaccatttagaccttcctctagaattggaaatacaattcatgagttgagggaacacagttgtagtcgatttttttcccctttttcttttaagtttaactagtgtagcaacaacgatagttgtagttcctataattgcaaaaaagagaaaccaaattgccagagagaaactaaaaagatagcaaagaaaaataacaattgacaagttgtttggcaccctatgctccatgctacaacaattgttacctatgcaagtgtaagctttctttttaataggcaaatgttgtgctagtggaaacttcaattccacctattcaacatacaatgatacagaagattttaacattatttgactaatgatacctacatttatggatgggagagaatcattcttctatcatcaaatattagaaagagaaaaactagattaattctcaagagctaaagcatcccgtattttttcactcttagtatttatacttgaattgtaaccgctacttcactggatctttcttatgattcctcacatctctacatgctctttatagtctttataagtttatttaaatatgataaatttttattttgatgacctagaatatttctagtgacattcctaatatatttccttattttataaggaaacctatttttactaggaatatcaatgtattaaatattatatataatattctttactaaaaggaatatataccaaaaagaaattttagatattttcaataatcttcaccttgaatcaaattccatcaagtcaatcttttatcttttgatgatacatgattccattgtatacatggcttttcctcacatgcttttactagcaacacaccactcttttgatatgccttaatcaacgtaatttctgatatgtttcacttggaaatttatctacaccaccttcactagagattaagttttgagtaaaaaaatatcatatgggcatccattatctttaatcataggtccacaatacttgatcttttgaatcattactccatggtatgattttcacattcactatgatgcaaacactctcagatactacttgttgtgcgagtggaagcttcaatgccacatgttagagcaataacataaaagacaaaattttcctcccataaatgtttacaaggttttaatatgatttaaacaatgatgcttacaaacatggatgagagagaatcactctattgtaccatggagcattacaagggaaagagaaaaaaaaatcaaatgcaactcttgtactttgaaacaaggtcccaaccaaagcggccttttttgcttgggaagccgcgtgggggaggattctcaccttggataagcttaaaaaacggggatggcagctccctaaccgctgttttttgtgcgggcgtgaagagaaaaatgtaaatcacattcttttacattgtatagtggtaagggccctatgggagatcgtccttgcccttgttggggttcagtgggtgttcccagagttagttaaagaggcgttattcagttggaggggctcttttgtggggaaaaaaaggaaaaagatttggaattccatcccattgtgtattttttggacggtatggaaggaaatgaatagattagcttttaggggaggtgtgttagatatacagaaactcaaaaattcttttgtatgtaccttgtgaagttgagctagggtgtatattagagaggagtcctcttcgcttttaggctttttggagtggctagcggccacttaagggtgggtaagggtgcttgttttttgtgttcttgttttaggctgatttgtatactccctgtatgctttgtggcctttgccctttaatatatttgtgattatctatccaaaaaaaaaaatctacaccataaaccatgagccttgttttattgaatatcttccactcttccttacatctatactaaccttatatagtctttacaaattgtgacctagaatatttctaaagatattctcaacacatttccttatttataaggaaacctatttttacaaggaataataatatatgttatattctatacaatattcttaccaaaaagaatatataccaaataggaatttgagatattttccaactgaaaatgggagaaaatttgttggaaagcacctaatagaaaaaaaaaaaaaaggtgccattggaacatatcagaagtatactaggcacccaaagacttgaacaaaaccaaaaaaatgttatgcttttgtcttatattacccataccatttgcaaaatctagaaaagaaaatttaccattgcctaccacctctttggtctataataataaagcctctagaaacaacccctttaaagccactccgcctggtttactcttgaaaattcttatgtcatgctctctccaaattgactaataaggcataaagtgggcaacctacaaaatgcctcactgcccatgtagtcattgttcaaaactaagcaacatctttcttacttattagaggatccaagatattcttaacaaggtgaatgctaaggcccacaaagtagaagctcatctataaaaaatgaagatatgctcctaaatcagagcttgctgacttagcaagcatatgcttgcaatgcttcaacttagcaaaagctcggatataggaatagaaattgtaagaggattaaaaatagaagtggttggaagatagcagtaggaatattattattattattatttttatttcattaaatggtttaaactgatggctgatggttttcctaatttcatttggaaatctaaagcccactctaaggtaaaggcttttgcatgtcttgtggctagtaagagggttaacactaataatatgctttagaagtagagtcctctcaaagccgtaaggtacttaattcaaagttgtgcatcatgtgcaagaagagtaaggaatcaattgatcttctttttcttcattgccttagtagctttgggcctatgacatagaatattcatccttgcgggactagattgggtggcatcatgttcaatggtggagatgataactagttcctttaaagattttacgaatcatgcaaaaggaaaggttttatgttgtattgcaagcgttagtttgatttggtcaatatggtggaaaagaaatccgaggattttttcggatgctatgaggacaatggatgcagtttgggacctattttactcttcatcgtctctttgggcctctactagcaaggcctttagagttacacccttgagtctaatattactagattgaagtcttttatgcaagtcaaagagggtcaggaagacctgacaagtatggttagtgctaattgaaggagtagttgagtagaacttcgatgtatgttctttgggcacctcagggcaacttgggattgatggtgtgattagagatcatcgaggttcaatagtcaaagcatattctaaacttacaggtgatggttttgctattgaggttgaggttgtaccacttatggagggccttgtgctagcaaaagctttgggtaggtagtttatgttgttgttagctcatgggtggcttaaaaaaaaagaggttcatggagacttgacaggtggttgtgccaaatattcgatatctttatagagttaggttgctccattggatgggttccttgcttagctaatcaagtggcaaatgggctagtaggagcagagcaattgatatcttttattggagattatatgtctccttaagtctacttaatggttgttcaaatgttacttcactttttgtaacttctctcatttatttggttaaatggttccttgtaaagaagtccattctgtagtcttgatctaagtttgtacattatggaaggatgtcttgtccttcttgatcttttaattaatagtcaggatctattaggtttgtaataaaaaaaaagaagaaaaaaaaagagaaaaaccaactagtagggaacaacaaaaagatctttcccccttggtagctggtctcgttcatatgtaggatctcagacttgtctacaaagttgggttgctctttcttgtggactccttgtttagctaaccatttagcacagatatgttgctaagtgaggtgcttctagcaaaaggattttggaagggaattcttgtttttattgagtatttgttatatgtttggatctcttattgctttagggtgggtctgtgtgttttacttgttcatccttgaagaatttctttttttttttttttctttcttttttctttatagtctgtttgtggagggtaacttatccttaccatttttttgatctatgttgcaataaaattgttgtttctgatcaagaaagatgacataacttccatgaatctcctttaatggatgtggcaagatccctaaagagggacttactataaaggaagcttcagcaaagaaaaacacaaaaattatgttgactgtatatgcatatccaccagtcatatacgggaatttgcacatgatgtgaacttgtgcactgcactatgctcgttctgaactcttatgctgtctgaagagaaatgaaagttgtccaatgaactttgaatgagctgccagaagctgcaattactacagagttgaatgctgaatattttggtttggccctggttctaggcaaatccaaactgctctatacttcgaagaaaattttgagggcttggatttgaaatgtcattacaactccagcaagttctcctctcaaatgtgcaaaagcttttgttgaacatttggtgtctcatttaaattttaagcccttctggtaagactattcaaagaaactagagtcagtttgcaatggcatatcagaaggtcaggcacaagcatgatagctcatcacccctaaactaggatttcactagtctataaacttggaagtattgagcttcatcagagttctttttgccttttttgatagtcttgccccatatttccttactatgacagaaaaatgagagtgtagacaggctgttgcaacaatggtctgtcatttataaggccttctctttcttcctttacctggaaattatagaaacacaaaagagattaatattttgaattatgtcttcacccttggggacatcaagaacaaaatctctaacaaactgggattaatatctggcccttttgaggtgatattcattctatgacattccaaaaccataaaatatagtgttgagattgtccaatgagatagtgctgaggcaataattttcattatgttatgagcagtgttctgtaatagttaaggtttttgttttgataggttctgtaaaagttaaggttatgtattatctaatgttgtggtttatctatggtattagggtgaagaatatcagttattttggcctgatcagcc

SEQ ID NO: 12860 - DNA, 2731 bp, Vitis vinifera
  Intron number 10 from transcript GSVIVT01003214001 (locus GSVIVG01003214001) derived from phytozome v7.0 (chr-ID chr 1; pos 13970559 to 13973289)
ttccgtgcgaaaggatatattactgaactgaaagagtaagtcaagctacatctttggtagtgtgtgtatatatatatatgtgctaatggaattatgggatctcttacctactacctctctttagaaaactaataggaactttttaatgaaacaagttaaaatggaaatcatctcaggtggaccttgaagctcttgtgttagtgttggttgctcatctcgtaccacaccaagactattgggggttggctcatcaataatatttctcatatgatggggagattcatgacaataaagccttaccgtgctatcgattggctacatcatcaccccccctttttcatttgttgatgatgggccattttgttttctcacagctttgtcccatgtaattccaccttcatatcgttcttgcaacaccttcaaattaaaccagatacttcttagtggagtcattaatctcttacatgataaaaccatgttatctgatactctagtcttgtcttttggaggtgcagtctctaagccatgaatgcagccatttctaactttattgtttattgacttttcttttctttttttccttatttttttatcagaaaaaaactaattcactaatataaatttttaagaataaatgaatcttatcaaaatccacatgccagttgtataaggtagaacgtctctacactcaaggggctaaaaaatcccttacaaaagaaaccctatgtttggcttctctttttgcttaaagatcagtgacattagcagcagaatgaggaggccatgaaataggatagccagagtcttgaatttcatctagaatttgaaaaagcaacccatcatacctccaaggcactctctgtgatttaggcatataagatatcaaaatagcataatccccttcaacctgtaagttagagaggcaaaaagccctggcttgtagcatgctttctataagggctaaaatctctacctcaatggctaaatcttcacctgctggttttgaaaaagctcccaccattaaaccattatagttatgatcacccctccaattcccaattgacctggattacccaatgcataatcatcgaaatttaacttgaatgagccaaagaaaggtggaacccaaatagggaacaacttcctttctaaccctttcaatctacatattatttccaatcaagttgtagagcgttgagatgaatacccttaatagttgtagtagaggcctagaaaaaatgtaaatttccttctttttttttttttcttgtcttgtgaaacatccatctctatcctcattttatagagatgggattattgagtgtcatcatattgtgccatgaaagttagccaactttatggatattcatcaatcacatattgcatgaaagtacttcactgataccatccttctctagtaatatttaatattcatcttcagtttgtcccctacaagtgtctagagggtaatgaaaattgtaatttttttttttttgtctctattatttaatctttaccatctttgtatggttctagaataaatttttgacccttctaatttttttattaaactgttgtccttattttattagggaaaatgctggttgcactatcacttttatcactatttttaccaccttgttagatggaacatggtgattgaatgtgacaaaaaagtggatctattaaatcaggtaataaaagtgatggtgcattagagcgccatcgtatcaccaaaaaacaacataaacaaatgaatttcaacttaaatatgtctactaggcttgtcactcttcatattattcctaagactagttactactacatctacgtcctatatctctttgttcatgtcaatatttgtacttgaacatggaacctttccctatccctaccctaaccacttgccacttgagctaggcctcaaggcattcattatgtaacgaccatagatacaatcattcatccatacatatttacatacaatcttctctgctaattttttaattaataacccaaggccttgtatggatacacttcttgtttttcattttataaaaatagaaacttctatatcaaaagtaaaaactcttgtacaaaaagtatagacttaccttatatccttaaaaattgttttaaaaaattttttaaattgaaatagaaaattttttaatagctcaaaatttttaatcagttttagaaatcattaacttttcaatgtaaatctatacaagttcttatattctagatagaagttactgctatttttcacttattaaaaacaaaaaataggaagtgcatccaattagacactaaggaagtggctttatttcccattctctttgaatgaaactgaactagtcttatacttctgtttcctttcaaactctttgtgcgaccagtcttgctgcattccatggcaaatgaatcagaggttgttaccatatactttgtgtgactctactattggatctgtatttctatatgctatataaattctaacaattggtatgctaatctttattgaaataaatgcttgttcagaggaacaatgcttggccaatggcataaatcaaagatgtttatgaaatatattaccttgcttttgggtagaaggaatattacctgtacttcatataaatacacagaaaaaaaaggagaaaataaaaaggtaaaagaaaaaactggttctgatttctgttatatataatgtttttaggttgacagagca

SEQ ID NO: 12861 - DNA, 1821 bp, Vitis vinifera
  Intron number 1 from transcript GSVIVT01016886001 (locus G SVIVG01016886001) derived from phytozome v7.0 (chr-ID chr9 ; pos 2260702 to 2262522)
gttgcagatcactgaagctctctgtaaggtctgtgtcttcgttttctcttttgcattttcgtgttcattttcttcttgatgatattttattaaattttatttctatattccgtttggttgccgagaaattttctttattttccaacgatttcccagctgccaaacgtggcattgttaggttttggttcttctgtcaccgatctgtgattatttttcttacgtgtcgttttggttggcgtttgacacgctccgtttggtggctgggaaaatggaaggaaacggaactgaaatttgttattgtttctgattttggtgatctcactgttgtggactgattgagaatggcttggagttatgttatcgtgtgatatagggatctgaatcggggtaggacttgtaaccgtagagttctcctaactgaataggtttttgcatagaatgatgtacataaaatacaatagggcaattcagttcatatgttagaattcaatgaggcaattcaatttcaatgtgacgcccaagcatgtccttagtagttgaaaatgattaaatctcttgatgtgtggatttcctagtatatttttctggttatgtttgattatctgctgagaaattatttcacttctaagaagaaaacttcgttgcaatgactcatctaaaacctttacataaaagccatattgggctgagtaagtgaaggaaaacaaaaggcggcagaattttctgtcctttggttcccgaggacttcaagcaagctagttgatatcttcttttatttttatttttttcattttttttttttttttttaattccttcttattcttttggctgtgtctttagttgggtgctaaaaacgataattaaaatagaatagttcaatttcatttttcttaacctacatttctgaactactaatcagtgtttctgtgaacaatctgaattataggggtgtaaattaaagtctcttcggttggtttttgagtaaaaaataaattaaatcaatatagtcagttttatatgtgatagaaacagaaccgaccagatttggagtgaaaaaccaaatcaaaccaagcctttgaagattgatttggttcggtttttgtggatcggtttctatccaacttaatggccctttttagtccttagcccaattgtagatttgtgtttgttttgagtctaaaactcattaatttgattttatattaggccttaagtctgatttgtttttaaaattgattgaaaccaacttggattggatgttaaaaatatattgaatgaatttagaattaatttaactataatataaaaacaaggaattaatttaatagaatctaatatgaaaaaatttatcaaatatcaaacaattatatataggttttaaaacatcggtttggtcccgtttttattggttaggaaacaagaaaatcgaaaaccaaactgacaaggtcagttttcaaacttctcaaactgaaccgaccttttttattattgaaagttgaaccaatatgatcggttttggttggtttggatcgatttgtcggttttttcagtttgcttacatccctattggattagatatcgacttgctaaacatttttgaaatggttgaagaccttcccatcagaataatgttaatgattgtgaattcattctttgtgtcttatatggggccaatggtccatgtcatggaactatttgcatttctctgaattgtgtcagtgaagaatattgcctttgacagctgagccgattttgctaaacaagtgttttgaaaattaaatgttttgattattgcactgccaggtttagtttaagcagtc

SEQ ID NO: 12862 - DNA, 4134 bp, Vitis vinifera
  Intron number 8 from transcript GSVIVT01010258001 (locus G SVIVG01010258001) derived from phytozome v7.0 (chr-ID chr1 ; pos 18515350 to 18519483)
agcgtgtcacagaggcaaaaagaatatcccaggtagttcttttttctaacttcttgtttttctattatcttagattagcctcttgacctttttccattcatgaatgattaacttaaagagtgcttgaggcggcacttggcaagtgctgcagtggtttctggaaaagctgtgcttaatgacctctctggcatttcaagtaaattaattgtgatgtacgctttataaggctgccagatccatgcactaataatggtttttatgaaacctctataatggcgtgaacatgtggtaatagttagtccattcttgcttctgaatggtaacattatagaggaatataatgatagaaaaaaagtattcacaaaaatatatctacctctaaagccatgatcatctggttggggtgaggcttttttggttgattgtgaaattatttgtttcagatacaacattaaaagtagaaaatggtgttattacaagttctattaatcactatgaaggcaaattagaattgaaagagtgagattatatgaaacccaaatatgggttgacttgtgtatcctattatttactggtactaccacttaaaatcagtcatttgcagtgcttttatcaattgcctattgagttgtatgttggacatggtttccattgaagtttgtatttagtattttcaagttattaaaatactgattcaatggccaaaatatcttactagacctgttctttaagccatctcatctttcctccacccaaaaataatctctcgtagtctcatgaaatataggaagaattgaaagaaatttttcctaaaacttgtgggtcgctctgatactatattcattttgctagtctggaatggattgtaggcctacatcttaatagcttaaacttgtaggaaagttggtggcttaacatagtatcggagttctgtttaagtgtctcaagttagagtctcttctactgtttattccctcatctacctatgacacatggatacatgtatggcggccacgcatgagtatacattggggattcatattgtagcaacttaagtttttaagaaagttggtgccttaacacacttcaatgttagtttgtgccacaaattgtgagggagggtgttagcttgttatacagtgtgggcccatgcctaacaacttaagcttttacaaaagttggttgcttaacacattaatgttgtttagtttgtgcaacaagtcagtgcttgggatttcatggattgtcctcctgaaaattttggtattgcatttatcagctgggaaaatacagggagaggtcctacagttgtatgctatttgatgatgatatgggtttaatggatgaaactaaatttgggtaaaacgtcacctactttataggttcctcctaaaggttattttctcattaactagtctccttagtcatgtagctcttatttacttgctttcaagtgacctcccctgtatggctgtttttaggtctatgacttcttgtaaaagtaagtgaagcagaatatttacctttcgataggcaattaattgtagaagtttgaaaaaggatattgtagcactttggtttttcctttttatcagattctgtgtactttcttctggtgagattgtacaattctcttgattatgtgtgaaaataatatctctttctttttttcttccatccttcatattcctttgattatcttttatcttgttcctaatcttcatttttaatctgcactccatctaatcattaacttgatgccctcctaatttatataagacgtccctattcattatattttgtatatgaccccaaacctacttataccctcttctttgaagtaaagcagcttcattcctaatttgaaggggctgccctacatcaattcctctgtcctatgaaccagacatattcagctaaagggttctctaaggaatcaacttgaagattgggaactgtaccttaacttgatctggtgttgctaaaaagtgagacaaataagcacattcttgcttttccttccttgaaacttgttcctctgctaaacaattctgtggcctgcaacttgaaggttcctcaacaggatcccatcttttgcttgcaattgtttcatttcctccaaacctagaggtttttctttatactcaattatttcttaagtggggtcctaatggtgccaccatccagcttgaaaccaaatctttctccacacaaaatcccatgaaattttcctctcatttctaggtaccaactttggtacaaagactgagtatatggagcaggcgggaagattgacaagagagattctcttaagagtcttatttttaaagtgttttgagagataacccaaaattcaagatgattcagaactcgctacaaccaattctggaattgaagtgacattgagtggtgcagctaggtggaggtctaagatgttgaaaaatgagggatttatcacttgcaaatctgatgcaacctgaatactagatatctccctgccctttatcttcaacgttttaatgatgcaaatgggtttggtttagtggggttttctcagtttcagaaactttttaccccttgaattcacttcattatataagttgtaccatgtttctaaaagattctttctatgaggaagagtgaggagcctaaaatgtccagggaaattgggcaagcagagggtctctcaagtggaaatgccttggaagaatattcttaaagaaaccagaactttccacttctttcattgtaacctatgggctgatttataaggtctcctttctttgcagccagtggcctttttaccaaaaaaaaaaaaaaaaaacatggtgtttccctgcagagcactggccctagccacctctcaattcagctatgttagatttccagtgtctggtttccttgcttggctgcttctaactatagccatcaaaccacaattctcgaatcaacctatattttaggcttccctagctatagtcctgattcaaggagatgctaaccatttgggtgttgcataaccatgaatcttcaaggaaagtgtaggagattaggtgtattcttggctcaacggagacatcttcaggctaccaccctcttgaagaggtgtgaagagttcagcatcaaaagtataatttatgcggtgagtaggtggcatgatcctcctggggtggatgttgtagggacttcttggagagtagaggtgatcattgatacccttttgattgggtgagatggtgtcaagtgaaggtggggaagtgatgctcctaactcggcatgatggggagtgacatcccgttgtagtgtgttgagagtgaattctcattcattcactttactactagagagctttttcatcagatgtatcatgataggggttatgagtttcttccatcctcaaattagcagaagaatctcttagcatatgccatgggtaagcatcgaggagctccaacttttatctgagtgcggggcatctgtatgaagatgccatgatgtcttagtgctgaagaagatagagagaccatggttgtggggtaatgaaagggtaatgaaataactaataatttgatctttgggaagacatttatatgtttttagtcttgcatgccaaaatggacagctggcaacatgttggttcatttgttgttggtactcaggcatcattaaaccttaacctaatatgccaaaaattaagaacacaagtaagattaatatgtatttgcatcaaacatgcacaaaggatttctcctctaaaaggattggaacgaaggaaagtgtacaactcttgattcctgctagattcacaaccctgtgtaggagttttggcagttaagagtgttacctgtgacttatgttgtgataggccataagaaagccatcgatgcatatatttttattttagttcttctatccgatcggtggttaaccttttacaaacctatagtgaatattctcccgaggaagaacaatatcattgtttgtttgtggtggtacaattgttattatcgattattgttattgccctgaactacaaaataagctttttttatgttttcatttcgtctgttaattcaactcaattgattggactttgtagaaaataaaagagacaggaggcaagaagaagagaag

SEQ ID NO: 12863 - DNA, 1393 bp, Vitis vinifera
  Intron number 22 from transcript GSVIVT01015415001 (locus GSVIVG01015415001) derived from phytozome v7.0 (chr-ID chr 11; pos 3446369 to 3447761)
gctcttgacattgaatctaaaatttcagagaaaaggtatctcttagaagttttatacacatcctatttgatagactattgttcttgattttccctttttaactctcattatattgcttaatatacaatctcatgtaaaactaaggtttatacatgagtcttgattgtatgcctcataggatttcaatggttaattgttgttttgtattttttccttttgtaaatgctagcaagaaaaatttatcccaaaaccaataacagtgaatacttaaaacccttagtataaatctttcaaaaaacagtatagtgtctgggaggattgggcagtggatccttttttccagtgatgcatttgattctctggtggaggaataaagaagtccatggggaagagtgatcctccccaggtttcattttggcccagagaggataatgcaggagtgctcccactagggatcctgggattagacactgttttttatgttgaaacagtttttctttatcaatgggtgacgagtttcaatgtattggtgtggatgaccttgtggatttgattttctctgacccattggagtgggtttagtttaacattaatggggtgatgatgagcattgatttgtaatgcagcaggcaagtggaggggtgctttgtgaaggtgggatagactaccaagtctgggcagtaaaggagtggctgaaactggtttggggcaagggtttcaggaaggttttggatctggatttgcaattttttttggggtatctttgaggcaaggagaacaatcaaagccattaaatgattaaacataaatgggaagaaaaatgagcaaaaaattttcttgccagaaattgtgaagaagataacgatatatgaaatactgtctaaaatgctatagtggtactttatcatatttccaaaactaatacagaaccgcaactggtctcatccaagttgtgaatctttgatgtgatattaaaaccatgatgcatcatgagttacatcttggtgtcagcttatatttaaaaccataatgctccttcaaagaatagccagcagttactggtacttcaagaatattcccctgctagcaaaattttgtttgaggcctttgggtgttgatctactagaaggaaatgctcagttgggctttagatgttcctttcaaaattgttgtttttgttgtctttggaacatgtcacttgtgtttttggtggatgtagatcttcattaatttttaaaaataaagaatttgtgctttatgcttgattcaggtgtgtatggcatgcaaattgtttggaattttttcatgtttcattcgggcgtctgacatttgaattgcttgggttttttctcctgtaggggtacttatcctcctgctgaacattatttgaact

SEQ ID NO: 12864 - DNA, 8124 bp, Vitis vinifera
  Intron number 18 from transcript GSVIVT01016199001 (locus GSVIVG01016199001) derived from phytozome v7.0 (chr-ID chr 13; pos 6756586 to 6764709)
aaggtatgtttctgtcaatatttccttttttattttttccaacataattgcaatctcttgtccccgttttgaagtttcagtgaatttatgtttaatcatcaacttgctcaatctggagccatttatctgaggacatatgcttacagttccatttccaacagcctatgcacatcctttcagttttctccttgccaatgtcacagtgttcatgcattgttgtcttgtggaattatatttttatgataagattatttcaatccatgaaccttatattgaataaattatcagttctaggccccaaaaaactagtccttatttagagttctaagaaagttcggcgctggtacagctatttgttgttgtatgattgtcaatgagaaaagatcttataattattcacatgtgttggatacaaatatgcattcaatgtagttactccagccatttgaagtgtacatgtgtagcacttcaaaaatagctacttgaatacaatagtctaatacatgaggcaatgattttggtgagaattattcatgtactagagatgtgctgtcatgttgctaatgactggaaacttctttcgccattcagtagatcatcaatcactgtacaaatttcatgatataaattgtaactgagcctccttatccatccaatctctttcctatttaaatttatattgctgcaaaagtggaattttgtatgttgagatttaagggaagttactatgtcaattacaggtgattttttattttttattttttttattggtaaacagagcaaatatattaaaagcactagaaaaaggcgcacaaagtacacttggaactcccttaaaaggctgccatccccacagtcttttctaacccctctgaacttctgcagcacccccatcaccgccacatttctctgacaattcagctgcaggaaaagcagggccaaaggctgcacccacacctaccctcttcctcccctctccagagagcgacacgctaccacctgcagactgctctatatcgactatttccttactcccattgcagcgtgtggatctctcccttcatctcccctaatctttagctcaaggcccccactgctactactcttcgggaccacaactgaaaacctaggagtagcttcccactatagttggatggagaaactggacaaccccactaggacctgtaatgaaccaggcaaacctttatcgtctgatttaactaaaatcctcgcccactgcaagtgtgagagcatagcagtgtcttcgtccacagctagaaatcctccgcaacagtccccgagcttcttaaacacctcctgactccagaaatgcagagggagtcccaggactctcacccacaactcctttggtaccacacccttaagaaaacacccaacttcggggttccacctttccaggtgcacgattttccccttaagcctctttgaccctcttgcaagaaccctctctgcctcggatccatcctcaaactcaaaaagaaacagaccaccccctagtgctgaaatcttcaaaccctttttcaatgactaaaggttagtcacccaatttctcagcgaaagcaagtctggcttagatttaggatcctcttcaaacttcccaactggacaacaattcaactggtccagtctgctttgaacgtcccactccccaatttggacccaaactgcctctcccaccatgcgcagatccttttttactgcctccacataggagcctttcttagaatccaccaatgaacttctccacttctctgtagtggagccaacaatcttcgtctctgccttaagaacgacctctagaaggtgaagcttctccaccaagacattccaccccctaaggaaacctctcccatcagggaagaccaaggaaaacctcttaccctcctcagcaagcacataacagaatgaatctccccaccccatttgcacagcgctccaacctaaatccctccctccatcctcccaaactttgcaccacctcaccgctccttcatttctacaacaagattccaccccttccagtcaagaagagaaacctctgcttctttccacaatgacgcccttcatcttcccttccaccaactcaacacaaagatcaaaagactttgaatctactacaaaccaacaccttccgcctctcgaactcattttttcatttttccaatcatacccctagtagtctttttcaataacaggtgtaataggttgtaaacatcctcattttgtgaatctccacacctccaatagtggaattgatttggaaatgtatggcattttcatttgatgtgtctggtattggactttgttttatatctatcttatatctaaagctagcaggttgtgatctctctataaagaccaaagcttgtcaaagtacttcctaaaattttattccaagcaatatgttatgaaaatatcgtatcccaactgttttgttggctcctatgaggcaggaaaaactatgaaatttatgaaacatcttttgttttgaagaatttgaagaattggaaggaacaaagagaataacaatttccttgatgtcattctgtacaagcccacatatttatacaaatattcctagcattgaaaataggaaccttcctaacctaattatatcaaatccctttgattatgggattgttctaattctctccttaattccagaattatacaaattatacaactatgactttccttcttccacactccctcttaagctggtgaatagatgttttccattcccagcttggatacatttacttgaaatattgtactgcttaaacctttggtgagtacatctatctattagtggtcagtagatacatgaggagtatagatcaatctgcatccgtgtatgcttcaagtactagccctgaggttcatttaaataagatgtcctttcctagagaccctttaagatattgtagcacttggttaacaacttgtaaatgaacgtcttttggaatgtgcatgaactgggtaatcacactcacaacatatgttatatccgatcttgtgagagagagataaataagtctccttactagacattaatacatctttctatatataacaacatcttcctcaacctttccaagcttatgattaggatccattggtgtgcttgctggcctatatgacaacttttctgtttctttgagaaggtttgttatatattatgttgagaaataaaatttttttgcttagaatgtgcaacctcaattcctaggaagtacttcaaccttcctaactctttaatctgaaattccttggtcaagaccttaaggtctatctctctttttcatcatttcccgtcatgatgatgttgtttacatataccagaagagctgccaaggataacggaattttgaccacgttcatttttgcaattagggcaaatgtcgctaaataatcgacaccatatgtgatgtaggacaaccctaggatggttgcctacactcaagggtaggtggactagggttttattttttagggtgtaaggagaggaacaaggaataaattttatgatagagaaaattataagataagaaatagagagaaagaagaaacaatgaagaaaagatggaaaaccttagagtctcactaaggccttctagaagtctcacctagaagaaaatcaatggagtctcaccattgagggttgcaaccttgcaatgaaagaaaatataatattattcatatcaattcacctctttaatttacattgattagcctatttataggcttctctaagaaatccaaagtctactaggactctaataacctattatgattctaattttaattataacatccaaagtttattaggactctaataacctatcatgactccaattctaattatattataactcaactagctaatcctaattagactccaataaataccaatcccaattcaattctaattaatattaatcctacttaaagtttacttaggtcttccctttcttccttgaataaactttaaaaggctttatcccatcaatatgtcttaagtatatccttttagccaccaatcttacctctctaatgacccatccactctatatttaatagtataaacccacttacatcccattgccttttttcctgcatgaaatctaacagctcccaagttttattcttccctaaggcttccatttctacattcatgacttgttttcaattttcattagataaagcctcatatagagtggtaggaatgtgaatattgttcaaacttgtatgaaaacttttataggactaagacaaccttttgaattacacaacataggaaattggatacaaaggacatttagtgcattccttcgttctcttcttgatagcaataaggaggttctaatctatgttttttccagactaaagttccgactctgtttgtaagggaggatgagaaaccgttaccttatttctggaagttgattcaaattcttggacttgtataagtctagagattgcaattttcctcctttagtcctattattcgatccttaggagcaaccatagtcttaccagtttgttcaataatggatttaagggatgatacaaatgactcaggtttagagaaagagggtacgaatattggatcagtcactttggaaaggtcaatgagaaaagaaccgaaatccttatcttcatccttatcttccttgatggaattcttcccttgaagataaagaatgggaaaataagactcagttttgttaaaagtaacatcagttgagacaaaagtttttttggagggtggatggtatatttccctattgagttgaagaatatctcacaaaaatatatttgacagctcttgaatccaattttcccttgttttgatcactgtgaacatgaataaaggacacacactcaaatatcttaggaatgagatggttggtggttcttataatgtgataaaacattgagagtatttccatgggacttctgaaacctaaggttttggaaggtaattggtttatgagatgtatggtagttagaacgacttcgcctccaataagatttagacacatgtttttggaacaaaaaaactcatattgcataagtaggtgaccatttttcctcttagtaactccattttgttgtggggtggttatatacaatgactaatgaattattccttcaagttgaaaatatatagttaggacttgattgaaataatctctggtcttgtcaaatcgaaacctcttgatttcgacaccaaattggtttttgatcatgttatggaaatttaggaaaacaaaactcataaaattttggtttaagtaagaagatccaagagactttagtacaatcatcaatgaaagacataaaccagcgtgccccagatatattagggatagtaaaagaaccccaaatatcattatgaattggatgaaaaggatctaaacttcttttattactgggtggaaaggttgtacacttgtctttgactagttcacatatatcacaatgaaaactctcaacatctaatatcctaaatagagaaggattcaagatcttaaaagttttaaacaatgtatatccaagtctatgatgatgaagccaaatttttctttattgaggtgatagtgctcagaaagaaaagataaggatgacttgcttggtgtctcaaggtagtatagcctgttctgttccttagcaaattcaatcatcttcctcaaatcttgatcttgaaatacagtgaatagtgtaaaaaatcacattgcaacccaaatcttatgtaagcttttgtatagagacaagattagtaaacaactttggaacatgtagcacatttctaagtgtgagtgggagactaatttggacatctcctatacctataatggtggttaatgaaccatcatctatgactattttcctattatttggacaagggttatagttgttaaatttgcgtgaggaatgagttatgtgatctgtaccatctgaatctataacccacgaattgataaaggtttcagctaagactttcaattcaatggaagtaagaaacttacctaaaagttccagtgaacaggtacctaaaagtttctcaaaagatcccaacaaagtttgcagtttttcaatctcctcctggttaaatccgccttgttccaaggatctttctttgattggttgtataaaatacaagtgtgcttgccctttatcatggttagatgttgatggctcgccatggagtttccagcgttgctcttgtgtatgcgttgccttttgactataagtgcaccataagctatccctgttatgatggtttgtgacccttgatcgatcaaccctcttgtgatcaacaatgcctgccttctaatcatttcccttgttaacaacaatatctaagcctttcaaattctgaggttcgagcatgatcttctcctgctttcttttgctcgaataatggagatagtctcatttaaagttagaagctctttgctaagtatttgaactctaacttaagtcaaactcaacagtgagaccaactaaaaaaatcataggtttgatccttttcaatacaattctttaggatttctgcatccttagggcattttgtctcaatgcatcgaaagtgatcgagttcttaccatagatttttcagcatattggcctactctgtgacttttatttccttgttttgcggctttggtcttgacttttattttgtaaacttggtttgcatctagtgcctttaagtatgtctggtgaactgcatcctagatgtctttggcagtgattaggaacatacagatgtcaccaatttcaagcattatgaagttccacaaccatcccataatcattgagtcttgcttgtcccaagcatcaaattaagggtcccctctctttggtcaagttcccaggagatgacttaattttgcttttccctttagaaaggtatgaacaagttgtgaccatttcaaataattcttcccattaacttggcatgttgcttgaatattctgcaattctcttatggtgtgacttgttatcacttcctcagattgagtggtgatagtgggagtttctaatgcctcaagacatttccttttttctcttttttttttttttctttttcttttggttaaaatataaaacactctttgaaggttaaaatataaaacacactctgaaggttaaaatataaaaaatcatgaaaactcttatgaaaataggtttcccaaagccacacacattctcctttgctctaaccaaaaatcccctactcagacattgatattagaaccaattctaatacctatagagatggcagtcctaagccaaaagtctctccatcctctccttatagtattccaaagtcctactccacaaggctctccaacctctctttggatcgtcacccatcatcactcaccctaagtttgacaactatgatattcttccacatgcaacctttacaacatttctccacaaccatttgctaagaagggctttgttgggagtttcaagccttcttaaaccaaactgacccagattctttgccttactatccatgccccacttcacaagatgtatcttattgcccaaggacttttacctcaaaggaagtctctttgaagtttctccagtcgatgcttcagtctttggaatgacaaacaatgatatattacagatttgcaggctagagagagtgctctacccaaatcccatttgttccagaacaaaaagaaaaaacttccaactcacatgatcacacactttttttaaatctaatttgtacaccaaccttgcatttgagctcctctgcggaacctattgccttgctatcagaatagcatctaaaatctgtctgccctcccccgggcatttttagattccagcatcacctttcccatggccaattctttttaacccttgaacctgtagggtcctttctggattactgaagcaaacatttttatttaactggcccctgatctatgatgcatctgctttttctcctctgttgtgtgtgtatatgtatgtgttctctttaattaccaagaatgtcatttagttatgtacaccaattccactgtgtatttcttttctccaaatctcagttagcaggattattatctg

SEQ ID NO: 12865 - DNA, 4375 bp, Vitis vinifera
  Intron number 3 from transcript GSVIVT01017865001 (locus G SVIVG01017865001) derived from phytozome v7.0 (chr-ID chr5 ; pos 4117634 to 4122008 reverse strand)
tggttaccaaactttgcgaaaagaattcccttcctgttgagacatatctaggaaagatcctggaaagaaattgaggaatcagagattttttttatacattgaattgattttattccttactcatgacaaaataaatttgcaaggagtgccttgtgcctttttcaatgttcaaatctaaaacttttttgatctagcttcttaattcagcttgtgatgaggaagtcatgaatagaatgaagtttaaaagataatttgatttgtaggtaggttatggggtgtaatcccttgacacacttgtagacaacaacctcagcttgtttacatgttgtggtctaaccccttgtcatggatgcctattttgattccaaagaataccttgtttagaagttctgtcataagctgtgtaaatgttggaggtaggttgtcatatgaaataaagggaagttttagctgtaggtttagaatgggtgccccctagagaggtagcagatatgatggttgttaattttcatgggtttgtaggcagtggtaggagcagggctcttttctctgttgctaataccactttattatgtatgatttggttggagagaaccatcaagaatagatagagggcttcggagtctgtgtggatgcagtgtgttttctctcttccctaagggcatccattactccaggatttatcaggtcccagctgagtgtgatgatgccggactggaggaccactagttccttgaggaggaggccaactgtagtgcattttgattgggtttcttctccatcaagcttgttaaagttcaacttcttctctggggaaccctggacagataggaatcagtgaggaatcagtggagtattcagagatcatgatgatggagtggctaagctttttcaaagcttgtagggatgggacttcagttagttattggggataggacttcaggcttaatctgtgggtttcagcaattttgctttggagggtgattcagcaaaagttacatcatgggttttttttcaaaggaagagaggtccttggattcattgctttgtagaatttcagatttgtcttcagagttggatggttttttgtgtagatcccatgattggtgaatcagctagcagattatttggccaagcgtttagaggatgcttgctttcctaagttgtatgtttgttttatttttcattttctattttggcctctttttaggctattgttagcttctgtgtgttttcttttcttttctttttttttttcttttttgtccaataaaaatatccttttgttttgctttgaagtatagctcatcctttttgcacgttttttatgcaatcaaataattgttactgataaaataaataaatcaataaagtgaagtttgttctttgattaggtatttcactgaaaatgccaggaaagattaaaaccatgagaaactttttaattgaagaggccattattttgcccttaacttcatcctcttagacattacaattgaaggtttacttttttacaaggattttcaattcatatcacctaattgtcaagttgctataggttatcaacatcatgtttgtatgtattaaaataggtaattgtttctagtactaaggttaagagaatgctatgaccagactatatatccaaaaatagtttgtaaacttagtttgaaggtaaatttaaaagcccacacagtcaaatagagattggggaataattgcaatatgagatacaagagggagaaagaagtgacttatacaaatggagttgggtcataggattctttcacggtgttattctctatagatgatgataaagattctttggtagcaaatgtgtgggaactgcttgaggaggggggttggtggagttcctaactttcaaggtagtttcataattgggaattcgaaagaatggaagtccttttgggttcgattagaaggcatgaggatagactaggttggaaggatttgattagaagggataaggatgatagtctaacttagaaggatttgaagggtggtggtatgttctttggcaaatctttccacttttcttgagcctggggaagaagcaagtctttcactgcaagcatagtttgaaattcttagatttcaacaaaggtggctttctttgcttaggaagctatttgagaaatgattttgacatttgatcaattgaaaggaggggatgattaatgtcaaatacttgtgacttgtaagatttggttgattcgtcttaaattttttttgcatgatctggtttataataataaaccacaaacattgttaggcaattgtgatgtctgtgctctaactcaatgacttggcatcactagcaataattcaatctatactcttcaccctggagtgtagttaatttatggaagcttgttgaagttcaaaaatagaatacagacaattgtatgtgtgaagcttcacttgggatgctagtggaaatacaatgaaagttgaaaattatttggagatcaggttggtcattgttgttacaaactgatgatatgaactgatatcttggttgggtctccctatatcctcatgctcctttggcacctttgtatttgtgtttgctccttgctatgtgaagtcttccttcgtatggttcagaggtggcacaccctcaaaattttagagactgaaccagacccttttgtggggtgtgaccttaaacatatgatggtcatttgagttcagagaaacagataaggttggagacttaggaatcatctacttagagtgtgtttgacaataattttagaaagtgtttttcaaacataaaaaagattagaaacacttcctagaatcactatcaaacgtactctcggtaaaatggctttgtatattttgtttgattgcttatgttttttctctttgttaatttcattttggccactagaacttcagatcttgattttcgtcacaagaaagttgggtaacagttagaaacccatttccatcatttgacttcatgttgtgatcatttatagtttaatatgtatgcacctaacagcttgtggtgcttcatgttcatccttttccttgagatggatgatccccaaatctgaggatgaatgaatttctccctctagactcttttagctttctgaaactggtttgatctccatatttctggattctgtgaggcagagatattcacttcacttatcataacatccctcttttgtagtgtttctgtgtttagttctcaaagagttcctttattgaggtaacatgaactttaagcttatccctttctctagtgtcctttggagtaatggtggttaagtttgatatgattctttagtacaactcgaatttgatatgtttttaactggtttggatgtcaacgagtataatccatttaacaaatatagattgtttttagattaaaatgcataatatgaattaacctatataataattatgttgattaaaatttaaatttgaaaaaataggttaattgaatcataaatgcatcggggttgtgagattaatcatatggatttaaaaaaaaaaaacataatccgatctaagtaccaaatggattacatagcctattatggtttaataattaggttagattagacggatacaacccatcaacatgaatgcacgaattatgaaaaaaattttactttttaagaaaaaagtcaggttgattttctcaacaatggattttaacaaaccaaaataatataaaatttacattattaaatatagttagaaaaattatccctttctacttctcaataattagccttttttaagaaaaaaaaattatatatatacatgtatatataaaagaaaagcaactactagagtgggagggtgagagtcgaggaatccttatttctttctctcattcaaaatcatgcatgagactttcatcttgcatggttcataagtgataagagaaagaagaattcgttttttttcatttttcattactttccgcgcatatatataagactgaatccattcgatttttgaaaaggattattaatctttaatttttcgagaaatccttcatctatggttgtaaatgactaatttttttaatattttttaccttcgttccgtgataacaagtctagaagattaaaaaatagaatcatataatttgattatatataattaacacgtcaaagtcaattcatttattcaacaaatcaataattaattttctaaaattattttatttaaataatgattattcttttttaagtggggaattttgttgttttttttaatgaatattctaattaattaatatatatactaattttttaaacagcttgataattttgatttttggcacaaatactcgtactaattcagatattaaaaatagtaa

SEQ ID NO: 12866 - DNA, 7077 bp, Vitis vinifera
  Intron number 11 from transcript GSVIVT01021404001 (locus GSVIVG01021404001) derived from phytozome v7.0 (chr-ID chr 10; pos 5004678 to 5011754)
cagacaccaggcggcctctggtattcttatcttctgaagttttgaatgattatcattatgatgaaatgcagatcatgtctcatttttctgatgttctaaatttaaactaatttcttttctattaattggcacttgggaaagaagttctttccaggtcaatggctgtatagcagatcctaaatccttgaacctttgtgaagctggattcaatccttggtctttggtacaatcagtgagaggattgatctgtttcacaaattacacctactataatatgttaccacacttgcaactctgatgataatcaaccagggagatatgttatgtttgattgagatttcttttctattctgttctttttcattttaatagttgtggagttttatcattatgttttatatatatcatttatttctgagaaacctcaacacatggaatatttgtcatatctctgcttatatgtagattactgagaggtatatgaaaagtgtaatggctgaagactacacaaactaaaagttcatagtgtggatagcttcatttcaaccttgaatcttctgctttttatttcttcctttctttccccctctctcttctttcaccttttttctttttgatcctatctaattaccaattattaactataagctttatcatgaatgcttttaacatatttgttttgtttacctatcaaaaaactatgaactttatcatgaaatgcatatgattttacttcctggttttttttttggctaaggtgaaccgaatagtgtcctcttgctgcagaactagttatgtagtctcaaaattgtttcatgtttgctttctcaaaaattcaactggataggactatgttattattagggtattgggatccttcaattttgaggaatagttgaaatattacaatgtatggtttataaaggagaacttttgagtgtcccatgtggattttttttctctccgcataatatctggaattttatctatgattttaatgaaaagacataatctacatttcttaatttcactttctgcaatgactatgattttttgcattccattttgttttctggtagtgtattctttgaggaaacaacaacatctatcaaggttaactcattcttcagaagggaacattacaagggaaattagtgcaacgtaagattaggatggccatttgattgatgtgtttctataatcatttgggaaaggttgatatcctgatgttctatgcaaacttttggtatgatatgcatatgttttttgaggggaatgcccataagaaaccaattatctccaatttgaccacacaaaatcttattattgattatgaatttcgtagatgatttaagttttaatttattttccttatttttccttgtatgctacttatagacttctgcattgcccttttccatttaacacaaactgtttattgtttaaaataaaaatcgttattctattagtatatttattgatgatttctaattgcgtaatttaaaaggtttcggcttgcgtgcacacatgtgtgtgcttgctgatgttgacaaatgtatcaattcttgaatgaaaggctcaaaagttggcatcatcaaaggaacaagatggtaaataaacatacaagatgctaagaaatatactcataaaaaatatgaagtatgagtgacaaggatgccttgttttccctcgtagattcctttctttgtgaatttatttccatttcttgctaaagaaaatcaaaattcaatagtaacatgaacattgaacgtgaagtgaatttgatgcataaagtgatattgatggatgacttctgttgctctcgatctaacacgtacatgataataagttgaagaatagcgtttcacaggaataatattctttcattgagattattcttttatagagcaacatatataaatccttcaaattaggaaactaaatcactgattaaaaggaaagaataactcctaacaattactttcctaaaaatacaaagattgacaactaataaataatttacaactttacaaagttatttctttccatatcagttttggttttccaacactccccctcaagctggcttaaagatatcttccatagccagcttgccaactagaaaatcgaattgcctcttatgtagtcctttggtgaagacatcagccacttgttcctcaatagggatataggtcatacagaccaatccgttgtctatcttctctttaatgaaatgcttgtccacttccacatgtttggtgcggtcatggagaaccggattgtgagctactgaaattgctgccttgttgtcacaatacaacttcataggagatgaacctgtcatctttaactcttctggtaatcttcttatccacataatctcacaaataccatgagctacaactctaaactcaacctcaacactacttctagcaaccacgttctgttttttactttgccacgtaaccaagttgccacctacaaatgaacaatacctagaggtggaccttcgatccactatgcttccaaccaagtctgcatcggtgtaggtttcaatttgtaggtgtcctcgtgacttgaacagaagacctctacctggtgtctcatttagatactttagaatcctgtaaacaacttcaaaatctggtccaggcgcatgcataaaccgactaaccatactcattgagaatgctatgtcagggcgtgtatgggataggtaaatcaatctcccaacaagtctctgataacgatcctggtccttcacattcttggcttttgtaggttgcagttttacattcagctctataggtatttcagcaggcttacatcctaacatacctgtctcatcaagaagatcaagaacatacttccgttgatttacaaagataccttctttggatctagcaaactccatcctaagaaagtattttaatgcccccaggtccttaatctcaaattcctcagcaagtttccctttcagcttctctagttcattgcaatcatccccaattaacacaatatcatcaacatacacaattaagatggctactttaccttcatttgaatgtttgtagaacatcgtgtgatcagcttgactttgagtatatccataatgctttattactttgccaaagcgctcaaaccaagctctaggcgactgcttaagtccgtataaggacttcttcaatttgcacactttcccaactccaaaactttcttcaaaacctggtggaggactcatgaacacttcctcctctaggtctccattaagaaaggcatttttaacatccaattggtgtaagggccaattggaatttactgcaagggacaacaaaactctaatcgagtttattttagctacgggggcgaaagtctcttggtagtctatcccataggtttgagtaaaaccctttgccacaagtctgactttgtatctctcaacactctcatctgctttactctttattgtaaacacccatttgcaccttacaactttttttttcccttggtaaatctacaacctcccaagtgccattcttttttaaggcattcatttcctcaaacactgccaatttccaactcggttcatctagtgcttcttgaatatttctaggtaccacaagttttgaaatatttgtagtgaatgctctatagttgtcagaaaggttactataggagatatatttggcaatgagatgtttagtgcaggctcgggttccctttttaagagcaatagggagatcaaggtcaaggccttgtgcaggaacaattgggactaatcctaaaccgggtttgagtgcagatatttctggacttggaccaaagtgtgatatggtaaacttagatcagtaatagaagaagaagaagcatgtatatgagtaggaataggagggttacctgagacatttagagagccattgcccagggctttcggttgaccatgtgctgggatgatcggctggtctttacttcttccagggacttttttccttgaataaaccacaggctcaagattgtttctattttttttcattcatagtatttcttcttctgacagaccaattttagatttagattcagtaggcttagtttccttattttctttttcaagagagatatcaagaattacactaggtaaaggttcaacaattttccaaaaatttggttccactaatttctcactctgaagtaaatttttggtaaaatatgggacattttccataaaggaaacatccatagttgtgtaaaaacgttttgtaaggggattaaaacatttgtaaccctttttattaggattatatcctacaaaaacacatttttctgctcttgggtctaacttagatcttgacctttttgaaatgtgtacatatgcagtgcaaccaaatttttcaagggtaattcagaattaattcgagattctggaaatacctttttcaagcactccaaaagagtggtatactgtaaaaattttgtaggcatcctgttgattagatatgaagcagttagtatggcatccccccataagtattttggaatattcatgtaaaacatcatagcccgtgctacttctaacaagtgtttatttttacgttcagctattccattctgttcaggggtatcagaacacgaggattgatgtaaaattcctttctcgtttgaaaaggtttccaaaactttattaaagtactcagtcccattattagatctcaaaatactgatttttgtttgaaattggttttcaatcattctgtaaaattctttaaaaatccttttgacttcatatttttcccttattaaatatacccaacaaagacgtgtatggtcgtctataaaggtcacaaaccatttttttcctgaaattgtggttacttttgaaggtccccaaacatcactgtgaaaaagataaaatggttttgatgcatagtagggttttggaatgtaagtttttcgttggctctttgctaataaacaactttcacattgaaatgataaatgatcaaccttttgaaataacactggaaataaatgttttaaataagagaaactaggatggcctaatctgcaatgccaaaccattatttgatcacgaacagaaagagaactaatactacttagtccttgagcaattttattactaggtaaattatcctcgaaataatagagaccattgatcatcctaacactgtcaatcgtcttccccgagctctggtcctgaaaaatacaatgggattcatagaagataacacaacaattagaatctctagataatttgctaacagacaagagattacaagtaagtttaggaacatggagaacagatttaagatctattccctcagagatttttattagactttttcctgcaataggtgagaaattaccatcagctatccgaacctttttatttccaggacacggtgaataggattcaaacatgtttgaggaattggtcatgtggtcggatgctccagaattaattatccatggagtagatttaaaacgacaagatagagcatataattcattacctgtgtgtgccaaagaaacacttgaagtaccggatgtcaagttggatttcagcaatgcaagaagatgctccatttgcttagtggtgaaggggctggtctcggcctcattagcagtaggaataatggctcggcctggtttgtcacttgtttttcctttccaatttgtaggtttcccatggattttccaacagttctcacgagtgtggcgaggtttgttgcaaaaatcacaccaaacccatggtctttcatctgatctgcgctgaaacgcagcagctttattatagcctccacccatggtaaccaaggctgaaccttcaatagcaactccaggtcccttcttgcccagcatcacattcctttgactctcttctcttctaacttttgaaaaaacttcaccaattgaaggcaggggttgtcttccaatgattctcccccttacctcatcaaattcgacattaaggccagccaagaacttgaagatccaattgtcttccatggtctttttatgatgaagtccatcctcggcaaatttccactcataggtgttgaagaggtcaaggtcttgccagatccacttcaaggagttgaagtactttgtgacgttgtcctcccattgttgtatctcaccaagtttgagggttaattcaaagatctgtgattgattccctaaatcagaatacatctgatttacattctcccaaagctcttgtgctgttggatagtacatgtaattagaactaatgtcttctttcatagaattcacaagccatgtcatcaccatggaattctcagcatcccatatagcatagtttggatcatccattgcaggagccttcttttcacccgtcaggtagcccatctttccacgtcctctgatgtacatccgaactgattgagaccatcttagaaagttgtcaccattcaagcgaatcgtggcgatttggacagagtgagattccaaggtggtaggactgatttttgaagaatcagtgatgatgggattgttcagagaaggttgaggagcagtagtggactcgtttgaaatatccgacatggtttcagagaacagggattgaaagagaggaagaaggaggatttcgacaagcaaattgctagctctgatgccaagttgaagaatagcgtttcacgggaataatattctttcattgagattattcttttatagagtttacagcatatacaaatccttcaaattaggaaactaaatcactaatgaaaaggaaagaataactcctaacaattactttcctaaaaatacaaagatcgacaactaataaataactcttaataattactttcctaaaaatacaaagattgacaactaataaataatttacagctttacaaagttatttctttccatatcagtttcggttttccaacataataacatacaaacacattttttctcttcatttatcctgattggtgcttgatgaagctgcttgaacatcattttcttactacagattctttgatctattgcggaataggttggttgcatagcacgattggtgccacagaaggg

SEQ ID NO: 12867 - DNA, 11330 bp, Vitis vinifera
  Intron number 3 from transcript GSVIVT01029450001 (locus G SVIVG01029450001) derived from phytozome v7.0 (chr-ID chr9 ; pos 22739811 to 22751140 reverse strand)
gacatattttttgtgttactatgagcaaaataatgattgatgttatttcctcttttgtaaagaccatatgggtacataatggtgtcagtggaataacatagaataaattgggcacttcctatttttggttgagacaaatggcaacagctaaaagttgatataagagaagggctaatgccttgatctaaggcttgaaaatctcgtatgacagtttcaagattgtttatgactttttcttgggaagttttctagtcacttagatgtgttaatggcgttaatacagtctcatatttgatgttatcttctaaatcttgttagtactaggttttatgtatttaattcaatctcatagttgcttttatcttctaaatcttgccaattttcatatgttccacccatgaacattgataacttactatgagcctaacaaagaattaaagataaggtctcaaacttatggttatagaaaatcaaatcccaagaatagccaagcagagtctaaatcaagtagagttgaaatattgaaaattttaaaactatttagtttgagactccttagaggatgcaaataatgccttaaatctctagaccagaactaacccatgatgactctgttttaaccctcataactttcccctttctagctctatctctcaccactagatcatattcctgaattttaaggtcaaccaagcaatagggaatttgaaacccaccaagtaagaaaaagattagaatactcaggaccactaatgaaaccaactagctctattttatcatagaggaatgggtccatcgagtgactcacattgtagaggaaattctgatatcattttctggagttctaccccacctaaatgacaagtcatacatgcacgctttagcattactttcctctattttctaggcaaccaaacattcccataatttggagaatgatgtagaaaccaaaaacaaccccacaccttcaatctcctagcttaagataaagccctattcattggcccttgaaaagtggagtactccgattttttctatttctataacaaaaaaatcagtgctcgtccccttcatttttggagttcttaagagtggtccccttcatttttggagtttgtaactgtggtaccctccatttttggagttcttaatagtggtcccctccatttttggtatctttaacaaaaaaaattcatggtggcccccaattccatattcattttctttaccaaaacaaaaccggcctttttctttctgccaagctcacaatgaaaataaaataaaaaaaccaaacacatctttaccaagctcaagatgaaaatcaaaaacaataacaaactaaaatacgtgaaaaccaaacatatttacaaaaaataaaataaaataaaataaaatttatgtaaactgaaaagctcataaatcttacttgaacaatgatagaacaagattaaaatttggaaaatactgaatttgagcgaaggatgaaccaaagacaaccagatgcaacgggagacaacaggaaagacgaataagaagacaaaaccctaaaggtaagaaacctaatcgaaaagggaaaggaactgaaaatgattcaaaaccgtagttggtaactacggttttgaccgattttaaaaaaaaatcaaaactgtaattggtgactacggtttcttaacttggactcctacgtggcacagacacactagattgggcattattttggaaatcggtttactttccgatttttttttttaaatatcctattttaggtcaaaacttcgagatagaaaagattatcaaatgtctcttttaagacaatgttaaggagccaagacgtaaccatgttgttgtattaggatcagatttaaactgtaggatcatcggccatgggttgtgaaaaagtgtcatctacgaatttgagcttattctttgcgttgagggccatcatcatggcccaactccatgtattatagttcggaccagtgaggagacgcaaaacaaacaccaagcatagatgattgccgctatgcaagaaaaaggggctattgttgtcctccatgaaagacagatctgattgcactacagtgctaccaaatggagggggtgtgaagggctgaaatctattagcattattatattgaccaccatgagccattttagagagcagctgaggtaagacgctctaatgccatattacaaagggagaatggagagaaaatgatagattctcattcaattgattgatcagaataagttgtagtatagggatataaagcaaagaagccaaaaagctttacatcatagaagtcacgcataaggagttgtagagatcaactaaaaaacaacttaaccaactattggttacaatagaaaagaaaaataacaaaaataaaataggctaattaatatgctaaaaacaagcataacttattttcgctatgttggctttccatgatttattgttccatatcatttgaatttaataaaaataaattaaaaaataatctaattttctaattttataattttggttataaaatgatagcttctatcaaaaaatttgtaaaaatgacttgcatgagcaaagttaacaaatataaatattttgaaaattacttttggttttactaataggaaagaaaaaaaactatcactttttatttaatttaagaaacttttaaaaatagtatatatcaatgaaaattcaggataactaaatctatacacaagcatatatacttaggctatgtttggttcccggaaagtacaaaggaaataaaaaaaatgctaaggaaaatgattttctcatgtttggttgtcctatgaaaaatatcaaagaaaatcaaatataattaaaactaattaaaaacttatatatttttaaattatttaatctttatattgatgagttaaaataaataaaatgagtttgaagtaacaaaaaaaataatttatcaacttttaatctatttttttattttccttcactttttctttccttctacttttcctttacattttctttccctcgcattttccctcaaattttccgggacccaaaggctttgtttaaaggctactaaatgagtagctacaaacaccataatcttttctgtaattaacgctttaagttctaaaatttttggatgaaccttggacagtatgttagttaggttacaattttagaataaatacaaaaaacgaaggttattgtataaaacagtatgttgattataccccatggtcattcataatataacacatcagcattttgtgttatgttggtgttggaaaaatatctaaaagacaacatagataaatacctctagaggaagcttgacaatttgaatatagcttattattataggtctcttttgctgcaaaatctttttgcaatcaagagctacaagagtcctttgtatctttccatcctctaaaatcaaaggtaggtacgaaaattgcttacctaactagaaaaggctccaatcaggggagagaaaaatttgtacaaaaattgttttaggttttaaggttacgtttggttcaagagaatctgaagaaaaaaatagaaagaaataatcaaaggaaagaaaaagtgttaattatggatcaggtacaaaacaaattcaaaatttaacatctcctcattggatgtcataaaatgaattttgaacgttcttctctcaatctcatgtccaagtatgactttatataccaacatgacaagaaggagaaaggtatgccacatatgttagcaaaatatgtaaaccaacacatcacatcactcaaaaaatatctcacaacataaattggtggaacacaatagatcaagcatttttaacctccacaagtaattgcttacttaaaaggaatgtttaaccttaacttatatatatacctatttatactcatatatatatatatgcatgctcatctcactctatttttatttttggaatatttattctatttttaattttagttggcaaatataattcatcttcaatgatgtcccatatttcatagtgtagaagattgcaaatatatactatgtcaattctatttttccaaaattaccataatcacttccattaaaaagtgggctattgattcattaaaaaccttccatgatggatgaacttaattatttaaccatgtttctcttacatacttaggtctatttaagaagtatatgtagctttgataccaattataaagtcaatctacccaacctaagtatacactcgggcacttttaatgttttttaatagatcttcaaaacaataaaaaattgtaataataataaaattgaaatcacaataaaagaaaaggtgcaaagatagagaaaatccaaacacaaagatttataataattcaataattacctataacttgaaaaccttatttaatataaggtgatcgccccaatcattactaaccctgtatcccattccctcgatctgagttgtggtatgtgtgatctcataagccacatatttcgtttctcatatgaaacacatgcaatatacttctattttcttcttggtagggtggctacctctacaagtcaacaattgagtgattcatgcccaaaagcacctgatatttcacttacttggcccaagattggtataagagaaacccttgagttgggtggcagatgccgttcacgagtacctggaaggagcagtgacaaaggagcatttcttggggctcattgactgggtggaggctcatcgtccagagcctgctttagaaaagatatactgcagtggcagcagcgatggaccggcatttgtggtatcatcagggaggacattcccagcctcaaaggtggatttcgggtggggtaggccggctctggggtcataccattttcgatgggatggggaagctggatacgtgatgccaatgccaagtccggccagagatggtgactgggtggtgtacatgcacctcttgaaagggcagatagagttgattgagactgaggccgcccatgtctttagacctttaacatctgaatatctcaacttgatcagctgaaattggcttacatccatatgacttcttagattcttcatccctccgtcttatagtttatcaggtccttctaatttctctttccaatatggtgaatgtcttggtcataatatgaagagtgaatttttggagtgatataatgaagttctgaggattgtgtatgataatggtaagaccctaaggagtactattttcttctttctcccaaaaaatatacacaaaactcaacaatgaaaaattgatttcctctttccgattcactaacctttaaagctttagttataggttataagctccagaattcatgatcttaacgaagtatatactgaaaagaagaatttttgaggccctaccagctttgaggatcacggcccacaaaaggaaacaaagtatatctaccttttcaattttaatgtaaagtgagaaaaactattacctcttcatatattttattagttgaggacttacttcaaaagttgttgacaaatacacttaccactttgttttttttttttctatttccctcatatcaactctctcacacattctcacctgttaccaccttcctactttttttcttttttctattttccctttttccatcccttaccatcatattcattaccacatattattatattagaaaaagtgagttttgattcactactataataatatatgaaaaaaggaatcttaaattttttaaaattactattatattcatctatttaaaaataatttgaaatacatacatttttaatgtatcatctaattattccctagattggacctttttacataaatatttccctttcttttagatttattattattattattttatttagaatttttttttttttcactttctaagaggtgtttgtttaatttctagaaagaaaaaaaaatctcaaataataataataataaacttagggaaacattcacgtggaagagtcttgtgaattaatgttgatgacatcacaagtaaaatgactattttaaggaataattagatgatttatttacaagtgcatatatttcaaattatttttaaacaaatgaagatattaccgatttaaaaattttgggattcttttttcatatattttcatattagtgagtcaaaacccacttttccttatcatatttcttattattatttttctctttttcatttgacatttcttttaatatgttcatgtattctctcataaaatttctttaattttaattatttttggacatattaaattaaaatgataatataaaataaatagttaatataacaatttaaataaaaacacaaatatataatgaaaaaaataaaaatattatcccataaataatatacttgatgatttcaaagattaattataataatacatttgataaattaaggtttaaatttaaaaattatattttattatttataggtttatgatattatttttattattatcattaaataaaagatttatttattttataaattctatcacatgtaaaagtaaaaatatctttgtaatactattttactatttttattatttttagttttgctttaaatttattatatcaaaatttactaaatgatggtgcttttatctttctttttttagttttaacttcatcatggatctaactttttgtttggttaaaatctttaattttttaaataaaagaaaatatatttttcattaaaaaaattgtatctaaccttttatattaatttcataagaaataggtacatccttaagaaaaataagtacatcaatttctagggaaattgggacccctatctcccttatcatggtttatttgttcatttcaagaccttgataactaattgaaggtcctcccccaccctagaatgaactttggaaccctaagtacattcttaacaaaaattgacacatccattcctaagggaaccgagaccccttctcatgatccttatattcgtttggagaccctcaggaagagattagaggttattccccaccctggaactaactttgaaaccctaggtacatccttcagaaaaattggtacatctaatcatcgggcaattgaaacccctatctcccttctcatggtccatttgttcctttggagaccctcaggaagtgattggaggtcattccccaccccgaaatggactctagaatcttaggtgcatccttaagaaaatttggtacatccaatccttaggctaccaagacccctatctcccttctcatggtccatttgttcctttagaaacccttggtaagtgctaaattttattaaggatgtacctagggttccaaagtctatttcaaggtagggaatgaccttcaattactttccaagggtccttgaatgaacaaatggaccatgggaaaggagataggggtcctagtagcccgatgattagatgtatcaaattttgttaaggatgtattaaattttcttaagaatgtacctaggatttcaaagttcgttttgaggtagggaacgacctccaatggtttctcgagggtcctcaaaggaacaaatagaccatgggaagggagataggggtcctggtagcccgaggattagatgtatcaaattttcttaaggatgtacataggattcccaagtccactctggagtggggaacaatcttcaatcacttcgcgaaagtccttaaaggaataaatggaccatggaaaggaagataggggtcctaatagctcgagaattgaatgtacctagggatggcaacagggcaggtcatccctatcccattcccgtcccaattatataatgtttttcctattcgcatcccaaactcaaggcagggcgagttagtgtcccccgtacccatttacaaaagagttgataatcccatccctgtcccaaatgtgttttcgggatgaagcaggtcgggtaagagcggatcggggtaggtatattgcaactatttgactaggttgaaaaaaaaaattattctactattgtcacaacttgaagccacttatctatattatgttttttttttcccaagggaattatgtctctggcaacaaatagatcctattaaacataacatgagtctttagaatttcaataaacactatctaggttctcatatttaaactacaaagaacccctttcaaaatgatttgcactccaaagacacctatgttatgttgtctcttcatccacatttaatcaagcatttgttgtgcaacaaaactgaaaatgcccatacgaggacaaaatgcatagatctacaaataagcaacctaaaaaatctcaaatccattaactaaaaccagaaaaatatgaaaaacaagtcatatttctaacaaagcctcaaaacttagggttttcttacctggaatggaggaatccatagaaaccctaatagtttgttgtctacaaatatggtattttggtttttagagcaaaaagtgtgtttttgggtgaaacgggaagaagcaatttaggaagaagtgggaaaacgagaagaaatgagaaaacgagacctctcttaccgtcttacaagcaaaaagaaccttataaatttaggaaggaacgattatatatatggaggactttttgggtattttgtaatgttataagggtaaattagtaatccatatatggggcaggacgggtaattgcaaaacctatcccggccctaaacctgattcgggtttttatatactccccatatccattctatacttgaatagtatagtctcatacccgtcccaataggggtgagatgaggcaagtgaccctatttacccgcaaaattgtcattcctaaatgtactaaattttctaaaagatgtacctagccaaagtttgttccgaggtgggaaacaacttccaatcacttctcgaggggtccctaaaggaacaaatagactatgagaagagaaataagggttttggtagctctaggatattatgtaccaaatttttttatggatgtaccaaatttttttaaagatgtagctaaagttccaaagtctattccaatgtgggaaacaacctttaatcgcttcctaagggtcccttaaggaataaatggaccatgggaaggaagataagggtcccaatagcctaagaattggacgtaaaaattttcttaaggatgtaccaagggtttcaaagttcatttcggggtagggaacaacttttaatcccttcccaaggttacccacaagaatagatggactatgagaagggagatagaaggtctggcactcttaattgggattagatataccaatttttcttaaggatgtaccgttttttcttaaggttgtagcaatttttcttaaggatattgttagggttccaaagtctgtttcagggtaagggggggcttccaatcacttcttgaaggtctctaaaggaatatatagaccatgaaaaggaaaataggggttccaattccccttgaaatggatgtaccaatttttcttaaggatgtacattgggttccaaagttcattatgggatggaaaagggcctttaatcactttttgagggcctccagtcacttcctaaaggtccccaaaataatatataaaccatgataaatcaaataatggttccaacttcctttgaaatggatgtacctatttttcttaagaatgtatcttgagttccaaagttcattatgggatgaaggaggacctttaatcactttctaagggtctccaaaggaatatatagaccatgataagggagataggacctctaagaatggatgtagctatttttcttaaggatgtaattaattttctaaaatctgttcgaaatttgatttcaagggtgaggtatggtcgcaaatcactccccaatgtcccccaaacccaattcaccctagaaaaatgtatgtattttttattttttaagaatgtatatattttgatgaaaaatgtacacatttttcttaaggttgtacgtggggttcaaaattggatttagtaacaaaatcatctaaaatttaatattctttaaatatttgatttcatgaaggtgtatgataaactttattaatatattaattctaaatttgtattaagatcatcaattatattaaataaaattatattatgtgacataaaaaatttcatagccatatatttaacaaaaaaaaaaactttgaagttatatcaaacatgtatgataatgacaaatatgaatgactagaaaatttaaaataataataatataagaaaatttgacaacaagaaatataacttatagattatataaaaaaaaatgaaggaaaataaaatattatttttaatcataaaaattaacaaaagtttttgttttttaataaaaaaataattattatctttttactctaagtatttacacactcttttattcttaaaaattataaattgaatatttaaaaaaaactaacaaacttcaattttttttccattgtatttttaagttatattttgtgtgctctatgattatctattatatgttatcatttttttgtttaatgggctcaataaaatgattaaaaccaatatatataaaaagatgaaacattacaaaattgaaactaaaaaggttttaaaaggagaactatggtgactttcatatggagtgaaaaaaagaaaaagaaaatgatgttaaacaataaaaataaataaaaagcatattagagatgaaggtgatgtagagagttgtgattcttttgtttttttagtggcttatcacgtcaagaaatgacaattgtagtaatactattcaagtgcatgctttacacaattgacatgaaaggtcaagaaagggggtgcatgttttacatgattggcataaaaggccaagaaaagacaactgtagtaatactattcaagtgcatgctttatgcctcatgttttatgacatgaaaattgaaagtcggagtttttaaaagcctcatttttctttttattagtgattgaaagcatgattttttcctagtttctactcgcttgaacggtcaaggtattctaacatcctgcttccttttggagtttctaattttgtttttcatgctttctatacacttgttaaacatttcataatcattccttaattagctctaacaatttcaaacacacacataactcatagaataatcaaccttaaatttcaatgacatcagtaagatccttggatgcaagatgccccagacttcattcaaaaatggaattaaattagtgttaatgaaggatttttttttttttttttttgttagagaaaaataaagttctttacgggctttaggagaca

SEQ ID NO: 12868 - DNA, 2362 bp, Vitis vinifera
  Intron number 12 from transcript GSVIVT01028992001 (locus GSVIVG01028992001) derived from phytozome v7.0 (chr-ID chr 5; pos 10302628 to 10304989 reverse strand)
ttattgcaccatcctgctataggtaatgtgtttttatttttttcggtaccatttagcaatctttcaaatatttaacgagaatgtgatgctacaaataacaaaagccttgatcatttgaggcttaaaaggaaaaaaattgattgagaaggaatgctatttttttgtgaacattatttatctatcttttcatcatgcttctctcttggcaagagatttatttttggtaggcaaatagtaaatatattaaccagtgcctaaaaaaagggttgcaccctatgtacacaagaagtgtaaaaagggcaataagaaaagaaagaaaaaacaaaaaactgctagacagaatagccatatgaaaacctaaccatccacaattaatgctctaaaaatctgatacgtaattctcctatcccaatgaagcaaagaaattgacttgttgctgaaatatcactggtagacaatggagatgaattgcaatgaaccttgctagtgatatcatctcttctgaaagttttggttgattaataatgttatcatggtcagaaaataccaattggtcatgttaaatgcatttgatgctcaatgttttggaaaaggatgatgatgttgaagtgcataagaaaggaagcattttttttttttttggcttgtttttttagcctgggaagctgtgtgggaaggatcctagccattaatccttatgaggagaggatggttgacgatcaacaaattcagtctttgtcaatgaggaatcagcaaacaacatccttatccattgtgatagagctagaaagttgtgggacatttgctaacaatttttgagttgtaatggatgttaccagattctatgaaagagtaccttttggtttggaaggggaatgatatggataaaagactgggagaaggtctggagcatggctcctttttgcttgttttgaagggtggggtaataatgccgtatctctgagtaagttgttgaacaagatgaaaatggccagtagacttaatctgaaaaaggaaagagcttctggtctctctctgcctctctcttgcacctacgcacacatgcataagccgcatctagcagctgttataaaccttatgagtcattgtgaatctatgggaaagagtgattaaggctaataacaccaaggtgtaaagcaaagcatgagcactgaaaaattaggtcaattatctgataaaaaaaaaggtcaattatgtattggggagattgaccaagaaagtcatttactttagggtgtgtttaatacaaaggaatgtaaatgaaaatgagaatgagaatggagttgattctcaagatcctcacatgagtgagttttgatttccatgaaaattattttttgattcataatctaaatgcagtaatgaattagaaatagaatgaatttagttacgagctttagaaacagtattggtttttgaaaggattggcactaggccaagaacaatgacatggctggttctaaggagataatatgaggtggtttgcacagcctgtgcctgtgatattatctcttaaaaggcaatcacatatcagatcaactagctatgatgggataagacatgatgcccttacagttttcatgagacatggaataacatgatagaaactctcatccttaatttaggaattttttggaatacttagttattgtttcctacatttctaacccatctttatacaaattatgaccttatcaatgatataacaaatcctaaataagggttgttaatgtgtcatgtcgtattccaattacatgtgaaactgtggatgaccactgatcacggggtggaaaagtgaatcctagttgcttaatctgagaaaatgcccaatcaaacactatagatgctcccttacagtcccaggtaaaagaattaacagaatcttggcaccttggcacgtctagatgcttgcctagtgcaaatttggccaagctgatatttgtgcatatttgggtgtgtgtatatacatatatatatatatatagagagagagagagagagagagaggagcctttttgacagtgggtgtataggtcctgtataccttgagtcactcttttggcacctcttcttaatatattctcctttatctatcaaaagaatatatatatatatatatacagagagagagagagctggtacatcattgcctttacctcttattgtgccactggtcttatgattattcatattgtgaattgtttttacaagttgtttcaacttactttttttgttaatatacaatatttctacatccattcatttttgtgttttttcctattgaagctttttctaacatgttgaagttttgttgtgtcatacagctgttttgactacacaa

SEQ ID NO: 12869 - DNA, 4213 bp, Vitis vinifera
  Intron number 5 from transcript GSVIVT01036311001 (locus G SVIVG01036311001) derived from phytozome v7.0 (chr-ID chr1 8_random; pos 3686818 to 3691030)
gaacatttagaacaccctcttgcaacacaagtaactcatgctttataccgcccattaggaaaggcttagagaggcttgaggcaaggccttactaaagggaattaagctgaattcccaacttgtgagaaacaagaaaatagaaaaaaaacacacgccaaagaaaaacaatcacacgcacaaaacaatatttacgtggttcggcaatttgcttacatctacggagttgtagggatatcaccattatcagggaagaatacaaaatacaacactagtggctacggacctgcctaagctctcataggaagcgaccctaccttcactctcatataggtgaatctatcaagtatgttctgcatttaaatataccatccataaggaatatgatattcattaagagtaaatactcaaccttaatcaatgcaaaatacgttctatctacactataggaatagactctcatataattagagttaatagagttatgaaattcccactccatacatataacgtggcaaaaatttcaaattattgacttttgaccaatttttctaaaatttctcttaattaaatactaacatgtggatcttcaccactctttttgacctacaaatttatgaaagattttatgctttgagaatttgacgtgtcctaaaaaacccgattatttcaaaactcctgcacctattcattcttccctaccacctctatctcctagttccaattccctaccacctgccactacatcatctatccagtttctacctcctctaattcaggatccctctactgcctccccctcctctgctccacccttaccttccttccacaatattgatcccatggtaacccgttcaaaggtaggcatcacaaaacccaaggctcttattgcatctactcccactgaaccctacacttttcgacgacaggatattaaggatcctcaatggcaactggcaatggatgttgaatatcaagctttactccgtaataacacttggtctcttgttcatctcccttctcatgggaatattattggatgcaaatgggtatttcaatattgatcgtcacaaggcttatcttatggccaagggtttcacccaaactcagggaattgactatttttataccttcagccctatagtgaagccgaccaccattcttattgttctcactcttgcactttcatcccaatggcccatttgacaactgaacattcaaaatgcatttctaaatggtgaccttcacaaccaggtcttcatgcaacaaccccttggctttgctcatcgtcaacacccatcttacgtctgccatcttcataaagccctttgcgggcttaaacaagctccaacagcttggttccacaaactcagtgcttctcttaccacttggggatttgaatcttcttgcgcagacacctctttattcttcaaacatgcaacatctaatgttctcctcattcttgtctacgttgatgacatcctcgtcactagtagttgtgcctctcaggttaccttttttatctctcagctcagctccaccttttctcttcgtgaccttggttccctttactatttctttggcattggggttactcacagtactgattctcttcatctctgccaacaaaaatatgtgcatgacctactcactcgtactgccataactgatgctaaacttgttcttacactgggttccttggccaagcccctctctctcactgatggtgatctacttcatatcgcaacattgttggcgcattgcagtatgttactgttacacgtccaaatctttcttttgccgttaacaaggtatgccagtttatggcttccccaacgaccacccactagctggctgtcaagagaatcgtccgctatcttaagggcgcgtcctctcatggtctcttacttcatgcttctcccacctttgaattccaaggcttcacagatgctgactgggcttcttgtctggatgaccatcgcagtaccaacgactatggtctcttccttggctccaatctgatttcatggtcatcatcaaagtagaaagttgtgtcccgtagtagtgctgaattggagtaccatgcccttgctactttgatagctgaaattacctgggttcaagctctcttgaaggaactttgcatctcaccatttgataatcccttaatatggtgtgacagcaaaagtgttggcgctcttgctgctaactatgtcttccatgcccactccaagcatatcaaacttgatttacatttcattcatgacaaaattcttctgcatgatcttgccattcagtacattccatcctctgagcaactagcagatatcttcaccaagcatcttccaagtgctcggtgcacttgcggggggtgataacagtcatataatatctcagcagaccccacgtccaactgaatccaaacaactctcaacctcctaactccatctattatgtagttagacttattgttacatcagttagagaaccactagtatattagctccaaagtgtaacaatgaaaatgattaatgagaaaatattcaacctcttataggaagcatgtcttctacccatgaagcactttagaaggaatccaacttttgttcaaccttggattcatcttacttaatagtgggtttccctgtccttgccccaagtgggcactaagtatttcaactattttgacatgttcaaaataaattactaagaatttaaagggaatttgtttgacaagtacttttttttttaaacatgtttatttatacattgtttagtttaggttgcattattttatgtaaataatttattgggtatgggaattatttttataaatggctgagtagattcaattttaaatattaatttattgagcatgaaaattatttattaaaacatggtttaacaactatgtgatggaattaccttgttaaacaaaataaactaatactatattattttagcttaaattatttcttgatggttgcaatgttgaaaaaacaaatatcaataaagactaaccttaacgagaaaaatagtaattaacataattttatattgacttgtaaaattgggtcaacatataaatatattgatggtaacaagaagacctacattgataatgaaaagaaagttcagttaaagatactataaattataattttatttaaatctattttcaaatttaattttaattttatctaaaaatagttaatagagttttggttgaattttaagactataagataagcaaataaatgaaaagaaagttaagttaaagatactataaattatgattagaagaataaaaatcaataaaaaataaataaaaatagtggttttatcttaaattagaaatattaaaaaaaaaaaaaagataaatgaataatatattgaaaaatataactttgtggtagaagagcaatgactatgctctttggaataccctagtttatgttcattttttaaaatttaaaaagaataaacatcttttagatattaataaaaataaatttaaatagattcttaagataaaacctaaaaaacatttgttgttggccaaataatccaactatgagcccttttatgacaagtgaaacttccaaattttctgaagaattttttatcttagcattaaaatctaaatgtagaatatatatagtacgagttacctttttaacaacttattatttattttatttaatttaataatatacattaatataaattatagttgacttgagtttttttttttttttttttttgatttggcatatgcttgtattactttgttagcttggaggacgaaaaacctatacaaataattagttgaatgaaataataagcgagtgaattgtatgtatcaatgaaattgtaatttttagattgcaaaaataagtacatacattaatatatatgaaaatatatagtgattatgacatttgagaacctatttattttgaaagatgggaattaaacttcgtaaaaattaagatggattggaagtaattttttttgttacttgaaatgtgtacaacttcttccttgtagtgatgttatgtgtaatagaacttccatgcacaatcgttttcatgattaggaattgaattagagaaattagattttgtagaagattttttcaaatttgaaaaaattgcatgtggaagagttgcattggcaaggaaatctacacactcattgaacagtctaggcccac

SEQ ID NO: 12870 - DNA, 7073 bp, Vitis vinifera
  Intron number 3 from transcript GSVIVT01021548001 (locus G SVIVG01021548001) derived from phytozome v7.0 (chr-ID chr1 0; pos 6909678 to 6916750)
ggttcactttttataagattcctcaagtggattctgtgagttttcatcttatatgtacttttcctttctatcatcgatagttagaaagtcaaataaatgttctccatttgtttgctctagaaaagaaagaataagaatattgattattgtcaagcattaaggtgtgtgcatctttaaaactacaagaaataatattttgacatttcctaagaatcacccttttttttaaataagaaactatgctagtattcttgaagtaacagagaacttctgcctaagagaaaatgtacatgttaccagtaggcttgagagaggggaaaaaggctcccaataaagctccacccacaaacccttaacaaggctcccaaaatgaaagttttaaaactctagcaatgtccaacatattccatacccaataatcataccttcattacctttcctttcatgagtcatccaagaaagtcttttttatcgaaagatcagaggcttctaattcaagctccacccaaaaactcctaacaaggttccccaacaaattaacaggagagatagctcctttcttgccagtctattgtcattccaatgtgttgatttagatttcaagaaaatgaacattttaaaacactagcaatgtccaacatattccacgtccaataatcataccttcattatctttctttcatgagtcatccaaggaagtcttattcatcgaaagatcagagcctcctaattctctttctaattttggggccttcctactaatgtcagtttctgtgctttattggctaaccaacaaagccaattgccttctacaaaacctcagaaaatcccacatttgtactcttggaaaaggctgccaattctcatctgagtcaggttacccaaggcacagtcttgaaaattaagctttaggatacctattggtggagaagccaactcagccctaaccttcaccacttccctatgtcagaggcagatggatctccaattgaacaaattaatgctacaaggggcttcagaaagcttctctgtgattgaaatgaccctatcttcatgaccttttcccttcatgagtaatctaagaaacttctattcctcagaagatcagaggcacctgattctcttgctaatttcaggccctctagtaatgctagcatctatactactgcggctaaacccaacaaagctctgccttctagaaaagttctcagaaaacctcacctttgtaatcttggaaaaggctgccaattctaatccaagtcagattgcccaagttgaagccttcaaagtttacctttaggatgcctgttggtgaaggagccaacccagccctaactttcaccacttccctacgtgagaggcagatgaattgccaatctaacaaaactaatactgaaagaattctagaaaacttcttagtgattgaaattaaaagagttgtgagaaaacagattttctcgcatggatctactgccaatttcctcatatcatcaaagatcctaatatttgtttccaaccaaataacgtcaaagtagataggacagcaaatccatggtagctctccaattaggacccacctcaaaagaaatgaccagggaatcaggcatacctccatgaggcatgccatgctagcctcattatgacaatttatctctaccatggttccaatgctagaacagttctcacttccaccaccaaatttgtctattatgtcttagtttcagaattggtattaatgtgaatttgtcattaattatattgttccttaaaggaaatgtgtttggaagtctagaaaaaagggggaaaacaatggaatcaagagatggacattgatttgatgaaccgagtttctgtttaacttctgtacagagttggaatcttgcaccatgcaaaactgaatcgaacctacaatcatatctctatatatacactcaattttgatgctaattgatcgaacaaaaatttttgatacactaacagaattctaactaaatgaagcttcaagaagtgctatcatggaagaagcttttggaagtgcttacatggcagaagctattaactaggcatagctgagattgtcttcgcatgccccctcaaacaaagggggaattccttcaccttgagttaggacttaagctttaagaatcaaatgattaaaagtggttttgtaaacaaatctgccacttgatcaactgaaggcacaaatcatatatctaatgccttttgaaatactttactgcgaacagaatgcatatcgatttcaatatgcttagttctagcatgataagtaggattagcagccagtgaggttacaccttggttatcacaccagataactggtttaatccttaattgaagtctcaactttgttgcctaagacttgagtcaaattaacttggctactacatgagctaaagcttaatattctgattctgtgctggactaaacaacaacactttgtttctttgaactccgtgagataagattagctcctagatatacacaatagcctctagttgatcttctatcctccagacaactagcctaggttgcatatgtgaatcgcacaagatttaaagatttgttggttagaaatgcaaaccatgaatgattgttcctttcaaatagcataacacccttttcacaagctttccagtggatcttctttggagatttagcttgctaactaagtatgagacatcatgtcttatgacagtaacatattgcaaggctccaattgtacttctgtatgatgatggattttctaaaggatcaccatccgatttagagagtgtttttttgaaagtgattggcgttggtaaaggctttcttgtatccatctttgtcttctggagcaagtcgacaatatacttggactgagttaaatagagacctatttgatctctgaaagcttcaattcttaaggagaaatgcagagaaccaggatcctttagaagaaaactctcattgagatcatgaaccaatacccgtctctatttccagtaatcaagatcttgtccacatgcaccagtaacattgagtctactcctttggacttgtataggaacaaagatatatctgactttaagttcttagagccccactataataatgcatctttaagtctatcaaaccaagcacttagggtttgtttcaaacaacacaaagctttctttagtttgcaaatatgattaggcttgataggatgaatgaaacctgagaaaggcattttttaatgttcaacctcttaatctcctagccttgagctagagctagggttaatacaactctaatggtggtaggtttgatcataggactgtaagtttctaaaaatcaacacctgaagtttgatggaatccctcggctactaacctagccttatgcttattaagggtgccatctaggttaaactttaacttaaacacctacttattaccaggtacattatactaggattgataaggtaccaagtcccatgtatgattcttcattaaagccttgtattcttcttccattgctgccttccaacttagatcagcaagaacttgctttacacacataggttgtgtggcttaggaatgttactatttaatttcatgtacttcttttctctatttgtcgacattgcatgctttcttgaatttaacttaataatttctcatgtggaaggattttgggtgacgatggaggttgtctaatgcattctttttaagctattcacatcaagaatgagttagtagaaaggcaaatattgatgcaaaagggagttataaattttgaataataaccttacactacaatgttgctttcattaatatttttttatacattgattttattacaccaatacaaattgaccaagaaagatgtaaattgtaaggagttgtggacgttactacttggttgcatgagtataagcttcataagtaatggattaggtttccttacttttcaacctgtcttggtcataattcatggcaaacctcttcttgccatcaattggtttccaaggaatcttgagtcagttcaccaaggattgatgttagactgaaagtttgtcacaaaatattctcaatcttggatcatacttcgattttcaaagctgacacagttgtgacaaggcttgcttgttctcattctctttgtctcttctctttacccaactcaactgacacacatgaatagatctactttcacttggcattttgacttcaattctcctctcaaaatttttgagtttgggaaaagaggtgaactttgtatgttaatcacataaaactgaattctttgtttaatactagatgattgactaaagtgatggctaatagggtcaagaaagtgatgggtaaagtggttccaaatttcataatatttttgtggagggaggacaaattttagatgtggtgttgatagcaaatgaggcaatggattcaatgctaaagaagagagattgtggtttgatgtgcaagcttgacattgagaaagcttatgatcatgtgaattaggactttttgctagctattcttgccaaaatgggcttcgggcagaaatggatgaattggataaattggtgtatcttttcaaccaacttctctgttttaattaatggctctcccacaggtttctttcaaagctcgaggggattgagacaaagggatcttatctccccttacttgtttgtgattgctatgaaggcccttagtagattactcttgaaagttcaagatgacggttttatttcaaggttcaaaggggttggggtgaggaaatctctcatctcctttttgcagatgacactgttgttttttgtgaggcctcttaggagtaagtcagtaagtcactttcttgtgttgacttctcatgtggttcaaagccatgttggggttgaagattaacttggaaaaaagcaagatgattccagtaagggagatggacaatgtggaagatttggcttgtgaaattgggtgcaaggtgggaaagttgtcttcttcttacctagggtttcccctgggggcatcttacgagtctgtggcagtttgggatggggttgaagaacggtttcataagaagctttcgttatggaagagacaacacctctcaaaagggggaagactcactttacttcgcaatacccttgctaatttaccaatatattttaagtctttgttcaacatcccaagaattgtaaggttgagattagagaagattcaaagggattttctatggggaggaggggccttagagaacaaaatgcacttagtcaagtggtcttccgtttgtaaagcaaaaccgaaaggtagattaggtgtttgctctctttctttgcttaataaggcccttctttgcaaatggtgttgacgcttctctagtgaaagagattcactgtggaaaaaaatcatacagggaaagttttgggaggaagaaaggggttggaagtcaggaatggtcaaagagcccgatagggttggggtttgaaaagagattgggaagcaatgggatttttttaatacaaagatttcctttgaggtgggtgggtaatggggttagagtgaagttttggaaagatagatggtgcagcgagcaacccttatgtgagatcttcccttccttgtttgctctttatgatttgaaggaggcatgggtagttgatttttgggagcaaagtggagaaggaggaaattgaaactttcattttgttaggaatctgaatgattgggagttgagtgtcatggagagatttctttctaagctccagggatagacagtgaagagagagaaggaggaggatagagtggtgtggaaggaagatattgtaagaaagctttactctttgttggagacgaattataccactcttttccctttaaagataatttggaactcatgaattcctttgaaggtgagtttttttacttgggaggcttgctggagaaaggtttgacgttggatcaacttcaaagaaaatggcggatgttggctaatgagtgtgctttgtgtaaagaggagttggagtccattgataatagccttccttcattcaaacaaggcaagaattttatggcaaccggtgttctccatttttggtgttcgatgggttttatttgagtcaattagggagactctccttgggtggtatgactcttttgtagataggtgtattaaggcttggagagccgctctttgtattttttggacgatttggaaggaaagaaataagagattctttgatagtgaggaattgcttgttcaaaggataaaaaatattttccttaacaatttctctatgtaggttagggtgtatataagcggtgggtatatgaatatggttgacttcatagattggtcgagatctggttgagggagggagtattttttgtgtattccctctttccttttttggccaagtgcattttgtatgcatcctatgtactcttatgcacttttaacacttattaatacattctcttacttataaaaaaaaaaatgatatttcttttttgtagtctagctgaaattcttaggaaatgaagttgggttgttctctttgtgaacaaccgctgcaaacctgcaggaaattattttcagaataatttttaatgtaaattgatttcatttttcaattctctgtttctgattttaggccaagcactaaactgtgccttttagttgttttaggtcttttcttttttatatagtttatattttatttttttacctttcttgatcgaaaaagtatgagtagaacatattgcttttgaggattagccattttggcaatctgaaattttgaaattcaaaagttcctactcgagcaaaaattgatcatgctcttaccattagcatgaagtaatatagaatttgaaaaattgaatgacattatgattttgatactgagacaatcaactcaaacatgtgaacaataaatccatgttggatccttgtgattttgactttttaatgcaccattgttgtaagttactgacattgctctcagttttcttggtaactgaaacctcaccttgctgataagataaggaactgatttttgtataaactgcagataattttgactc

SEQ ID NO: 12871 - DNA, 2017 bp, Vitis vinifera
  Intron number 11 from transcript GSVIVT01026351001 (locus GSVIVG01026351001) derived from phytozome v7.0 (chr-ID chr 4; pos 14679711 to 14681727)
ctgaaggcatgttcgcgtatcttgtgcttacatcctactgcatttctgattctagtattatttcacattatacatcatctttcctcatctatatgaattactcctagttcagttggtctgtttagtttgtatttatcattttctccccatcactatggttccttggaattgcatatgcttagttgattttttttttctggagttcagctaattttttgaacttgttagtctgtcattcatggatgaccattggcatgtcgtatcagtggaacaaatatagaggctatctcaaaatccaaaatattggaactgtaaagcacctcctaattttgctattccttttctttaatattgagtacagaacccatgtcagaattgaaattttgaaatggctatgtaacgacaaactactaaattaacatttccttttttctgatgttgaatatctaacctgctttccaattgaaaccaatatcagtattcgtcaccattgtttagcaaagttcaattctttgggggctgctgtgtcaaataactggtgtctgtgatggatatcatagcccattgaattctaacacactgatttggctgaacttccttaaattgatgaatttaagatgttcctgagattttttttctttgtcttaggtaaagatgttatttattacccttgttttctctcctctccctttcctgtttccatttgttccttttttccattacttactgcacacgggaaaccagctttgtctattataaatttgaagaaacattctgcaatattttatggtataacaggtaggtctctgcaaggttctcatgtacatccaaataataatttagtaatcccaaaagctactaaactatatgtttatgtatatacgaaaatgaatatgaaaattttttattaccatctcatgagtttctcaggacaggagggggagtatggggatgagatacaaggatttggaagatcttaaatgtcaagaaagagattgactgttgcttttcttggatgtggaggtccaccaattacgtagtaggttggttggctaagagaggagcattgttctgtagacatgtttgtcaaggacctcctacttccctacggtttatttgggtttttggtgccttgctagtgttaagagggtgttgagactctcatttcttgtgttggtgctgatattcattagttctttcagttttggctgaagaataaccaactttttctttccactatataaattttcttattgggaaaaaaaaattcaacaatttttattatcattttgtttattctgtggttgtcaaactatagcaaaaattcatactaataaaggtttcaagaacttattattgaattgagcaatatggtaaacatccttagcaggttattgttgtatttcattcttctgttttataaattgttaggaaagataatgaattgtcatacatatggataaaggaactttctaaatctgcaacacttgtaggcataaacttttctttttaatgttatgtcttgtcatattttgctactccaccaggtttcaatcgttacttgcatcttgtgttttagatatttttgttgaaactgaaattcagtgccaaaattgatgtatctattgacatgtctgcatttcgaacctcgagttctccatgtacacctttgaaactttcactacaatgaaatgttgtatttatcattccatgctgcatttacatattgatatatcatgtggcttccctaaggattctgtagaaagactgcaccaaaaagaatctgttttctttggtcatcctgatactgaatatttgctgttgccaaaataattcccttttatctttctccttctgagctaatgcaccaaaaagaatctgttttttcctatcaccctgatactgaatattcactgtagccaaaataattgccttttatctttttccctctgagctaaatcaaatattgaattatatttcaggtaatagaattgggtgggacaccaactattggaga

SEQ ID NO: 12872 - DNA, 5707 bp, Vitis vinifera
  Intron number 17 from transcript GSVIVT01000635001 (locus GSVIVG01000635001) derived from phytozome v7.0 (chr-ID chr 13; pos 20244490 to 20250196)
cttgaaattcttaaacaaggtgcctaaaggaaaaacaagaatatagatccaagactgtgcacataccctatattcagctacatcacttgttggactatatgagttggaattggattctactttccctgctcaaccatagaagcagagaccaatattcccttcttttttcagccaggtatgcctacctaatcacaaatacacagctctccttaagtatatctgaaagttaatatgtgccatcccttctaacacaatatttgtatggccaacttaattaattattttttagtttctccctagatttttcattgatgatctcattggaggtgaattttgatcgcaattatgtattggtgttctcttgagctttgttccttatattgctcttttttcctctgttccatgatcctgtcctactttccaaatcatatctacaatatgcatatattttatgtacaattttctgggatgaaagatatttgggtgacatcacctttatatagttcaagcacaatttatgaattcatttgccccaaaacaaatgttggtgtgcatcgcaaagtctagtgagatatcttttttattgagtttctctagagcagttactctttttatttacacaataataagcagtgcctagttacatattttaattgcataaaagccgcctttactgttttcataatctctaaacatgcttaaaattttaataacatgtatctaatgggaaataaaggaaaatcgaaacatacctccaaccattgatggtttgagaatccgaaaatcaaatttgatatttaaataggttatgtctaaataaagattggaggcttaggaacctaaccacaaagactctatttatatgcactttgcttgagtaatgtcataattatagttgttaatgacaatcaaaaaagaaaactatatgaatgaaatccataacattatgagccagatttttggacccatttaggaaagcctagcattattccaatggaagattatgacccagatttttgtaccctttaggaaaatctaacatatttttcaatcacaacatggaagcaaaaaccccaacaatcccattaatacattaagattaagagaataattaatttaatatattattagtgaagtttttattttttctaccttagcattttcaatggataaacataacttatttatgaaaagacaacatttgaaaagatttattttatttatttaatattttaattggactaatattaatatttgtaaaatttttaatattagaaattttaacttatttaagagtattgtttatttcttaaaaaaataacatatttaagaaattaatctatgttcaaattattacactatctttaaaattaatagaagtttttatttcaataatattgattgatatacttctcttaacaataggataaagtatgattcaattatattcaaatatggcactatgcattataaatactttgagaaaatataatgataattcatgagtcattctttcagcctaatttatgcatttttaatgtgtttgaatttaataaagtctttgttgaaggagttttcaataattttgattcctcttaaattaattttataattagataattttttatttcaattaaatcaaaatatgacataatctattaaataagaaattataataataataatggaaaattaatgaatcattgaagtttttaatgtgaaaaagttagaattcacatttaatttttttaatttgttaaatctaaaattatatataaactaatatattattatatttttaatgttataaatctaaattatatattaaataatgtatttaataatcaaggtgaggaatggggttccatccctgattcggactcttcactccgatcccaactccaacaagcctaccctacatgttgatttttgtagacatgctgctgttgccttttcttgaagatattccaacagcttttggtcatactgcccagtgacagctctggtttgataggattactattctttgattatggattttaaaacttatgtatgctgtccttaggcatcacattcaaaattcaaccgcaggagatgtgtcttctagtctggcctcttccaactcgggtgatttggaagtattccccgtaatgagaagttaagcttataaatcttatgagaccaacacttctactttggtctcatcaaagcttttgtagtaaaatttaaaaatctaaaaaatcaatatagtattaaaaaatcacttatagtgttttttgtaaatatattaaagagtttatttgataggaattttaataagtgtttctaatattttttataattcaaaatttttatctttcaagcatccgaaaaattaaaaacacttcgaaaaattactataaaatatattctaagattacatttgacagtgatttaaaaaagcatttttaattttttttaatacttaaaaaataaatattttaaaatattataatggtcttcttaaactcgttatcaagtaaactcttaatagttgattcttttaaaaatgctttaaaaaaaataccaaatggaatcactaaaaacaccgtcataccacttatatttattttgtactaagcattaaaaaaatctaaaaattatataaaaactatatattcaacctcccattattatttttttcctccattagtaagagtacttcctacactttctattgtttggagcttctttgggtatctttgacagattaagagttttattttattttattttattttattttattttattttttatgaatttatcagcaccaaccaaaaaaaatatcatattttctccttacctgccggcccatggactgcagtccgtgtggaccaagacgggaatcctacgccatattcaacctaactaacaaatactaaatatatttttcttctgaagttgcagagagtccccttaatccttgttacgtacaatctattctgcagatttgcatagagttccctcaatcccttgttaccctgcaaaccaaaaatatggctgggtttgttggagaagcagttctatctggtttcatccagaagctggttgacatggtcacctccccggagctgtggaagtatgcatggaaagagcaagtggattctgagctgaacaagtggaagaaaatattgataaagatccatgcagtggtccatgacgcagaggggaagcagatgacaaacccctggtcaacatgtggctagacgagctcagagacttggcttacgatgtggaggacatcttggacgacttcgccaccgaagctttgcgaagcagcttgatcatggctcaaccccaacagggcactagtaaggtacgaggcatgctctcttctctcattccgagtgcttctacgtctaattttagtatgggttctaagatcgaggagatcactgcaagattacaagatatttcagcccaaaagaatgacttggatttacgagagattgccgcagggtggtctgatagaaagagaaagcgagcacagacactgcctaacacttctctggtggttgaatcccgtgttatggtagagaaacagataaagcggccatagtcgacatgttgctcaaggatgatccaagtagtgatgaggaagtctctgtaattccaattgtcggtatgggaggtatcggcaaaactactctggctcagcttgccatcaatgacgataaagtgaagggccattttgatttgagagaatgggtatatgtttctgatgactttgacgtttcgagaataaccaagaccattctacaatctgttgatccgggtactcgtgatgtcaattatctcaatttgcttcaggtcaatttgaaggagaatttttctgggaagaagtttcttcttgtgttagacgatgtttggaatgagaattgtcatgaatgggatactttgtgcatgccaatgagagctggggcaccattggcagaaggctttttgcaacaaacaaaggggaataccaggccagaagacttaggttctaaatacttggatgatctgttctccaggtcattttttcaacattcaagtcaatattcatcctgatatgtgatgcatgatctcatcaatgatctagctcaatcagttgcagaaggaatatgcatgctttcatttggatagtgcatgggagaataacaaacaatccaccatttatgagaaggctcatcattcatcattcaattctagaaggtcccaaatgttgagaaaattggaacacttacataaggtgaagtgtttgagaacattggttgtactgccgatcgatatattttctccgtattcaatatcaagcaagacgctagatggccttttaaaggaagtgaaatgtttgcgagtattatctttaagtgactccataataaataagttacccaatttgattggcaatcttaaatatttgtggtatctcaatttgtccaaatctttcataaaaaagttacttgattcggtgggtcatctttacaatttacaaacactgatcttatcttattgccagagacttaccatgttgcctatgggaattagaaaccttatcaaacttccacaccttgatatctctaatacatctcaattacaaaaaatgccttctcaaatcggaaacctaacaaatctacaaaccttaactaagtttattgtgggcgaaggcaacggctaggggataagagaattgaagaatttgtttgatcttcgaggagcgctttcaatttttgggttgcacaatgtaatggatattcaagatgtaagggatgccaatttagagagtaagcaccacattgaggagttaagagtggaatggagcaatgactttggtgcttcacgaaatgcaatgcatgaaaggcatgttttggagcagctacgacctcgtagaaatctaaaaaagctcacagttgcatcttatggtggatcagaattcccaagttggatgaaggacccatcattccccataatgacacacttaattctcaaggatggcaagagatgcaaatcattaccagctctgggccaattatcctcactcaaagtattgcatattgaagggttgaacggagttagcagcatagatgaagagttttatggagggattgcgaagccttttccatccttggagtatctaaagtttgaggaaatggctgaatgggaatactggttttgtcctgatgcaattaacgaaggtgaattatttccatgtcttcgagagcttacaataaggggatgtcggaagttaggtaaacagttgccctggtgaaacttgacattattgaatgtccaaatttgggagtttctatttcaagatttgcatctctcggtgaagtaagtttagcagaatgtaatgagatggtgttgtcaagtgaggttgatagtgggcttcaaacagtctctatgcgaggatgcgattggcttgtatcattggaggagcaaaggctgccttgcaatcttaaaattttgaggattaaaaagtgtcttaatctagagaagctgtcaaatggattgcagactctcatgtgtctcgtggagctggaaatgctggaatgccccaaactgaagtcatttccagatacggggttgccaccattgccaagacgacttgtgagtggttgcgaaggtctaaaattgctgcctcatgactagagctcatctgcgcttgaatccttggaggtat

SEQ ID NO: 12873 - DNA, 6064 bp, Vitis vinifera
  Intron number 7 from transcript GSVIVT01031557001 (locus G SVIVG01031557001) derived from phytozome v7.0 (chr-ID chr5 ; pos 17974385 to 17980448)
ttactcaggttggttttcttcatttttggatgcatctgttgctgttcctttttccctatgtttttgtctctcaagattttatcctatgcttttattcctgtatttccctgtttcttgttaaaaaaaaaaatgttgcatcctatgcttaatggctattcatgcatctgattcaaatttgtgctttgggttcctttgtcttgaatcctcaaaataattccatatttctttatactttagcataaaggagggaagatttacacatgaaagagatgaaagtgggaaacaatagaatactagctaaactaccttgatcagaatcatctttctaggttagccttgttgcttgattgcaaggcttctaattggcctatattctacttgggtctacctttgggagggaatccaattgcttgcggattctgcgatccagtgattgagagaacctctaggagattagacgggtggcaaaagacttatttatctttcggtggtaggataactcttatccactcatgcctttcccacattcctagctactttctatccctgtttaagatttccgcttcagtggctgcaaaaattgagagattgcaaagggatttcctttggtcaggggttggggaaggtaaaagatatcatcttgttacttgggacgtagtgtgtaagctgagggcaaaagggggattggggtttgggaatatttctttaaggaatctcgctcttttagggaagtggttgtggaggtatcctagggagagtacaactctgtgacatcaggtcattctaagcatttatgggacacattcaaatggttaggatgccaacactttagtcagatggttacatcgttgtccttgaaaggctattgcacaagtctttcaagatttttcaaagtatactcgatttgtggtaggagatggggaaagaattcgcttttgggaagatttgtggtggggggactagcctttgagatcacaatatccaagactatttagagtagtcacggataaaaatatccctatttcttcaattctcggttctgctcgccctttctcttggaactttaatttttgtcgtaacctttctgattcagagatagaagatctagaatgtctcatgcaatctcttgactgtatgtatttatccacttcggctcagatgcgagatcctggtctttatcttcttcaggattgtttacagtcaagtctttctttatagccttgtcccaaatacctgatttatctcctcttttccctactaagtttgtatggaattctcaagtccctttcaaagtcaagtcttttgtctggttagtggcacataagaaggtaaatactaatgacttgctacaattgagaaggccctacaaagctcttagttctgacatttgtaagttgtgcatgaagtacggagaaacaacagatcatcttttcctacattgttctttgacgatggggttgtgacacagactatttcagctagccaagatggattgggttccttcgaaaagcatttcagacatgatgtttatcaattataaaggttttggcacttccaagagagggatagttctgtggcaaaatgcgtgtattgctttaatttgggttgtgtggcaggaaagaaatgctaggatatttgaggacatagataggaattaagagaatctttgggattccattcattttcttgcttctctttgggctttttgtttcgtggtttttaagggcattccccttaacgtgttacaactagattggcttgcaatgtgtagtttcaacaggatggtctagccaagagagcttgctcgtagttttcatagtgtagtttcttattcttttattgtgttgtttagttttatctttggagggaggattcctgatccttcttttgtaattcttttctatcaatatattaattgttgtttcctatcaaaaaaatagaaactagctaaagctccagctaggaatgattacaaatccatgtctgtcttgaagtctcactatcaatcaacttacttctatgagggggaaattagatcattccaaaagacccaataaagaggagagaaggagaagatactcatcctcactgaagaaaagaagattacccatatttccatgtttgcataaagtattttatcttcaattatagaaatatttttcaggagagaaaatgctgttgtccaaattgaaggcgaaagggaagaacttgtacagagaatggtttatgaattacaagattgtatgaccctggatcgagcagaattgtaaaaagggttcataaacttactaaaaatagttgtgtcaaatttttggtctgttgagttcaaggttcttagcatattacataaattttagaaatgtttaacagcaggatagactttggtcctggtcaaactctcaaacagacaagcaaatccaccttagaggttgtaacattatctcaaactttttggttgaataggaaatataaactggaggatttttttttgggtttgaatttatttattgccattgtttaatacttgaatttttagaatatcatcttggatctattaggcagtttgccaattattatttttttcatgaaatttgaatagtttgagatcttgttttgattactaggaattgtaccaattgaatcttctttgtgaaatttcggtattttgaaatcttgttttgattttgatggggacgggaattggtgtttgtagcttggctgcctatgcaaatcaactaatcaattaatgttttattcagagtttagttacatgaaccttaccacaaaatttcagattgccaagttatgaagtgaacacacataatgataattaatgggtttctgaattgagtgacatacatgaaatatctaggatctgtgcttttaggtaatgttgaaaagaaccggcaaaattttaaggaaaaattaagagaaaataaaatgaagcctagggcagaatgatgaaatacctttctttgagtcagccctataaacatggatctaaattgttccctgcatgagtttttgtgtaaagaatcatattgggaaaaaaaattgtgtaaagaagttccttaaggaaaattttctgtgtctggtcttgcttttgcctttggaaaacgatgtcttacaaacatgaattaatgtttgatctatgataacaaccaccctgttcagagcttcactgcttatgtcctagagatgagaaagattcaaagttttgccattgttctgtataaacaaggattgaaatgtcatgatttttctaagatatgtcaccaatatttggggtatcggatggcacctacaggacaactaggacagatatctcgctcttccaatttttcaaattctctctcatttttcgctgatttactgatattacactgattttttgtattgttggcaactttatcggtgactcatcaacacctttttcaattggggtttaaatgcggaaattttttagttgcacacgttgggccaggggaagcccaatcagcccaccgagcccaacaagtccacgctcttcattacagcagttgaggggggccaccatctattaaacaaaactttgtttttcttcaatttgtcaatgtgggattgtttacttacactgtttaaaaaatcacttaaactagattcaaagagcaaggcttgaaccaaggtccttgcatttttaattgatctttattggttttttctatcatttttttggagtattccaaacatctatgagttttgattaatttttgttccaccaacattttttgtcaatattttcattgatatttcttaatatatctgtaaaatcgaattgttgatatatccatgaaaactgatattttcatcctcacctataaataatggagcaacatcatcactttgggacaacaatggttggttgacggtaatagataattaacaccttttatgtttgattgaaggttatctcattctttcatgtatttgttcttctctatgattttttctgtttcctgatcaaagaagaggttatcatattggtgcagctgatcttagaagctgctgccttgttgacttgtttgtcttattgatcatatcaatttaagtgctctaggccttgtttggcaactgttttttagaacaatttttttgttttctagaaaaaagaaaaaacacaaaaacacgtttgataatcagaaaaccattttctgttatttgttcttaaaaaataaaaaattaggcatttttagaaaacatcttttaattgttttcacttgttttctaagaacttctttaaaaaataattatacaaacatgtagaatgatcaaaagtaaaacactagatataaaaattatttttaaaatatatttaaaaatattaaaaacagattaaaaacattttaggttcccgaaaagacttttattttacgaaaatttaaagaacaattttcaaaagttgtagtcaaaaattgtttttcagaattgtttgagaacagttatcaaacaaggtcttagtcatattccaacttgagtttttccatttggaatcacatcctcatgttctttgcccttatgcaccttggattcacagggctgaatcaacaagatttacaaatttggttatggtcttttactggataaaattgggttatctttggccttttcgatttccctttttctcctttttcttattcagaaataaaaccaatctatttttattaaataaaatggtcaagagggaccagacatccttgcatagcaggcaaaatctagtcataaaataagaagaaaagctctacaaagagaagcaatacaagctgcacgcatgtgaaagaaacgaaaacaatccatgaacaaaccaaagatttactatttatgatttgatgaggcaaacaatcctctacagaaaataccaaaaatttttatcctcttttggaagccattgatgaaacctttaggagcctctttccttcttagttactaggagattacaatggctgaatctttcttcactagaaaattggaaagcccaaaagctttggcctgcgcagccattaaggagggatagaatctcagccttataatatagtaaagaaatgaaggcctgtcaaatatacagatatatatatatatcaagaccaattcttatctttgtcttatttcatcttttcatttccttaatggtgtctgttcttttctgttctttattcttatttgggtctcctcctttcccttgggatccattgagggtctgcctttttgcttgggagcccacatggggaaggattttgatgatggaccagcttaaaaggagagggaatggatgatgccgaatagatgctattagtgtaaagaggaagaagaaacagtttatcacatcctcctatgctgaaaatcagtaatcttgtggtaactgattttcgctttatttggtattcaatgggtaatgcactccttggtaaagaaggtccttctaagttggcatgactccttcattgggagaaagagaaagaaaacttggagagttgctctcccttacgcttgttttggacaatatggaaggaaagaaataggcgtttatttgagaatacagaaaaagcttatcaagcaatcattcatgtataattttttgaagtgggttcaagaaaccgctctttgtccatgttggcttgtatcgattgactgagctccatgtagtgggtgggagtagaccttttggtgcctttgtatatactgtggatactcaagtgcactttttgttaagcattgttaacataatactatcaaaacaaaaaattatatttacacaaaagaaaagaaaaatgtgctgttatttttattttaaatgacattttacaccataccggattgtggagatatctgtaccggattgtggagatatctgtatgcacatatccctgatatactttatgcataaggagtgaagtttcttgctaattacgttctggggttggacttttatttatttatttattttgtatgcatggagtttctttttaatgcaaactctatgtttcaactgtttattactgacagaatacttgcttatgcttctcacagc

SEQ ID NO: 12874 - DNA, 9085 bp, Vitis vinifera
  Intron number 6 from transcript GSVIVT01011680001 (locus G SVIVG01011680001) derived from phytozome v7.0 (chr-ID chr1 ; pos 5193721 to 5202805)
gagaggtaacaaaatttctagtaacctgttgtgtgaatatgataatgtaatacatcatgtgaatggaatactataatgtcattgaactaacaaaaaatttggtaatgaaagtagtggtatgacttaaaaatctgtgatgatggattctattttctacaacttaaacctaaatgacatgtcatcctgaagcgtttaccagcacttcttgtagttcagttaagtgggtgctactaaaaccaaccttaggtgtacaagctcatattctttagagagcagaattgtgattttatgaagattgtgcatcttatattttgtctttgtgactttcattttgagaccttcctgtccttgtttgccttttcggattctaaagatgcatgggtagctaatttttgggaacattgaggaggaggaaattggaacttctgttttgttaggaagggagatagccgatttttgggtgtcatagagcgttttctttttgaaccccaaggacaaacaacgaagagggagcaaggggatagagtagtttggaagggagatagctaaggggttttctctgtaagaggactttattctttgttggcgattgatggaaccatccctttctgtttaaagatagtttggaatccatggattccttcaaagatgagtttcttctcttgggaggcttattggggaaaagttttgacattggattagcttcaaagaagagggtggactttggccaacagatgtgcattgtgcaaagaagagtcaaagtccattgaccacattctccttcagtgatactaagtgagattattatggtagctagtgttctccatttttagtgttcaatgggttatttttgagtcaattagggagaccctcctagggtgacatggttcttttatagataaaagacgtattaaggcttggagagttgctccttcttgtattttttggacgatttggaaggaaagaaatagaagatactttgattgtgaggaattgtttgatcaaaggctgaaaaaggtatttctaaacaatttttatgtgtgggtcaaggtgtatataggtggaggatatacacaaatgattgatttcatagattggttggatcttggttgagggagggggtatttttttgttccctctttttgttttttgcttagtgctctttgtatatgacctgtatacttctatgcactgtatgctctttgtatactcctatccactttttttgcttgggctttggaaatcaattaggaaggagtggttgtttttaaatggtaggttggcttaccaagtgggtagtgggtagagagtgagattctgaatggacaagtggtgtggagatgagctactttgtgagtcattcccttctttattttccatctctttgtctaagaatgcttgagtattggatgtttggaatcccattggtgatggggatggttggacccctcttttcgcaagggcatttaatgattgggagattgagttggtgaagcattttttgcataagatccaagccttccgggtgcaaagggaggaggaagatagagtgttttggatagcaccaaagtgtggcgttttcttaatcaagtctctgtattctattttggaacccggagattcttctttgttccctagtgatagtatttggagggtgggagtgcctcctaaggtagccttcttcgcttgggagacttcttggggtaaagtcttaactttggagcaacttcaaaggagggggttctcattggcaaacaggtgttttctatgcctctctgaagtagaaacggtggatcaccttttacttcattgtgtaaaggcgtgggtcttgtggaatcttcttctctctttttggtgtggcttggactctatcatgtacaatgaaggaaactcttcttgggtggcatggagcgtttgtggggaaagtttgaaagaagacttggcaaatgacccccttatgtatattttggttagtctggaaggaaaggaatttattagtttttgggaatgaagagctttcgcttcaaagactgaaatattcttttgtatgtaatatttggtcttgggttagagtatctttaattttgagcccttcttctcttgtaagttttttagattggttaggctctaagttaggaatttaatctttggtgtgctgctatcctttccccttggagtgtgtctttgggcttttttgtataactccctatatactttgagggcactgtttttggttcttcctcttcttgtttaatatacatctttttatctaaataaaaaaatacaacctcttactatcaaaaaaaataaaaataaaaatttaacctcattctagcacttagtgtatgcatttcaaagatagttttaagcattttcatgttatgatggtgtgtttatatgtccatgaggggctatttttcttagaacagttctcccttattttctccttttcccccatgttgggatcgaacatggaacctcctgaatcccaccaccaactgcttatcacttgagccaggcctcaaggaatatatgcatgagtggttatatctatgcagtatgtaatgttcatgactgcaacaaagtaaggtgctgagtttaataacaattacaattcttgatgtcatgcttttgtttgtcaggtgatatgctatgtaatgtccagtaggaaacattttgatacctggcagtctggaaaataagtgtgaaactagtccctcttaaaacctatacggttccttcttctaatacattttgttttttgtttattttgtgctgttcagttttttatcacaggacacatgtttcagcagtactggtacatattggtcacactgattcaatgtttttccactttctttttcccattcttatagatttttaaaatacaatatcatgaaaactaaatgtgtttcttttggtaaacatttagtaaatatacaatactcagatgctatttactaatatggcagattagtgccattatgcttttataggtgttttgaagcatatatgcttatttttgttttccctttagcaattgaagtgtgtgtttttttccaatctgtttatttttatgcatttttttattatctttttctgcattattatgcctattagagttctcccctcttctgcactgtcactatattaaatgttacttgcaaaaaaggaaaaaaaaagggaattacattcatagtttatttaagaaaatggtatttgcaattgaaagatatttttgatgcaattatacttcgcttattggttttgatctgtgtgcttttatgcttggcttactaagttttttggtgtgttattatgcctattagataaccaattttcctaaaaagcttaagcttatatgatttgggcccattatgtatatcatgctctccaacacactccctcatgtgtaaattccatctttgggcatacacattgacttaatatgaattgtggaaataaacatgcggtggtgaggttcaaacacttgacctcccatcaaatgaggctttgataccatgttagataaccaattttcctaaaagcttaagcttgtaggctttgggctatatcatgttctctgtagaaaatattcttcttttttctgtgtcaaaactgaatacaaagtgacctatatatatatacaagtgggattcctaatctaagccatataatatgcacaatcactatctctaaggaaacaataactaattaggagagattctctcattcataaaaatagaaaatatcctaacacaatccctctaatcttgacacttaattacaaatcataatcccatatttccacactccccctcaagttgggtagtagatgtctagtattcccaacttgcttttcatgtttccgtaggtggcctttggaagtgcctttgtcagaatgtctgctgtttgacgacttgaaggaatatacataagtatgattgttcccccttcaagtttctccttgatgaagtgacggtctatctccacgtgcttggttctgtcgtgttgaactggattctttgcaatacttatggtagccttgttatcacacaaaactgtcatagtggagtttgatataatttcaagttccttgagtattctttggagccacattccttcacatatcccatgagctattgccctgaattctgcctctgcattgcttctcgccactacggactgcttcttgcttctccaagtcaccaagtttccccacacataggaacaatacccagtagtcgacctccgatctgtcaaggatcctgcccaatcagcatctgtgaataccttaacttccctacttgaggttttcttgaagtagagtcctctacccgagctctttttaaggtactataaaattctgtatatggctttcatgtgtcttttagtgggattgttcatgtagcggcttaccatgctcacagcgaaaccaatatcgggccttgtgtgagttaagtagatcaactttcctactaacctctggtacctatctctgtcagttggatgattgtcattatctttatcaatcttaccaataggatccataagcgtgtccactggcttacaacctagcatcccagtctcctaaagtagatcaaggacatacttcctttgcgtgaccacaattccctccttagttctgccaacttccatgccaagaaagtatttgagttgtccaagatctttgatttcaaattctcttgctagcaacttcttgagattccctatcctttcttcatcgtctccggtaattataatttcatcaacatagataatgaacagagtcatttcaccttccttagagtgcttcataaacagtgtgtgatctgcttgacattggatgaacccatgttttttcacaactctagtcagtcgatcaaaccaggccctaggtgattgttttagaccgtatagggactttctcagtttacacacttttcctgaattttctggagtttccatactaggtggaatcttcatgtaggcttcctcttctagttctccgttgagaaatgcattttttacatcaagttggtgcagattccagtccaaatttactgcaactgacaataacactctgatggagttgagctttgctactggtgcaaatgtttcttcataatcaatgccataggattgagtaaatcctttagctactagtcgagccttgaacctgtttatacttccatccggattgtgcttcacggtaaatatccacttgcatccaacaggcctcttaccctctggtaattctgagatttctcatgtcccatttttctccaaggcttgtatttcttcctgaacaacagtcttccattcaggttgttgaagtgcttcttggatgttggatgggatacgatcatcttcaagagaagtgatgaatgcttggaaattctgtgaaagctttccataggacacatgattactgattggatgctgagtgcaggatcttacacctttccttaaagcaatgggttgatcaagatcatcaaggtcattactggaatctagatcataaattgtgttacctggttgtgagtttgggttgcttggatcctggtccaattcttggttctactcaggtggagtgctatcctcgggctccttttgaggaggtttctcgggcttttcctttaaattttttctagaataaactattacctctttattgtcttgtgtagttgactcaggtgtgtgacagaagggacatccaaggaattgttttcggggacagaaagagtactatctgtttgaagaggcagtgatgaactcaaaggagaagtagtgctgatttcagtttcccaaaattggaattcatctgtggaccagttctccccttgaattgcagttttggggtagaagggttgatttttgaagaaagtgacatccatggaagtgtagaatttcttggttgttggagagtagcacttgtatcctttttggtttggtgagtacccaagaaagatgcatttagtggctgtcggatcaagtttactacgttgggacttatagatgtgaacgaaagtagtacaaccaaagactttgactggggtagacgagattatttttttattttttttgattggaaacgacacaaagatatattgatagaaaaagaagtacaagaagaaggatagacgagattattcgagcggatggatatgcaacgaggaggatttgacacggggttttaaattgaagaatcctagaaggcattcggttgatcaagtaggttgctgtgagtacaacttcaccccataattgtttaggcacgtttgaagctatcatgagggatcgtgcaacctccatcaaatgtctatttttcctttttgcaactccattttgctatggagtatcaatgcacgagctttgatgtacgatgttattctccagaagatatgacccaagaatgttgtgatagtattctcgagcattatctgtctgaaggacttgaattttttcctgaaattacgtctgaaccatgttgttgaagttttcaaatatttccctcacttctgatttcttcttcataaggaatacccaaatcactcaagtgtggtcatcaacaaaggtgacaaaccatctagaacctgtaatgttgttgattctagaggccccccaaacatcactgtgaatcaaggaaaaaggatgagatggtttgtatggttgaatggaataggagttgcgagtatgtttggacaattgacatattttgcattgaaaatttttggaatttttattgaataatgatggatatagtttttcaagataggaaaaatttgggtgacctaatcggtagtgccataacataacaacactatccgtcttggtactagggttggaaactacacaagcagtcttcattggtagccttcgaatttcctcagcgctcagaaggtaaagtccagcacgcacctcagcattgccaatcctcttcccagagttcaaggcttgaaattcacacatatgaggaaggaatttagttacacaattaagatccttgtgttagtctacttatagacaataggttgcaatccaatttcggaacatagagcacggagtgaagagtaatatccttggaaataataactgaacctgtgccaaataccctagaaagggttccatcggcaatttgaacagaggaattgttatggcaaggagtatattcatgaaaaaccatgagattcccagtcatgtgatctgaagctcctgagtccactatccatgtagtgtgattttcctgtctaacatttagggcatgggaaaaaatacctttctgggctatagatgcggtaccaatagttgttccagttgattgaagagtttgttggaacattttctgtagtgcctccaattgctctttgctaaacggaccaggatttgagatagtgccagatgtgtcttcttcggctgcagcggtgtaaccccgaccttctctgttttgctgtggccgtgaaagtttccattcagcaggtttaccgtgcagatgccagcaagtctctttcgtgtgtccaagttttctacaatggtcgcaccatggacgattcttctttgtttggtggttgttgttgttggattgggttcctcgtgcaactagggctgagttctcaagatttttggaggaattttgggttcccaacatcactttttgtctgctttcctctctgcaaatttaagaaaaaacttccctaatactaggtaatggcttaatacttagaactcttccacgtacctcatctaaattcttattaaggccaagtaaaaatttgtagatgcgttccttttcaataaccttcttgtagaggagtccatcttcgggacacttccaaaccaattcttcataaatatcgagttgttgctaatatcgtgtaaggatattaaaatattcgataacaattgaatctccttgtcgaagatcttggagaatactcttgatttcgaaaatcgccgaggtattatcgatgttggagtaggtctctctagctgcatcccatatctcctttgttgtgccataatacatgaagttttctcctatgtcattggtcatagagttaattaaccaagacatcaccatactattttccaacttccaggttcggtatcctggatcatcttcctttggctgaacaatggcttccgtaaggtattcttccttacctttcccgcagatgaagatccgaacagactgagcccattgaatgaaattctgcccattgagtttatgacctgttatgggaagaatgatgccgtctgtggtgctggcactgccggagtgaactgcttcaggtctggacgtcacctccgagtttgatccttccgttctgctctccatggaaaaagatgattttattttattttatacgtggttcagatctgaatgctctgataccatgtagaaaatattcttcttttttctgtgtcaaaactgaatacaaagtgacctatatatatacaagtgggattcctaatctaagccatatgatatgcacaatcactatctctaaggaaacaataactaattaggagagattctctcatccataaaaatagaaaatatcctaacacaatccctctaatcttggcacttaattacaaatcataatcccatatttccacattctccaacaatgcccatggagtgtattgcctagttttaaggaaattcatttcataagcttatttgagcgagtggcttttgtacatgaaagacaaactgtcatttttttaggcataatcatggttgtcttactgggttttgtccttgtgttgaatcttctttcaatactagcccacctctttagcccccaacctgggaaaaagagtgaaaaagaaactgaacatgctttcaaatatagtggtggcagcctttgtccattcttgtagtatttgtaattccttatgtcaatcctttagaactctagtaccgtacagtgcaatgtgtatcactcagcaatttatgacaatgatgcgatgatcattaatatattgatggaggtaagcatctgaagagagttggttgcattaatttctttttattggtgcaggatcttgcaaattctattcagagagggagtctgga

SEQ ID NO: 12875 - DNA, 9117 bp, Vitis vinifera
  Intron number 1 from transcript GSVIVT01026299001 (locus G SVIVG01026299001) derived from phytozome v7.0 (chr-ID chr4 ; pos 13006948 to 13016064)
caagagtaaggcctagggtgcaatctggagtgcgtcatcttcaagtggaagggggtcccacctactttctgattccaaaggctctagaatatggactccattgtcggtcaatcccattgcaaattgattaagttcaaatggatggggtttccgtcttcaaagcttaggaaggttaactggctgtcactaggaatatgtggcatttggggttgaactactcaaccctcggggagctcagtgcttaatgttttccagtcttaatgcttcatgtcaaagattcatctcaagtcatggaaagacattccttcttcatacctgatgaggattgatggctggaagcataccaaagcatcttatcatatagatatagggttgtggtatatgacaccattctgaagttaagtgttgtgatctggaaaactgcatctatcaactggaccacttcctatggtattcataagtgtctgagaaacgatggcggcctctgcatctatctaaccccaaacaactcattgtatacaatctttataaagtgtccatctttctagaaatatttgtgccattatggtcttcgtagcccagaacaacaaagaaatggagacgagtgaaatatagatgttgaagcatagaaaaataatccaagaaaaacagaggaaggaagacaaaggatgggtacacagacaagccacattccattattttgtcaaagggcttgaaaacaggtgggggatatcatagaacaagagaacgattctaagataccaatatcagtgatgattatatgcatcaaccattaatagtaaagattaaaaaaagattacaattcaagccaagacagagcatgcacatatttaattccattcaacgggagaaacaatcaaccttaaatattcacaacaatcaacaagataacattagaatatgcatgatgttgaatcatatagagatgagaagatacgaatttcatttaaccacacctagagaaattcccctcaagaaaaattgcttgtcttcaagcgaggtgtgtcatcttccaaagatcacccaacaatcccaacaagctccctcattttctttgaccagacatgatgaaccagatgaactccctctctctttctatttcctcatttcctctctttttctttcttcgtcctctatctttttttttttccttgtgctgaaagtcttttatgaaaacctctcattcttctttccaaaaccactagcctatgtttttacatggcaattggcagttgtccctcctaaggagtcttcttctctccgaattttgtctcctccactagaaaaaatccttttaaattttcttaaaaaaattgtgtgtcaaggagtcccatctttttcaaaaacttctttcccctattttaactctctggtgatcttcaataatgcccaaaagagattccttcctccttagagtcttacaagaatcaactcttcttatctgttggttgatttccctacaacaaaaaaaataaaatcaaattattaaatcaaataaatgaaaaaaaagatttagagaatgataaaataataataataaataaatgaataaataaaagtgattgataataataaaaataaaataatatatatatatatcataaatgattaaataaaagttattgataataataaaaaaaaaaaaataagtaaataagataaatgagccatgtaaccataaaagtcacgctaagaatgtctaatgggctaagtgagcctaagtgacttaggtgagcctaagtgatgcctaatgggctaagtgtgctaagtgggcctaagtgaacccaaatgggcctaaggtggtgcctaataggctgggtatacctatatgggcctagggtgagtctaggtgggcctaactgagtctaacctaaagtgcacctaagtgaagcctaatctaaacacaaaggacagccaaggtgataatgaagggcaggataaacccctcaaccaaagtctccaaggtggctcagaaaagataagctacatgagtagtaatgagccattagggaattgctgtaaagtactgaacgaaaacctaatagaacatgtgctaggagggcaaaatggagcgtctatagttttcttataggtgtttgcttttttcaaaattaaattgcaaaagaacaaatttaagttttccaattcatgtatgtggagattgtcgtttgattcccaaaattgtaggactcaaatatccctaagcgtaaggtgttagaatacaagtataagacttgatgagccaggtatgatccttaaggagcaaggcctcatagacaagttggaaatggggagattaagaggtcaacatgaggagttcatgatggactttgttgtggggttgtgcggtgaatttgtagaaacataatgaaaatttccaaatcaagttaattaaagttgattttaggtacaaatactaggaattgggaacatccctttatgggactcccatccaaatgaataatgtacccaaattaaaacacatttggggcactaattagtggtttcagctagaggatttttccttcaaatgcttttatgcattttcacaacactgggttctgatgattagcctaactcctagcactagagaaccacctatttgataccaactaccaatctcagaatttcatgatcaagatggaaaaatatcaagtgaatgtgtctaaatcttaagcaactgtcatatccaacactagttgagagaaaatagagagcaaaatgataataaatacatggtaatccatttcaattacactttaccaaatctatgaataaaacatgtacaaatccataggagtttagcccaaaaggcttcctcttttagttaatgaaaatagctaacagaaagaaacattggagcctccattaatgaaactgttgaaacttgaaattagtgaagaagacaagcttactataaattgaatcaagataaagactcgaagtattgtaacattcacataaaaaattatgctgaaagattaaacttagtggtgcaatggaagaaaacaatgatctgaaagcaaaaatggttgaaacattggccagaggatatctcatctttttctcgattcaaaatgggcttttataccttcttaagttaagccttaagttgccttccacatggagacattgagctataaaggaatgagaattgcatgataatgcttcaaaaggcattgaaaagcctaatgggcaggaattctcgatgttcatcacctcacttccaccctcaatcaacccgttactagcccctaacaatgctggtgcaaagaaaaatgaggagacacccaaaggttcactaaactaaaggggatggattgatgttcatgtatcaaatacaagcaatcttgtccagaccaggtcatactattgaccttagacaaaatcatcaagataagagtccatgctcctaggtacttctcaaaacccatttcttatctttctacaaaaggagttcttagtttttctttaggtgttaattgaaataacactcaagaataagtctctctgcctttccaaccttgactgtcaacaacttgaaactcttaagggtttaatttacatagagtaaatcttggatatacctcatatatttgttttttttttctacatcttgttgagtgcattatttttttttttatcatggcttcctaattgatcgtgttgctaagggtataagtggaaaccaaaaaatcaataaaacaatccaacccaaccaaaaaaaaacataccggattaggtttcaacaaccacgaagaacaatttagtttatgggttatgaaaatcaacttgctcagtttgatttttttttttttctaattgatagacttgaattgaatagatactctaaattttttattttttatgattcataatttttagtattcattattatgcatatggtgtggattctattaaagtagttcattgttattaggctattacccaaagtgatttatattctaggcttgaatgagttttaaatgtcttttaaaatctaattgggcttaaggcccaaaattgtctaggtccaatttaattcattttgttggtagttggagataactttggataaactctagctaattatccaattattttattagagtatttatttgttttttaatttcaagtaaagatgtgtaaccccctagtttttagctttttgttttcttaggttcctagttcttagaatattttatttttcatcaattatcttcctaaatagattgcctatatatttaaggcttgtattctcgataaaatagatcagatagttgcatttttacttgttgatttcacatttaaactgaatcaaatcaacttcaacaagatttgtttggtaaagtgtttctatcactaaaagcttgattcaatttaattcaagaataaataaaccataatggttcaacaaatttttcctttaagaataggctgaactaaacctttttgtactcctatgtgtaacaggaatccactagtgactcccaagctagttgatcctaggacactaggtgttaaaatactttttcaagcttcatcacgaaccaactaaaccttaacacaaagcaccaccacataggttgatgtttactaagtttgaagttttgaggctccacacatgtagtacccaagtttaactaaggtagtatctaaggtcggttaaggtaatacctaaggcttactaaggtagtacctaaggtacaatcaccaccatactataggtgaaccaattcatcaccttaacgaaatgcatactgccatgctctaatgttcacaaatgaagtaagtactccacacaggtagtacacaagtttaactaaggtagtacttaaggtcggttaaggtaatacctaagatagattaaggtagtacctaagacttactaaggtagtatctaaggcacagttacaaccataccataggtgaaccaactcaccaccctaataaaatgcatactgccatgctctaatgttcacaaataaagtaagtaatgtccacaaatgaagtttcaaagctccacacaattagtacccacatttaactaaggtcgtacctaaggtcggttcaggtagtacctaaggtagattaaggtagtacctaaagtttactaagatagtacctaaggtacagtcactaccataccataggtgaacaaactctagaattggtgatgtgctccatttcaaacaaaagaactaaagaacaataaataaaaattaattacctttagatttcgggttggggctaagccaaaatgcgatagaatgataggaagacaagatatattgttgaggaagccaatattttggaagatatcttgttcaactttccgtttagctacactctgttataacaaaattagaatcacaactatgcctcttgaaaccctcttttaactagacgttcttaggatggagtgctctatttggttgctaagaaagtagacaagaaagaaaaatacaggttgaagttttggattaaggggttcttttctcaaatgagagaaattttggcaaaatttagatagttctcgagattgtgtggatgacaaagccaagagagagagagaaatgttcccaacctttgagaggaagaaatttcattgggacatttgagatggtcctcgggttgggtgttttttatgtttcacatttgagaagtttcaaattcttggagaaaaaagatgtaaatatgcagattgggttttaagggttttttttttgttttttttctaaaatgagaggaaggaaattttagattctttgagaagatataaatatgcaaattgaggttttaagggtttcttttctaaaatgagaagaagaagtttggtgcttgggaaattttagatgttctcgagattgggtgtgaggagatgtaacccaaatatcagacatcattaacttttagatttttgtgtttttattaaatttaacacatttcctgttgacatggagacgacttgttactgaaatgtagacattacagggcaatctaggaagagaaaatggattgagcacatagtgcacaagaatgataatgttttcccctttgatggtcaaatatgatattccacattattaggatttgaataccataatactttcaaataagcagttgaaaacacaagtttcccatatttcactcgtagaatcaagttcgtcatgttcataccttttacttttgctatagtcatatagttacttatggtcgtgactatatcatttatctacaccaagctataatgacacaatgcagcagtctttttttttggcaaccaaaacctatggtcacactcttttggcttttagctgcggttggttgaccccgactgtaagcctattctcttgtagcgatgattcagggatccatgttgtttcttatcaactaaagggccaaggacctcttgcaaatgcagaaccaagtttctgatccttgcgtaattgaagaaaaactgcacccatatagcttcattactgatgtcaagtgccttataggccgcccttacacttggcaaatttcaggctgcacttggattgctttttatttggccgaatggaatcaacaagcaagagaagctgtgctctgacatattgccacaaagcaacactttggttctctgatgatgttaattactacttgtagaggttatcaattatttctaagtgaccctgaatcagacaagcctaatgcaccagaattaagtccaggtcttactaaaggccgcgtcatgtataggagggttgaacagtttctgtaagccatcttgagcatcaaagaatcaacaactattctgaatacaaatgccaacagcaataaactcaagaactaactaaggtggtgtttgtttttttacttaattctaaatagaaccttaatacttaatagtattaaatattaggttgtttgtttttatagtattttatttctattaagtattaaaaagtaaaaaaaaccattatgttattttttctatttagaaaaagccacatattttggctttttctatttagtaaaaagtttataataagtcatgaaaaagtaaaaaaacaaacaacctaaattttaaaactaattgattttcagcaaaaagtcaaaaaaacaaacaccacctaagccacttggtggacaacttctcaaggaagagcacaaacacattccataatcccctgaaaagtttttcaagaaagtgagtgtctactggaagaactggtgacaaaaaaaaattgaaaaacagaacttgagattatgctattaaaaattcttcaatcttttcattggtttctgtttctgtacctcttcaattcattggattagcattcatattactccttctcccttcaccaacctattaaaaagttactactcacacatactgaaataacataggaatggagagaagaagctacacaacaatcattgcattatacacatatataaaatcacaaactttgaaactttaatcgcattcgcagcatcaatgacggtaaatgtattcagtttttctctatcaaaatgtcaccaatttatctcaacaaatcaaattaaattggaataatttgatttaggatgtgtttgaccatgtttctcgtttcatatatttttagtggaagtgtgtttttctattagtgttggaagaatcacaaatcaaatcttaatccaagaagcattataagtaatattttaaatttttaaaaatgttttctaaattttgtcaacttttcttcaaaaactcgctttaagttaaaaatgttttttaaaaaatgttgccaaatggaatcttattcttaagtcaagaactagtaaaaatttggaaaggtaaaaataattttattttgagtatgaaattatatttcaatattgtagaaggtaaaggtagaaaaataaaacggcaaataaaatactttttttgttgtcaagagaaaagcattcaccttttctaccaagaaaaattatctttaaaaaaaaaatgatgacttacaacaatttttgtggaaaaatattattattctaaaaagagaggccggagaaataagaaaaaaagatgatgatgcccttagaaataaaacaacgattgagaaggctgaaaagaaatacaaaatgggagctcatatgatcaatggccaaagaaatgaagggcagaaattgaaaatgaaagataaaaggggaaagatgcttggaatcaaatttgagagagtgaaattgcccctggcatattggggtggagaagataagttataacaatttcccaagcacgaggacacatgcaaaagacacgccacccaacagacaaagcaatacccagttgggcgtgtcccctcaaggctcaaagaaattagaatcatcccccacactctatccattccagcttattacactagctaattgctatgccagccatttctttcgcattgtggccccactctccatgtgctctttctgtaacccacccttttcgttactcattaccctccttcctgcccccaaaaccactcttctcttcttcccacaaaaccactcattcttctcaccgtcaactggtgagtcctttttgttcatcacagatattccttagtccttaaaatgttagaaatgaaggtcttacccatttttcaaaaatgaagaaatatgagctttattaaatccctgtagctaatgcaaccattctcttcttcatcatcattcttctccaagtgttagaaatgaaggaatcctaccagattttagccatttttgtggctgggttttgctctcttcttctctgtgcagagtctcaagaggatgcttcggtgatgttggctctgaaagacagcttgagcaactctgagtctctcggatggtccggcccagatccttgcgaatggaaacacgttgtctgctcagaagacaaacgggtgacccggatccaagttgggcgacaaggccttcaaggtacactcccttctagtcttggtaatctcactgagttggagcgtttagagctccaatggaacaacatctcgggtcctctcccgagcttaaagggtctgagttcattgcaagtgttgatgctgagcaacaaccagtttacttacattcccgttgatttct

SEQ ID NO: 12876 - DNA, 16380 bp, Vitis vinifera
  Intron number 1 from transcript GSVIVT01001480001 (locus G SVIVG01001480001) derived from phytozome v7.0 (chr-ID chr4 ; pos 12136563 to 12152942)
cctttttgtgttttttgagccgtttttggccttttgtgggggctttttcacgacctttttagagcatgttttttaggggagtagagacgagagtgggagacgatctctgcaggggagtgggctagtgggctagaggtgagaaaggagcttgttgatttccaggaaatttttgagtgagagttgtgagcagggggtgttggagaagggagttagagaggaaataagaggagaactgagcagtgggagaaccatgaggaaagctgacttgcttcatggaggaggcaaaaagtgaaagagattactgtttgagaggaggaacataaggtaagtatcaacctggatttcatgtctctgttttctccatagacctgttttctattctactgatttatgcaatattgatgcttagtttgagtgtggatgttaagccacacatttgatctttttgttgatctctaagatgactttggacttatttttattttatctgctattgctgtcattgttgatgactgcttaaactggaacctatcattgaatgggtcttgagctttatagcacgataacactgaaacttgggagataaaagacaccaacctgaatcaaggagtagtttatggtgtgtggacggacaagactgaaatacatgaagaattttgtaacaggtttgattatgattttgcgtttactatgaacctactagttagtgctccgcagaaccctacgcaaacctctgtgggaaccacctaaccatggatctacacagaaaactgagtttgttggagaaccatctcatccgaattcgtccaccgatcagattgagaacaatatggagtattccctatggttagtgaaggcctcagttgatgaaaatagggaaggctgctttaggtaggaaccattaatcttgctttgatgaaaggtgctacaacaacaactaattttgagagatactttcttggtacattaatgcagttgtcttttgaaggctattctggatgtgtgaatccaaagggagttgaaatgcctatcaggagaattaagaaaaaataacagcagcaccaccacaccagcattgcagtctcaactgtacccacgagccccattccaccattgccacatttggtgcaccattctcaagtccgcgcgacccttccttcctcttggtgtacttttcctatcttggtgagaatttataggttttaaaattgaattttcaaaatggttttcaattgaaataaacccagttttaaaatcgggattttgggtactaaaatcccgattttaataaacattactgccatatttcctctagcaagcacatttcatagtttttcttgattttcttgttttttttaaagaagcatgaataaatttcatgatccaaaaaaaaaaaaaaaatgaatttacgaaaataattcatacaaaaataaattgaaccttggtgaaggcctaacatacctgatgtctttatttgatatttggttttaattgctatgttgattgagtgattaattgatcttgtcttgctttgtgacttgcatgagatattccatacttattatggtgcactaatccttttttctcatgaaagcacgttgtcactcgatgctaatataaggtacactcctactccctcatttatttattcttcatacatgacttgctttcgttatttgattgatgattatggtatccattaatctcctagttgattgtcatgcttgtcttacctttattaatagagacctaatttttaaggcttaaagggatgctacggtcatcgttgtaccttcttgatagctaatatgatcttcggacccaactttggttttcacatacctatttttcatttaggagtgacattaacaaattccttattatatggttccttttttaggtagagtgctcccaagtaaaccactaagtaaatcatgtgatgtgatacaacttaagaaaagtgatatgaatacactaccatttcccatattttgtgtttgtgcatgtggtagatgattctgctaacaaaaacaacaatagatatggaatccataataaatgtttgtttgctttcaactatttgcactctgtatgttcacctccaattgaccattgcaacaacctaaaggccaccagcatcttactttatgaagagcttacgtttcatatctatggcacaggttagttgttctaagtctacttaaaagcaaaacagttaaattgaaggcaagtactttcaaagatcagtttgtttgaattttaaaagtgaaaatattaaaatgtttttttaataatattcaatgttccttttttttaaaggttatgtttgagcgtgtcatacatattcaagtaattcaataaaactcatggcatgtgtaggttgaagaaaactgattatgaattctcttagcattaattgagctcatgttggaaatcacaaaagcttagagtgcaatgaaagcccactgtatttttttccaactactacaatgtaaggtggaatcttattagcctatgcatgtattgttgatgatctttagtgattttatatatcaactatggattataagatccatatacttcattgcttagatgataaggatattaaaaaattttagatttctgagaaaagtatgatgtaaccttttgtggttggtgaaggaattttgtaggtaaagtgtgcaacattccttgttgtccgcattaatcaagcttgagcacaaaatcactgaagcatggagagtaatgaatggccactatattgttttccatctactacaattgaaggtgaaataccaaatgtttaattagtgctaggtctaatcctaagatctaactattctcataacttggcaaagtgataatggaatacatataagaggagaagatattaccttccactaacctgtatgactaaccttacatttgaagttaaggtaagtataatcccatcatttaaccttcccatttgttgaatttcttataaggacatatagacagtaggcttggaatctatccaccataaatggtgaaatccaccactaaacattcaaaatgagaaaacgatgtatacttttctttttcttttaggtaaactagacattcctttacgagtgtcttgaaaggtcaaatgaatcacttgcccatgagcttgctcttttattcattttcttgaactttccttatttagtgttcttcttcttgataaaagaatctaaagaacctttgactttcatgcgaacaccctatgatctttgagaatccccttagccaccccgaaggaaaatggcaaggtctcaatgattatatgaatactaatgttcataacaatcctaagagtagcttctcaaaactgatctacccttatcaccaataaccattgcaaactaaaaagagaatatcaaagtctctagtaatagacatgtattgttattacaacgcattttccaaagatataagtattagacacttggtcttctgacccatccaataccactttgatgtgccattttttccttttgttaggttagttcataaggaataactagcttctatgcaattagttactatatccataataaaatttagtgggaggtttatatctcacagattatgatgaagtggtgagtaatgtttgtgctcacttaaggcaaggagctatgaagaagtagttagaatctttgtattctagcatagtctgggttcctatagaagcacctaaaaggataaaactcataggtataagatggtctacgagaaaaacataggactagatggaaagcttaagttttatgtggctaaaggttatagtttgaaacttttttttcaactatgtaaaaccttttcaatagtggtcatactcaaatccatcaaattactcctatctattatagtgtgtctcatttatgagatataacacccaaacattttcatagcaaaagccttgtgtgtacaagaaggcatagggaagcatggtgatgctctaagatcttgcaggtacatgacaatctactcatcggatacgatgtagggatattgtcatcagtcaagatctggtagtctactcagttctagatgaaaatttagaagaaggcgcaatatattattgaggttaaagtcctttaagactgcaagaataggaaaattatgtcatgtcacctacatagatgaccttttagtcaagtacatgatgcaaaactccaagaagggtttgctactctttagatttgaagttgtctttcttatgatcaatgtccttggacatctatggaaagagatcacattaagacggtatctaatccctttgtaatggatagccttaagtatgtgacgttatgtgctaaaccaaatatttgctttactgtagaaataatgagtggatattagtcaattttctaattagaactttgggtgaatgttaaacatatactctagtatctttggagaacgagggattatatgtttgtgagtttttgcaatgagttgttacttctttcatactggaaaattgaactttgagtttgttgagaactctcacaggtctacctctaggtatgcgtacactaagtggcttatgtgtttcctcagctatattatctaagatactgttatgtgataacaatggaatggtggcatagtctaaaggactaaagtaccactagaagaggaaacatataaagagagagtgttaccttattgtgagatagtacaggaaggtcatatgactatgaagcataatctttttatagtgtctaatctacttttagggctagtaggagtttgttgggattgaacccctaaaaacaagacatgatgtaacaaagttagacttaactgtccacttgttatccctttggtgtatatgcattgattggagcattcagcctatgtttttttacattatacatgacataggtgcactaggagttgcatagaagatacaagtaatgagttccttgtaagtagataaattgtccacaatcaattcatggatttaggcatcagtagtgactgtagtgtaccacctcctaattggaggaaagacttgtcttggccatcgggatgagtttcccatggtgaatacactagtgtatgtgatgcatactagacaggacctatagtgaattgtgatgaaaggctatcaattgtcatgattcaccaagctactataatgcatggaccctcaaccttgagataatattgagtttgtgccaaaatgggcaagaccctaaagtagttatatatccctatatattatgtcactgttgatgaaagctagtgacaataagtattctcaatagaggcactatgatatctcatgggaatgagacaatgtgtccccttaggtgctctaaatgacatgtaatcatgaaattttttgccacaataattcctttagtggaatttgacgtgtgttccttaaagttagagtatgtcaattgatcatataataagtaagatttgtaacttaaggattggagaggtaatcttgttagattatggacaccaattcatgggcagcctacaggcagtggatagtaggtcacaaacccaagcttcatctcattgttatttacataaagtattagagtgcaattgattttctttagtggaatgttgaatcaacttcagaattggattctgagggagccaatactcttatgggtcttagtggtcttcgttctgagctcatataccatgatgacatggtttatgagggttggattgactttatgttcattcttgtgcataagggcattttgctaattttgtaaggttgcataggggataatgaacaaagtgtctggtttggattaattgattaattagatcaccctatgtggttaattaatcaattagaaccttttttgggttagattaagtgacccaagtcctaataggcataagtcacttaagcctaatgggtaatcctataaatacccttttatgggttaaggtttcctaataacttttggtgagagttgtattttacctttagagaaagagatagccatagtctcctcccttccaaagcccgcactttgaagtgccaagattgtagtttgagtcatcgggcaaaaaatcttgagtagatgagacctcattggatgcagggttatagcccacaggatgtgcataggttgagtacatgagaaccacatgggacaagcacaggttatttgcatgggaattgcataggacatgcataggttatgtgcacgagaatcacatgggatgcacacatggacaataacttaggaagagagactcctattttctaggcatgttcttcaatggatggattttggtttgggaacatccagattacttatgagtttcaaatctctagatctttattctataatggttttttaagccattattttccgctacgttagatctaaagagccctagtgatagatgcatgcaccatatgagatataaggtatgagaacagagtgatctgaggtttccaacaattgagcttaagccaaaatcaataggaggatttgacctatgaacaaaataacctaaatagcttatgattttatcgcaatgaatacaatcaccttagtggctagggatgaggttgcaatgtttgaatttacttaagtggagaaagaagtagccccaatgatttaatctacttaaatggctaggcaacctgtcatagtgataaaagactgaaatcaccttgatagcactccattctctcacaatgacccaaataacatgaatggttgcggatgcactagaaaatccctaatcaccttagtggttgtggacaaggtcgtaatgatgattactaccgtagtagctatggaagctttcataacaatttaatcacatgtgtggtaagggttgtggttgaagtgatcacaatcacttgagtggttagtgaaacattgaaaaaaccaaaagtcacttgagtacctagggtcatatttgcaatgcacaaaataaccttaatagcttaggatttggtcataatgaccaaaatcacctaaatggtaggcaaaaggttgcaatgttcgaatccactttaatatagaatgatgcaacatgaatgacttcattcacctgaatggataaggatgctgccatagtgaccaaagaccgaaatcaccttaaagacactccattttctcatgataatccaaatcacctaagtggctagggatgcactagaaagtcccaaatcatctcagtggctatgaacaagggcgaaatgaccaatatagtagttatggattcttgtgtaacaatcaaatcacctatgtggttagggttgtgattgtaaaaaccaaaatcacctaaatggcaagtgatgcactcacaatgacctaaagtcatgtgagtgactaaggacctattttcaattggcaaaataatcttaatgccttcggatttggttgcaatgaccacaatcaccttaatggctaaggatgagcttgcaatgaccaaatccacttcaatagagaatgaagcaaccttaatgacttaattcgctttgaataactagggatgcgctagaaagtttcaaatcacatcaatggctacaaataaagatgcaatgactaatactattatagtggctatgagtgcttttgtaacaatcaaatcacctatgttgttaaggttatgtaataatggccaaaatcacttgaatggataatgatatagtcataaaaacccaagtcacttgagtggctaatggcatatttacaactagaaaaatcaccttaataacttaagatttggtcataatgactaaaataacctaaatgactaaggatgaggttcaaatgattgaatctacttaagtggagaaggacgcaacctaagcaacttaattcaactaaatggctaaggatgttgttatagtgaccaaagactgaaaccacctctattgggaaccttggattactctgttaccataccctagatctcataaaatgcatgcatatatccttaggcatctataaatttatcgtagtagaataaaacggcaataaaaaccattaatcactataaatctagagatttgaaactcatacctatgatctagatgttcctatatcaaaatccatataatgaagaacatgcttggaaaaattggaaagtctttcctcaagttgctgcatacatgcgtgtctcgtgttattcctatgcacgcgacttatgcgcgtcccatgagcttctcgtgcatgcgacctaagtgtgggttttagaaggaaggagactatatatatatattctctttatctctagaggtggaagacaactctcaccaaaagtcattaggaaaccctaacccataaaagggtatttatagggttgtccattgggcttaagtgacttaagcccatcaaggcttgggtcacataatctattccaaaataggtcttaattgattaattaaccacataaggccatctagttaatcaattagcctaaaccaaggaccttgttcactatccctagtgtgactttacgtagttatcaaaacaccctttaattggagccaaaatatgtgctataataacacatattcgatatgatttgtgcatcaagggacactcaaatcacccaatttgacctaaataaatgttaaggctctagccatgagtttaacttttattttagagatttatttcatgtttaagggaagaaaatagcacaagttgaaaccatgttagattttgaaagattaagaaaatgttaaataaggaattgaacgagtcaagattcatggaatttgaagaaatgcatgtagaggatgccacaagtttgggagatgagaattgatcattatgaaggaagagagaaggcatataaatatggacaataaggcatgaagcaagattcatcaagtttgcatggaaatttggaacttaaaatctagtggcaacatgtactttgaatttgaggtgacatttggagtacttaccaaagtccattttggaaaaactatatattgtttcaaatctttggaactaaggaatccaacacttcaaatattgcacaaattgaacttgaaacgaggaagttatgcacattttaatcaaactggtcaaagaggaaagttgagttttaaattgacaacttgagttcgaaatggtttttggccatttaaaactcaaaggaatgcaaggaatattttggaaaatgctaagttcaaatcctactacctatttcaagtaaaaggcacgtaattcaaacttgaaaacatggagttcttaggtaggtagtgggtgagtttgaaattccctatgaatctcgaactcattattatgattttgaactgagcttttcccttccatttatgagttcaaaattgatttggaactcacccaaattttgaacttagccattggtgatcaagtttgagccttgagacacattgacacaagttccaaatgcctctattcaattcaaaacactttgtactcattaagaactcgtaattttttggaagctttttaggttatttataacttttccttgtgataagtgaccaatgagagtgtgacacatgttaggtcattgatgatactatataaactctcttagttctagggtttaggaatcttggatttttttccgaagagtttgacattagaggtggaagaaaacaagaactttggtttgttttctttttttctttattgaatatattgtttttagtttcttttgattcaaattatagatttttaccccattatggattatgaatgtaacatcacccccatgagaggctaaaaaaccaacttgaggcttgaagcatgaaaacctaagggctagaaacttataggaacaatgggtaaattattataataatggaatttattattggttgggttacaatttatcaattttattatcctatccttatgagttagtttagggaataatatggtaggttattaccgatactagtgattttttgtaactcttgatcattagctatcttagtcttccctattgttatttgccccaaaacaaagttagaaggggtaggaatggttaaaagtcaaaccttaaaccaataatcaatctcattcatttgatggttttaggaatctgttttaaaaaatgaaaaattaagtttcagatgcaattttgagttacagaactcaaatttatcgctaccggctaaggatcccaaaaccctaggatcactttacttaagaaacctttgttgtctctatctttataccttaagttagattgtggaaagccccatacttggatcaattgaattaaaaatcaatatttattttgttattaatttaactttttttacttagtttcacttcataaaaattactttatatattatttttcacttatggattcaaataaaagtgattcatttatcccattattgacaaattccataagtcaatccacgaggacaatacaaaaaatagtacaaaagtcgtagtgactctttctctattttttctttactagagttgctatgtaaaaaggcttagtaatttggacaacagagaagatcgatcacccctatgtacaagaatgaacttagagacaatccaaccctcataaattgtgtcatcatggtatgtgagcttagagtagggaccgttgggacccataggagtattggctcccccataatccaattatgaagttgattcaatattccactaaagaaatcaactacacttgagtactctatgtaaataacaacaagatacaaattggatttgtgacctactatccactatatgtagactccttatgaactggtgtccataatctaacaaggaagtgttatcacctattgatattacctctcaaatccttgagttatagatctcatttattatgcgatcaactaacatactttagctctaagaagtatatgtcaaatttcactaaaggaattactgtgaccacagatttcatgatcacatatcctttggattatccaagatgatacattatcacaatcttatgagatatcatagtgcctctattaagaatacctattgtcattaacctccatcaatagtgactcaatccatagggatatatgatcactttacggtctcacccataggtcaaagcttcttgttgatttcaatacatactcaatattctctcaatgttgagagtctatgtagtatagtagcttggtgactcatgacatttgatagtattacatcatgattcattgtaggtcctgtccaatgtgcatcacatacactggtgcactcattatggaaaatccatcccgatagccaaaaaaagtcatttttccaattaggaggtggtgcactacagtttctactaaattacccaaatccatgactgaactatgaacaatttatctacttacaaggaacccatgacttgtatcttctatacaactcttaatccatccaagttatatacaatgtaaaataaatgagttaaatactcaaatcaatgtcaatataccaaagggatagcaaagggatgattaagtctaactttgttacatcatgtcttacttttaggggctaaatcccaacaaccttgatgacactccattcttccacaataacctaaatcacctaagtggatagggatgcactagaaagtcccaaatcacctcaatagctttggagaagtttgcaatgaccaatactacgatagtggctatggatgcttttgtatctatcaagtcacttttgtcattagtgcattggttgtaatgaccacaatcaacaaaatgattagagatatattcactaaggcccaaagtcacttgggtggcaagggtcatatttgcaatgagcaaaataaccttaggggcttaagatttggttgcaatgatcaaaatcatctgaatgcctaaggacgaggttgcaatgactgaatctacttgattgcaaaaaggcttagctctaacattttaattcacttaaattgtaaaaaccctagttttagtaataatacttttgaagtttcctttaaaccatctttttactaagcaagcaagatcatgacctttttgtctatcccttaccaagcttaaggcatcacaatccatgcaactaaggatcttggaatacatgcaaccaaacatgaagtatcaataatcatgcaaccaagtatgaggtctcaaaagcaagcagtcaagtatgaggtttgaaaagcatacaaccaagaataaggtgtcaacgagcgtgcaaccaagtatgaggtgtgaaagagcatgaaaccaagtaggacatgtcaaaagtatgtaactaagcatgaggtgttgcaatgtatgcaaataagcatgagatgttgaaatgcatgcaacctagaagacactaagccgcctttatcatgtgacacctgttaggataaagcctttaaaagtatgacatgatgtaacaaatttggaatacattattcatttaatgatatttcaggttcacttttatctattcttattccatgcattatactctagtaacattctagtctaacatcttttacattgtacatgatttaggcatattaagagttgaacagaagatccaagtcatgggtttcttgcgagtaaatgatttgttcacaattggttcatggacttaagaaatccatttgaggttatattgcactacctcctaattggagggatgactggtcttggccatcgggatgtggttccatggtgagtgcactagtgtgtatggttgcatattggacaagacctacggtaagtcatgacataaagctattaggtagtcacaacttcaccaatatgttatactatataatctctcaaccttgagagaatattgagcttgtgcaaaaattaacaatgactttgacctatgagagagatcgtaagttgatcatatattccttatggattgggtcgctattgatgaaagtcggtaacaataggtattctcaatagaggcactatgatatctcatagaccttgagacaatgtcccattaggtgatcctacggacatgtgatcatgaaatatgtggaaccgtaataattcttttaatagaatttgacatatgctcttagtgagctagaatatttcacttgatcacataataggaggatctataaatcaaggattgtagaggtagtcttgaaaggttgataactttcaccttattaaactataaacgattagtttatggggagactatatacagtggatagcaggtaataaactcaagcacttggtgtctcatcctaatatacataggatattagagttcaattgattctctgtagtaggatgttgaatcaacttcagaattggattttgagagagtcagtactcttatgagtcctaatggtcctcactttataattaatcaagagtggcctaggatagatttctatgtcttacctttctctccctacagttcagagagaaaaccctagccttcacctttgagatttccatcatctctccatcgtcttcaacataaagaagagtcattaagcagaagatcaaagtgtttacgagattcattacaactttggagtaatctacatcaactagaaacgatctagaaacatttagataaaaggtatgtggttttattcgctagatgtatgttttcatgttatcaatattgtttctaaatacctagttttctattacgacatatttagagagcctaggacagatttgcatgcaccctatttaagcatgttgactcatgagcttatcttacctgccaagtagctacaatgatcaagcacatgtcatgtgtcatcttcatgcaataagagagacactaaacacttccctttgattgacacctagctaggccatgtgatgagtcacctatatgttctcttgctttggtttcctataaataaggtgttcccctaccaagaaaggaaagtagagaagcatgaaaaagctcctatagtagtgctattccaaaggttggatctttgagtcgttgtaacaaatctagtggacaatttcagtttaaaaggtgagtgatcttatagtgtatgattttacatggtttattattattttttaaaatatcatgtttaatttatttattattattattttaaatatcatgagatatgatttaaaaatgtgttggtcaaatgctatgtttataataatatgtgctcctagtatattcgatatatatgtatataaataattaatatagtttggtgataatgaagtgatgagtacaacttagggaagctttgtctaaagaggttgggttttaagcggaaccattatgacctttccaatctttcttgggaacctacctagtatgtaatatttattgaaaatcattggtattgtcattatggtacattactttattactatggatgtgattgcaatataccctagacctatatcatgctgtagaaatgaaggggcattggagtagtttgtatggcatgtagggaaatgtaagggcactatgtctataaggcaccatgatatgtgagacatatgtcatatgtggatgtatatgtgatatatgtcgacgaagaaaggggcactataacaattatattgcatgatattgggatgtgccgagagttggagtaacattgtagtcatggatcatgcatgtgtttgattgattatcaagttatctgatgttgtatgcctatttgattattataccatatattatttacattgagtgttacatgtatgatgaaactcctttttatattttggactgaccatcctaaaacctacgttatataatcattcattgagttatactcactttgtagttccttaaattttttagataaggacctaatataacccgatactaagcaagttcttaggacaattaacaagacaaatagcccttgttaccctttcctttttagtgctttttggatatactactaacatgtaactatttctttaggtatgtacaaattttggtcccttaaggatatctcaaaagggtaatgaatatatagttcctttaatttgcttctttgtgctgctttgacatagtctttagattagaagggagacactatcctacatgggtgacgcctacaaggacgggttgtcacatgaatgttaaagatgctgtcatagtgaacctaattacataaaaatatttcatatataaaactaagattcaactatttagatttttttttatatgttccttaaaaaaaatgagactccaaaataaataaatcaataaaatgaaaattttaaaataaaaaagggttgactattgagtatggagtgaggatgggttcatcgtttccaacttcttgcaatgataataaaaaaaaaattgatggaattaaaacatttgttatttttcttcatttatttttttaacttgattatttttctccaaaattttacaattaaaatagaaatttaaagaaatagcatgctaaaatgtgcatgttctatgtttccttaaataaatgttaaaagtatttgttatttgttttaataaacaaaataagcagatacttttagtgaaagtttaactattttttcttccatctatctatgaaaataacattatttttttggtattatataaattttttaatccaattataatgattaaaattcaaccattttaagtttaaattttaaatattctatcattcaaatctaaagattattaaataaaaggaccacacatgttcttaaagcaagatatatatgttagatatatatatcttttggggttttctccacgcggcctgaaagctgctttttcactttgacattagacaagtaattaagttcgaaattttattttaactcaataataatacgattttccatgttttatcccattcttcatatttaggttttttttggtttttgtttttttttctttgtattatttatttatgtatactttatatcttattattgattctaccatataaaactcaaatttaaatatttagattatgttgggttctcaaaaatttaggaaaaaaaaaagaaaaaaaaagaggaaaaacaatttaaaattaataaattatttttatatattatttaaaatttatttcatttattttaaataatttgaaaatatataattttttttataatcttaattatatttgatttttattaatatttatttttagaataatttaatataaaaaattattatttttagttttattttattttattttcctttcttcatactgttaagcaaccaaacgtattggatataccagggggtttgtaaccaaaattcctttttatttattcaattttttgaatttaacgattacgaaaaaaagcattagaaaaaggttttccaagacggagaacattttctcatagtttagacgtctgtagtcgccacctcagcaccactccaccgacctcgcctt

SEQ ID NO: 12877 - DNA, 11111 bp, Vitis vinifera
  Intron number 11 from transcript GSVIVT01012969001 (locus GSVIVG01012969001) derived from phytozome v7.0 (chr-ID chr 2; pos 11555144 to 11566254 reverse strand)
tattgcatattctatcaccaccaactctaagatcggtaatttactcacatttcttctatctttttctataggttcagctgagcttaaatttctctcataaaaattttgacattatgacacatacatgcataaatactagaaatatagtaaacacatgaggtaaccggtgttgaaaatttgcatatgttttgttataaaaggtaaaagaaaatgaatagagattctctttttcatacttatcttatcaataaaatttgatgtatgtgagaaaaggtttttaggtttaaactaaaacgtcatctccaatatgcccttgcaagtaagtggcaatagataaataattattttgttgtgaaggatcagtgagatgtgtggtttacgatagcttgtgagaatgtcaactgtttgatcctaagtccaaggatactgaacttgaagtgtgttcttggtagctttatctagaaaaaagtgacatgcaacttcaattgtttcatgtgctatgcaacttcaattgtttcatgggctaaggaaaacaagatttgctgttagatatgtggctccaacattatcaccaaaaatttgcacattgcggttagggaacaggcaaatccacaagtatacattatagctaagtatggcggttacatcagcatatgcatggcattgaaattctgcacttccgtgagccattgaccattgtttgcaataggaccatgaaatgatgagttggacaaaatatattgtataatctccaaagaattgctacatgttagagtatgttattgcaatatcatattcgggtgttatgattttctctttttagactcaatagcataaataggtggaaaggcatgggggagttaacaagacaaaagcctaaacctcttccatctcttctttcttctcttttccctcatttgtccaaacgctagaatcacaaacttatagtttcaacatggtattagcacacgatcatagtatttcccctagattttcaagacaattaaaagaattagaaaaaaaaaacctatcagcatgcttgcaatatgatggtgtcatgttgatatcatcatcttgagtggaaatttgcaggccgatctgttatatttctggtaactgatgttttggaactagttttgaggttatttgattgaaattttgatttttttattttttattttcgatattttgacccttattcttggatttgaaatttagcactgtttggacggatgtttttagttcaagttggtcctgttgatttcctaatttattttattagttattttattatatgtttatttatttatttttttgtgcatttgggaatgttctcttttggtctaagaaggtttatattctgtttctggactattgagggttgattagtagtgatgtgcttggtttagttgcattggacaaattgtttttgatatttaggatgaaagggagttcaaatttttatgcttcaaagtgtttggatcccttaaaatttttcatggctaatgataagtaacaccttcttaggtatgatggaataccaaagtcaacatttaaaaatttaatggtgttaattatgttgcttgggctcatactttggtttttctacatggaaaaaggaattgatgttagaaatatgtgaattccttaattttagggatctaattgattgttattttgttaccttatatattcctagtacttgattttgttttgcctttttttctgataggtagacaagaaaatatattaaaagcacttgaaaagtggcacaccaaagtacacaatgtttttttttttttttttgataggtaagaaaagatctaatataaaaagaggcgccaaaaaagcgactcacggtatacaatacctatacacccaccaccaaaacgaccaaaaaagaagagaaacacctagctggcccgacaaacaaccttagctagaacccaaccaatcaataaaactaactatagttagagggcaattaactataaacaacttgacctctgaccaaagagaaagaaaaaaagagtatttgagtctcgggattgacaacacatcatccttgaaggccaatctatttctcgccttccaaaccatccaaaaaatgtaaagaggagctgctctccacaccttcttgcgctttttgcccacaaaagaaccatgccaactaaggagagtctctctaactgatgacgacaacacccatgacagcccaaacaaattaaaaagcaaatcccataagacccttgtttttgtacaatgtagaagaagatggtctatggtctcctctttctcaaggcacataaaacatttatttgtcaaggcccatcctcttttttgaataagatctagggttaaggctttgccccatgtagcctcccacgcaaaaaagctaatcttatgttgcacccacatattccaaatgcaactagaaggaaacaaagaagggcaacctacttctagagcaaggtagagggacttgaccgagaactttccactctttgtttcggtccaaaacaccatatcatccacatctctatgcactctcttcccatgaagccgctccaagaatctttctgcctcctccacctcccaatcattgaaggctcttgaaaaatagggattccaaccccccaacccccctgagccaaggggtcccaaatatcggccacccacgcttccttatcaacagacaaagcaaacaaagaagggaatgacacacacaaagtggaatcctcgcaccatctatccctccaaaattcaccctccgcccattacctataagtaaaaaaatcctagagcccacaaaatcccaatccatccttatttctttccaaagcccacaccatgcacctctctcacttcccgagagcaccatccccctctttcttccccatacttccctctaattacttgattccacaaggcctctctctcatttgtgaaacgccaattccatttacaaagaagagccttactgagattggatagacatttgacccccaaaccccctttctccttacttaagcacactaaatcccatattactaatgtggctttcgctccaaattaccacctcttaaaaggaaatctttttgaatttgctctagtctccgtctaactgaacttggcaagcgcaacaaggacataaaataaatgggtaaattcaacaaagtgcttcaaattagagtcgccctccctctcttagatatgtattgtctcttccacatagccaaccttctacggaaccgctcttccactccatcccacactatcactgacttaaacggagcactcaaaggaaggcccaaataagtggatggtagactacccactctacaaccaaaatccaaagcaagatcatcaatattctccaccctacctattggaattagttcactcttttccaagtttattctcaacctcgacatgacctcaaaccacataagtaaccaactaagataggtcaaatgatcttgagaagcttggcagaacaccaaggcatcatctacaaacaacaaatgagaaatccgaaccccttcttcacttgtacccttcaccttacaagccgacagaaaacctccatccacaacccttttaagaaaacaactaaacactttcataacaatcacaaataaataaggcgaaagtggatcgccctgcctcaatccccttcagctttgaaagaaacccgtataggtgctattaaccagcatagagaagcttgcattggaaatgcatcacatgatctacccaatccatttctccctaaaacccattttatgcataactgtgagaagaaaagaccagtccacattgtcatatgccttctttatgtcaagtttgcacaaaataccattctcattcttctttaggaccacatcaatggcttcattagctatcaacactgcatctaggatttgtcttccctccacaaaagccccttgggccttagagactacctttccaaccaccttttttagcctattggctaaaaccttagccaaccacttgtacagacttcccaacaaacttataggcctaaaatcccttaaatctttaggccccgctttttttgggattaaaaccagaaaatttgcatttagacttttaacaaatttaccatattcatagaattcccttaaaaaactcatcacatcatctttcacaaagtcctaagcaaactgccagaaagccatagagaagccattaggccccggagctttgtccccactacatcccagcagcgcaccaagcacctcctcttcctcctctttcgtgaacggcacctccaaagcaaaagcatccaaattctccaaagtctcacactacagcccggataaaggaggacaccagtcccccaggttggacagtaaagatcgaaaagcattgaccaccccttccttgatttcagtctcctccgaaagctaaacaccattaatcctaattttgtccacattattctttcttctgtgagcattgactatcttgtgaaagaaacccatatttctatcatcctctttcagccacactttcctagatttttgcctccaagttttctcttctagcaaaacccattttttatattcttccctcgcttcttttctagcttccaactcctccaaagatagtttgctagtcttctccttagcatcctaaaattccacctgatttagagccaaatccttcctgaattcaactcttccaaaaatatctctattccactccttcaatttaaacttcaagacctttaatttttccgccaaaataaaacttgaagagccactaaagttgtcctcctcccaccaagacttcataatatctttaaaaccctccacttttaggcacatattctcaaatctgaaaggggaggggcctcttctcagacccctccatctaaaagaattgggaaatggtcagacacaggtctcgagaggacacattaccttgacccgctaaaatggcagtcccactcatttaccaaaaaacgatttagccttgacaatgattgattgttcaaccctccactccaggtaaaaggacccccaagcagagtacacaatgtatataagagacaacaaaaataacatctctttccttggaactcaaccaatctacaaaatactttcatggtcatagaacaatcatctaagtacactttggcccaatccaaaaagatacataatggaaaatttgattgcttgaactaactattttgcatcttcaaataacctatttctttcattccataacgcccaaaataggcacaaaagagcaaccttccaagttttcttctgtttcttccccataaaggaaccatgcttactcaagagatttccttttacaaaggagtgcattacctatgtcactccaaacaaaggaaagaccgactcccacatgattctcgcttaagaacggtgaagaagcatgtgatcaaccgactctttttcccttttagaggggtaatggtaatgtctattccttataatccatcaattttttctgagttgatcaaatgttaaaatccttccccaaacaactttccttacgaagaaatccacctttgttggtattcattggtttcacactatgcttgtggggaatggctcaattcttccttgggctaaggaaatgcaaaaacatttgatagagaacttgccaagcttggtttccttttaacctaatccatccttctcattctttctaattgagctcaattttattttttggaaaaaggtcatttgaataatcttttaagagattatcttgtttttagtttaaagtttattcaatttcaattattatcatccaaatttgaataattgtaaactttgagtctttcaaagttagtagcgtagaagtaggaaagaaatctggttagattccaatttgaaccgactttcaatttctatttatttaggccttggttgtatttcattttttttttatcaattttatagaaacatcaatttctcctccaatttcctacggtctacactccttacaagtctttttttgataagataagtattgtattacggggagacgctaaaatagcgactcaaaatgtacagtaaagagaagtaaaactcacccccttacaagagaaaacaaaaacctgttcacaaagatatacaaaaaacaacccctcccttaatgtggacccacctaatctaaaagttccaaaaaagtcgatggaccatcttttgtaaacaatttagtccccaaccaaagtgagttaagaaaagaagttttcaacctttggatggacaacacctcatctttaaaggcaattttattctttgtcttccaaactatccaaaaaattcaaacgggacccgctctccaaactaacttaaagaaaccgttccaacccaatagggtttccctaaccgaagacaaaaacacccaagacactctaaaaagagtgaaaaacaactcccacactgcccttttcttctcacaatgaagaaggagatggtcaatggattcctcttccgcttgacaaagataacatctatttgctaaggcccgacctctctttttaacttggtccaaggttagaactttgccccaagatgcctcccaatcgaaagtgccaactccatttgcaaagaaggcccttattaagtatagaaaggctcttaacccccaatcccccttttatcttatcaaggtgcactatttcccatcttactaagtgaggtctccggtctagggccccacctcctcacaaaaaatctctctaaatcttctccaaccttaatttgaccccccttggcatttgtagaatagacatgaagtaaataggtaagttggatagtgtgcttctaatcaaagtaattctccctcccttggagatatattggcgtttccacatagtcaatctcttatagaatctctcttccactccatcccaaactgccacagacttgaaaggagcacccaacgacatccctaagtaagtggagggtaaactacccaccttacaaccaagctcggaagctaactcctccacattctcaacatttcccattgggatcagctcatttttatccaaattaactttcaacccttatattgcctcaaaccacataagtgtccagctcaaaaaagtcagttggtcctcattggccttgtagaaaattagggtatcatcggcgaacagcaaatgggagattttttccccttctccccctctccccctgaccttacaagtcttaatcgatatgctttcttttcttgttgcaatgcccacttcataaccgtactctgataccacttgtcatggacttaggcctttcctaagcacatgtgcgacacttagacaacacaagccacttgttgctaagttagctttccccacatacttagttagctatgctaagtaatgcacacaactcggaagctagggacatgaaggaagcaacacttggagacttttggaagaatggaacttatattgcactaaaattctttacaaggctagatttctctcaagtgtttggtgccttggctaagaggcaatcctctatttataagcacctaaagaactctctggaacccttgaaggttccttacatctctagaattctctagaataacctatacaaatcctatgtagtacaagacatctctggaacactttagatttctccacacacttctgttgtcttccatcctcgtgtagagatgtgtggacatctctaggtggttccaaaaacttcctactctcttatataagcttaaacgagggtcattttgagcaggttgtgacaatgtgtacctaaagaagtgagcaatattgcttgtgatggggtatattgactcgttaaattggttgtgacattagggggctatataccttgtggatgcacacttgcaaagtatgcaagggtcattagagttatgatcattgccatgacctttgagcatcatctgaagaaggttgacctcaagaagaagggtgaccatgagaagaaggctaaccactagagtgttggattgttgatgattggtggattagcaatattggtagaagtaataagatcactttgaaaatcctggttgatgcgaaattccttatttaatagagaaaggaggtaaattggtaggatgctagttttaacctgggttgagattgaagttttgaatggtttgctttgaaaagaaagaccattatgaatataaagaagaaagattcatcaaagaaagtataattgacaaatactagttgatacttattgacaagctcaaaacctttctttttgaaattgtataagtccatgaacaattggagaatgcatgcatgggagtgtaataggaaagaggtttctagactagtccaaacttcttgaggggtattacatccaatgactttaggatggactttttggagagggagaatagtagccaatagagaagttgatcttagcattgccaatgagtggatttgggattcaaggtggagtttagtagcaacttaagagggcatggaagagatctatcaagttatcaacacaacaaagaagctcaatggtacaaagttgtggcaaaattttgaaaagccataggtgatagatattatgtccaagcttggtgggaatcgtgttggtgtgatattgggaagaatggaaaaaatacgttgaacaataatagaggaggaagagttggcattggagcaagagacagatgaagattttagcaactgaataaaatatttactcttatcctactctaatagcatatatgggtagagcttttcatgtgttttattgaaagtacaacaactataaatataggaggttaaaccaatcaggtaaaaaacaatcagataaagattgcctctttccaccagtctattggataggatgttatcctatactattcaaattgaccttattaatacattttggcatataaaataatataattaggtttaacttaatcattatctctactattaatcttccatgtgatccatgaacacaatcttgttaatctatttagtggtggcgctcttgattaacttcatgctgttatttcatttagttttggacttaagttttgtgaataatattcttatgaaacctaatttcatctttgcatttttgtctgctatctagttcttttctaactcatgcatcataatctttcttggatccatattcaatatgaattgtggttggaacgtctacagtttgtcctgcttgatttagagctcgttttttttagtgttctcttggtctaagtgttgggttccaaatatgattccctaacaaactgatttcttttttgaaggaaagaataaaatgtaacagaaaatgcaaccattttatgattccctaatcagaacatgtttctttctccccctcttttttggtaacacacaaagtggaatcattttaagagatttgaagaaatcttaagttttttgaggaaatttattgttagcttgtgactattctacatatattattaaagcttttatgtcattcctttcaaaatcattaatactttcctatacaaactattaaaatttctaatgattaatttaagaagttcttgagtgaaactaattttgtatttggcattgaagtaatgactgtggatacagacagtagtatttcctgacatagacatgaggcatttagctttctgaccaaaatcaaaatatcagggatgaaaatatttctttgtgaattttatatatttaaaaaatggatttattttgtttaactttttttatttattctttttggtacatgggagcatcttagagaagaaaggtttctaaacaacatacattattcactttttctattagtcatgaaataaatccatgtttccattctctatgtgtctcctttttctcagtaatatttgtcttatctcatcaaatcatctcatgcctcttttttttcatgacctaagagtgtctataatgatcttcctaactcaactatagaacctatttccatacggaaatattttttgataggtatttccatatggacatatgaatgcagggaatctttaacacgatattgtccacagagagaaattccaaaggatttacaagttcttcaaacacttcagcaaattggagagttttcatcagctatgttctaaaaatcttctttcgtgttttagactaatagaactaatttttcaatttgggttgggaagtgcctagagcctgttcgatcagttcaaactgttagaaaaatggtggtgaaggttaagttgaaaggaggggtagcttttgaagattcagtattgcataaaaatatggcctgttttttatggttagttgacatactgttctagtcccactgacactagtttttttttgcatattttaatatcaaaagttgctcattccttaaaggacatgccattatctgttgagcaatggatacttggtgagattctggctaaacaattgaagagaatctggagatgatggtcatttgggtgtttaatatctacattttttttatcatgcttttgacttccattgaaattatttcacattctgttagaacttcctcaagtttattgccctgtttgacatggatttctgaaaatgaatataccttccttaagatcttgatgtatttgtcaatatcagctgctatgcccttggttgttgtgatgaaaacaatagatcaatttgatgtctttttgtaaaaaaatgcagatacacatgtaagttgttaagtatggtattgtgttgtgatgctgaagaccctggcatttgtcatatttcagaaacctatacagttacagagattctgaagaacagtgctgagaactatgaaatgctgatcatattttgaacttgaattgacaaaccatgaatttttagaagagattgttgtcagtagcatcggttcttttagctgattggcttacagaagcagttgtattatcctctgtttaaggacaagcaactaaaattactttttctaatttttttattacaaggatagcatatctctctcattttgcagtgacaaatgtgggtttgcttttcattatgatttctaaaacggtttgattaattttcaggtggcattgcacttactatcagaaagagaaaggaa

SEQ ID NO: 12878 - DNA, 16373 bp, Vitis vinifera
  Intron number 3 from transcript GSVIVT01021574001 (locus G SVIVG01021574001) derived from phytozome v7.0 (chr-ID chr1 0; pos 7314602 to 7330974 reverse strand)
ctgattacaaaaagtttggaaagggtaagatgtttaggatatgagtggcttatttaataggttatttggctgtgcagttgaagtttgtttgaccatagaaaagatgtggcataagcgcatgatatttgatctctgaggttttagatggcaatccgtttattaattagttcatttatttattttgatattagtaaatagattgtcaagttatatggatacaatacatatgatacatggtgcaatgagacaggttattttggcagtttgtaagaaaaatcaaatttgaattttttttctttaaagaaatactttaaggatgatgggaagataaggaaaagatagaatgatcccatgtgaaaacacttcatgcttgttattaaaggcattgttgttaaaaacttacgaaacatgatatgattgataggatacatttctaatttaaatcaattcgtatcattggtgcatatcttatctaagtgtatcttattattgactatttttcacagtttctaagaaaaatcagattggtaaaattttttcttaagacaattatttattaattgtttaaaatattctttaagattggaaaataaaatattgatcataaaagtaaaagagaaaggttaaatattctccacaaaaaagcttcatacttataaaatgtacacatgtagggcttgaaacttacgtaaatgtgttcttgcaaggaatatttgagaattattattggaatgatttaaatgttagcattgaaattgatggtgaaataaaaattgtacttgatgtattaggttgcgttcggtttagaaaatgttttgtgggccttgtttggtaaccgttttcgaaaaaagttttgaaaaactgttttttagaatagcttttgaaatttcttttctaatgtattgtaaagcaaatgtttgtttgagatcttgaaatgttttttttatcgaacatgcccttattattattatttttttgaaaatatttttatttccttttttttttcttgaacatgccattggttaagaaaagcccaaacttttttcaaaaaatgaaatctgtaaaatattgtttggttttgaggttttaataatttacaaaactgtgaagaaaattatgattaaaatttttatgtaacacatatgtcatgttatgagatatattattataaaagataatattactgaattttttttagtattcatatattgtgatattatataataattcatatatattgttataaatatgcacattatttgtgaacttagtattatactgctttttttcattattgtattttctttactatattttttattttaaaatggtataataatatattctaatatgattatatttaatcaactaaaataattagtttctaatttaaaaatatatacacctataataattcatattttaataaataaaataaaaagtacttatattgtacttttaaggtaatgtttgatttcaaatatgcataagatcatattttattcatattaatatttttttttatatttttaatattcatattgcttttatattgtgggttccacaaggtcgtttatgtgattttattcccttctttgtttgtaactttttaacttttacaaaatgattttcactttctcttaagaattttgaaaatgccaaattggtgtgtgatgattgaagcttgaatattgaccttgaagatgatgataaatgaagacttctatttgatatattttctttccaaatcctttttcctccttgggggagggagtgatgatgagcttggaaagttagtacattgaagatgatacataaacacatacatatcaaaactaaaacaatatgtgattggttggaacttagaattagaaaatgttattaaaaattgaaaatgtttattttgaggattttgggatgagtctatgcaatgaatgttgggaatgtgtgtaacttgttaaacattacaacaagtaatatttgggtggctttgccaatccacaataattatcaattagtaattgggtgacaatgccgattcataggaaattaaatgagcaagttgggtggctatgccaaccattagaaatttaaataagtagttggggggtggctatgccaacctttgtcatcatatcaatggtattcttatttgtgcggttctttcttacttggtccttgcatggtacatagtgtttttgcttaagtctatagcactttgacagtcgcaatatactatgtagtctttctgtctcaaatctagttcctgaagaaaccacttcatccaaagcatctcttttgcaacttcagtagctgctatgtactctgcttctataatagataatgaaacacacttttgtaactttgcctgccatgatgtagctccgtgtgcaaatgtaaataagtgcctaaaagtagattttctactatctaggtctccaaccatatcagaatttgtatacccttcaagaaatggttttgatccctcaaagcttagacatacctttgaggttcccctgagatatttgaagatccatttcaccgcttctcaatgtgtcttatcgggatttgctagaaatctactcatgactcttactacatgagaaatatctagacgtgtacacaccatagcatacatcaaacttccaattgccgatgaatacaaaatgattgacatttcatctttttttttttctctgtagatggacaagacttcttgcttaatttgaaatgtccaacaagtgaagtagaaactggctttgaatatttcatattgaacctttctagcattcattcaatatatctctcctgtgatagccacaacttgcctgccttcttatctcgtaggatctccatctccaagatatatatttttttttgataggtaaaggaaattcattaaaagccaaaaaggctaaagtaagagtatacatggagtatactaggatacaaaagagcagaagacaaaaaggcaaacaagcctgacccttacttggtagttaactagtctacaaaatctatcaaagagaaagtgtgttcctctatatacaccctagcccaatccacaaaagtgtacaaaaaaatggatttgatttcttggtcattcctctcaacatcatcgaagatcctcctattcctttctttccaaatggtccacatcaagcagaggggggcatctctccaagctttctcccttttcttgcccacaaaggaaccatgccatcccaagaggttcctcctcacagaggagtgcatcacctattgcaccccaaaaagggagaagatcagaagccataacattctggtcttctcacaaaacaaaagaagatgatctgtggtttcctcctcatttttgcaccaatagcacttgttgggggtgctctagccacttctctttaggcggtcaatggtgagcagcctgctccaagctgcctcccaaccaaagaagctagccctagttggaacccaaggcgaccaaataattctagccgggaaaggaggtctaatgccccttgagaatgagctataaaaagacttgactgaaaaggtcccattcttgttctctctccaccggagcaagtcatccacacctcttctaatggtcaaaggatgaagcttgcttaacaagctttctacttcccccacctcccaatcatttaggtgtctattaaaacgaagcccctagttgcccccaactccgttctcctcccaagccttagcaacccagccttctttgttgacggttagattaaacaagtttgggaaagcatcttctagagattgattttcacaccacaagtccttccaaaatttcactctaatgccatcccctacgatgaagcgggagtgagttcgaaagttctcccaaccatttttgatggccttccaaacccccaccccataacggtctcttacacctttggagcaccacctcccttcttgaaagttgtactttctagagataatttgcttgcatagggactcattctcattagcaaatctccacaaccacttcccaagtagggccttgttaaagatagctagactgtgaatgcccaggcctccatactttttagcagcacaaataacctttcaactcaccaagtgaggtctattctctaaggcgcctccgcccaatgagaaatccctttggatcttttcaagccttgcacacactctcttgggaatcacaaaaagagaaagaaagtaggttgggaggctagagagggtgttttttaccaaggtaagccgggccacctttggagaggtattgccttttccaaagatacaaccttttcctgaatctttcttccactatatcccataccctagtggatttgtaaggggccccaagggggagacccaggtatgaggtaggtaaactcccaatcttacaacccaagactgaggcaagagtctccataagaatgccttcccccactgggatggcctcagttttgctcaaattaacttttaaccctgaaatcgcctcaaaccacatgaatgtccagctaagatattctaactgttctgcatcggtgtcacaaaaaatcaaggtgtcatcggcaaacaagagatgggacatgatcagcccctctcttcctcttcctcccactttgaaactggaaataaagcctccatttcttgcacttgacaacaattggctaagagcttccatggcaaaaaaaaaagagatagggggaaagagggccgccctatctcaaacacctagaactacgaaagaagcccgaagggctcccattgatgaggattgagaaggtagccgtagagcagcaccatttcatccaattaatccatctatgcccaaatcccatcctggacatcacatccataagaaagtcccaattgacatggtcgaaagccttctcaatatccatcttaaaaaggaggcccgacgtgttgtctttcagtctagaatcaagggcctcgctagcaattagaacaacgtctagaatctgtctcctttggacgaaagcttgccgagaatcagaaatcacctcccccatcactaatttcagcctattagcaaggaccttggcaagtaatttgtacacactccctactaggctgattggtatgaaatctcttaggtcttcggctccctcctttttaggaatgagcacaaggaacgtggaatttaagcttctctggaaggtcccatggatgtaaaacttgctaaagagtcccaaaatctctgatttaatgacatcccaacaaaacaaccaaaaggccattgtgaagccgtccgggcctggggctttatcaccccagtagctgctcaaggctgcaaaaatttcttcctcaaaaaatattacttctaggctgttggccaagccttcccccaacttcttgaagttaagaccattaatactaggcctccaatcccctgattctgagaggagggactggtaggctttgcaaactccttctttgatttcatcattaaaagagagagacacctcattcactttaatttttgacaggaagtttctccttgccctagcattggccattttgtggaagtacctagtatttttatcaccttctcttaaccagatttctcttgacttctgtctccaagaagtttcttccaaaatggcccatttcttatagtccttaagagccaactttttagcctccgcttctctaggagtaagagagttctcattctccttggcctcccaacactgtaggcaggagaaggcctctgctctattgaacgagacattgcctaccacctccttgttcaaattcttcaaatccttctttagcgctttgagtttcttggcaatgcaatgactgctatagctttcaacagaataaccattccaccaactgcttactaggtctttgaaaccttctattttcagccacattttttcaaaacaaaaggggcttttgcctgaagagaagcctctagcttctaggactatgggattgtgatcaaaaaccagatgaggaagagcagattgtgtgatggcagaaaagtggtcctcccattggtccgaaatcaagaagcggtccaatctagaggaagcctgagaattcaaaccccctatccaagtgaaaggtcctccagccagtggaaaatccctcagccccaactcccctatcacctctgaaaatctcctcatttcagctatgagtctaggggcattccttctttcctttaggaatcttacagtgttaaagtcccctcctatgcaccaagggtcctcccaaaggccacggatggctcccaactcctcccaaaaatcttctttctcgcaaccaatcactgacccgtacactccagagaaaatccaatagaagccattagcgcagtttctaaaatgaacagagatggagtaccccccgctttctacctccaatttctccaagactctattatcctaaaagagaagaaggcctcctgccgcacccctagcatccattgaagcccaattaagaaatcttcctactcccacgctttttaccatttacagagacatttctttcaccttcgtctccaaaaggcaaaccaaatctggtttctagttcctcaccacacccttgatcaactttcttttctcaatatcattaagcccttgaacattccaacaaaggattttaattctcattaatcaactggaatcaattcctaggagctttgaccggattttttagctatccctgatgtccccccgtaactaactgagcattctactctttttaagtctctttcaaaacgggtagtgcaagattttttcttcttgcgtctcttgcaaagggtgctacttctagtcctcaacttcagtttcttaagcaaggccggaatttcgacttcatgccctttgacaggcattcccaagactttactaaagtgaaatagtttggaaaggtcctcttccgaccatccttcttcgccaggaggaacatccgacagatctctctacttcgccacatcattttccaaatcagaactcggggctttagtcagaaccactgtcaacccatctttgagcatcatggacaggggattcggcgaagcttcagcctcccttggcatcgattccacaagaccagaacaggatcccccttccctctcaaaccccgtatcccagaaaagagtagaagaagaagagagctcccctcttgaggaaatcggaggtaaagaaagctgaccttgagaattgtgggtttcgacgggggggggtgtggaggggaagtctcaactacaggcgacgacgcttccatctgaggggtcctgttggtggcaggagtcggtgcggggattcctttcctcagacatggcaagcatctaaggcttccttgccctaagtcgccagagacaatgggcttaaaggggttccccagtttggcggagacgtgggccttccccagcccaggcccaaaggttttaatgcaggccaagcccgattgggccttagcatccagatgctgacccatttcctcttcgtaggcttgggtaaggcagtcagttgcaacggtcttgtctaaggcaggggcaccactccccaagaccggcggaggcagcttttcaggctgcggagaggttgaggaagagggcgaggtgctcacgctcccctcagcccgtgaaggggccacctcgtcatccctaagcttccttgcaccgagcccgtgagaggggaggcacagtggagatgcagggctcttcttcccaccagagttgcagagcgaagcaagaggaactagctaccacctgcaacgagcttggatgctgccaatctctagtttcgacgaggactctggcccacttaagattccgacgctcgactgtgttttcatccacagccacgaatctaccacaagagtctccaaacctcttgaagaggcttcttccccaaagatgcagagggaggcccaaaattttggcccacacaaggcgcgctccccctccatctccctcaagacattcaacggatggattccatttttctagacggagcttcttcctctgaagtgtctcacccctgatttagacaccctctccgcttcatctgcaaattcaaactccagaagcaaaagattttctctcacgtctgacagccagaggttcccttccaagaaccaagagtttttcgcccacgaaccaaaggagacaaggtcagggaggcgacctccctcccatatacccacaagacacttgcccaacaactcctcatttctaacgaggaattctttctcaatttctaaccaaacggcatcacgaggcacgaagcaatcctgaagagttgttgtgtctttgtctagttgattctttttttcctcaattctgctaggcgaagcttgagatggcatggggttttccaatagagctcctttccacagaaggggagagactcccaaacttctcagtttgctagcgagaattttccagcctccaacaagccctcttcctttaggaaaagccaaggagaatcttttgttctccgcatctcttacgacacaaaacaagaatctccctgctctattactatggagttccagactgtagtctcttatctccttccgaccaaaacttcctaaaaggaactctctcctttagtccacaacatgactcaaccccttctagcagcaaaaacaaacctttccctccgaatctgatccatgaagagaacttgggatctctttcacagatgttcccacgcacttttcctttgaactcctctatgccaatctcaaacgtcttcaactcaactccaaaccaacacttacccctaggggaagttaccggcattgtcgtgcatatcttggtgcagatcttaagtttcacttgattcttctagaacagaaaataaaatttcattgatgaactgttcaaccaggtaaagctcacaattgttgaactacttatctccatttccaagatatgctttgcaatacccaaatctttcatgtcaaatgtctttgacaattccctttttagttttcggattatgtctgcattttgtcctacaatcaacatatcatcaacatataataagacaacgatgaatttaccataagggaatcttcgaacatatacacatggatccgcaactgttctcttgtactcttgactcatcatgaaagagtcaaatttcttgtaccattgtcgtggtgtctattttagtccatacagacttttccttaacctacagatcatgttctccttcccttttggttgctccataaaaatctcttcatcaagatcaccatgcagaattgcagtctttatgtcgagttgctccaatttgggattcatacttgctgctaatccaagcataactcgaattgaacatatttttacaataggtgaaaatatttcatcaaagtcaataccttgcttttgattgaatcctttcaccactaatcgagccttgtactttagtagcttcttgtcgtctttctttaatttgaacacccatttgtttttgagtgctttccttccctttggtagttttgtcaactcatatgtatcgttcttccgcaaggaattcatctcttcttgcatggcttttatccagtagtctttgtctttgtgagactgcacttcctggaagctctcaggctctccctcatcagtaattaaaatatactcaaaattgggataccttgtagatggtcgatgttctctagtagtttgtctcaattgagatccttcttctagtggaggggcttgctccttttaagaatgggttatacagtaacacatttacattcttttatattgattttctaaggtcaaaatatgtgccatttctaggaagagtttagtagattttggtgtcttattgctctgccttggagtttgtagggtatttccctctataaaaagaatgatggcaaaactttgccttttggcatattcttggcagagataatcttaattcttatgttgagttccaagattttaaatctggtggggtccatcctattaatgaggttgacataggcagccatcttgagaaaccaaaaacattttttggttgccatttttacttttctccaaatgctccatgttgcacatctcccaagccctatttctaacaaataaaattttgccttctttttcttctaataagaatctgcctacatttccatcaatggaggccatatttggccttcaactgttacctataaataataggcttccaggaatcatttggtgatatagagaaacttccaaccatagagagttgtgtagaaaagtgagaaaagagtggtgggtatcataccagagagagtgtgagagagaaaaattagtgctccacagagagagtattgagggataaaattgtgaggattgtgagcatagcttggggtgtgtgaaattcaagtaagggcaatacttgagtaatattttgtcccaattttatcacatagtgaattcttttctcggctttaccttgttgaggtttccttcattctgagggttttaccacataaattgggtgtttcttttttcttgccactttattttctgtagtttgacacagccatccaaccgcacttttattttatgtggattggcactaccacccatttactcatttaaatttctaaaggttggcatggccacccaacttgctcatttaatttcctgtgaattggcattgtcacctaattactaattgataattattatggattgacaaagccacccaaatattacttgttgtaatatttaacgggtcacacgtattcccaacaaaatctaccctttgttcactatgtctggactcctgaattgcatcctagaactaataggctctgatttgatacttaagctgctgcctaagtggtgaatatttaagattcatgtttgtatcagctttgatggcatcttggacccattgtgcttagattgctttgccttaagctcatctaagattctttgcctcaaaggggttgtagatgctctttctagtctttgggggataaggctcctactaggctagatggcttcattatggtgttttagtagtcttgataggacattgttaagcccaaagttatgggttcttttagggagtgcttcgttcaaggctccccccaaaaactcaaacaccactttcttggttttaatcttgaacaaagatggtgaaaaaggattttaggcccatcagtctagtagggggtttgtacaagcttttagttgaagtgtcgacaaataagcttgaaaaagtggtgggaaaaatggtttcaacctctcaacatgcctttgtagagggtggatagattctagatgcagttcttattgctaacgaagccattgactttagattaaagagctacaatgtggggtttattttaaaggtggacatcaagaatgcatatgatcacgtcaataaggccttcttaattgtggttttgtctaaaatggggtttggctaaaagtggattatatagattaattagtgcatatccacgacaaacatttttgttttgttaaatggaatcccatgtggcttcttatggaagtcgtatcccttgtccattagaagggaagtggtggacaaattgagttggaatgaaacaaagtgtggcaatttctcaattagatttctctatgcatctttaaccaagggagttagtgggcctttcccagcaagcgaagtgtgtattacgtgaggacctacgaaggtaggtttctttgcctgggaagcaacttgaggcagacttctagcacttgattagctcaaaaggaggggttggactttgttgaattggttttttttgtgcaaagttgaggagaaacagtgaactcctttctacttcattcttccaaagctagaatgttgtgataattgatattctgtctctttggagtggtttgggtgatggacttctccgtaggaggaaatcttttagggtggcatgactcttccttaggtaagaagcagataaaagccttgagggccactccattatgttgttaaatgatgttgagcattcaaaccaaacaatcaaatgttattttatgtatacttttcaaaattgggttaggttgtatatagaggaccattccatgcctatgatagatcttgtaggttggatgtgctttaagtaaggaaagggtgccttttgtttgtcctcttcttgcttagattaggcgtctagtgtatacattgtgtgtatcttagcgtgtttcccgtaaggctcttttaatactacttctcatttgcctatcaaagaaaaaatgactgtggaaaataatttttttttaattgcttttagatttaaaggtttaggtgaatgttttctttaaaacataaaaaacaaaaatgaagtaaaaataaaaaaaaccctttggttacatttggttggtgggataggataggataagatatgtatatcctaggatattatattcaatagacataatatcctaaggtagcatatccaaatctaatgagatatgacgttctaggatattatatctaatggacatgatatttaaaggtagcatatccaatgagatatgctatgctatgttatatttatatctagtttgtgaaatgaataaaaaataacatggaacatatattatttttcaatgtttaaataaaaattatattatattctaatattttctatttaaaaaaaatgaaatttctcttatgtttaacaatattaatgattaaaatatttaaactttataactaatttttttttatattatgttattcaatatataaaaataatttacacctatcaatatatatatatatatattaaaaatattttataatatatatatttttattttgcaaaataagtattataaaaaaaataaatttatgatacatgagatatgcatatcctatatcttagcatagaattaacatatctcatgtagaaggggtataaaaaagaggatggataatatatcccactacttatcctatcccatgttcagttgaacataggatgggttatgtgatgagactacttattttatcacatcaccaaccaaacatgggatatgatataatatctcctccttatcctatcccatgctatattcaaccaaccaaacatgacctttacaaaggaagaagtgcaagcaagactaagatatccatgtccttcacaaaaatgaagtgccccaaggctaaccatggtaaacatcagttgtctccactggaaatcacattatgatttattgtggaaaagctggtatgtttgggacctcttgctttctttgtttgagatgcagtgggtgtttctgtggacaactaaagagttactggttgtgttgacatgaggaaaagtgtagctagaagttgtagaggatggtctctctttgcttgttttttgtgtatgcatggagggcacaatagaaaggtattcaaagaggaggagctttagaatcagttactgaactcttttcaagtggcctaggattccttttgggtttataatctatctttttgttttggattttattgattgtcttagcacggcccaaggtgtggtagcctttgttgttttgtctagtgttttttgatgttttatccttttttctttttgttcctttgacactctttctatacatcttatgtgcttgggttgcaccacttttggtctggtgctatttattgtatttatttgcctgcaaaaaaatgttccctctgaactcctcatgagtagccacattgagggaacaaagaatcaaattgaacacaattttcatgctatgagtaataggtgaaatctctcttctgtgatagataatcctatgtgaacctgtgaacaataccttcgtggatctttcgctatagagtagcaatgtgaaaaaagttctaaattttccagcatgaagtccagtcagcttctttttttcactatgtttttgagactaatatgattgaacagtcacctatttggtggctaaacatcagattaaagggagaatgcatcagtcttttagttttactaactacagaagatatcatgggcccaggttcttgtctctaattccagttcagtaaagagacttcaaacattgtcactgtgggaagcattttttcccttgtgctttagaaatgagtatttaggtggatccttccctttatgccaatattttcttttcttcccaagtttgttattgtggtgtcataaaatttggttctgtttcaagtttcataataaaaaacatggaaatctattattgtctccatgcggcttccaagtttataaaatctggtgctatctaacaaaaacatgagattgtgctatggaagaaaaattggtgctattgagctaacatcttttatttatttattggataggagaccagaaatcttcattctggacaggagaatcccagatctagtccgggactttttaagataatgatatcctggccaaccaagctaggtttcctttatttatcaatagaatctctcaaaactaagaatttggaaatcctggacaccacaaaaagaatctgaaaagatgcatttaaatatttggaaacaatgtctgattatcagcattgatttcttattttctcaagagatgttgattcatagtaaaaaagatcattcaactatgatagtagccaaggaaaactgaagggcttcagaatatcttcaagttcctcaaattcatcttaaacttattctttttagtttttcctgattgaaaggaatgtctttttattttaaccaattttcactatctgatgtaactttaatgctatctaaaacgttttacatttttacatgctggccattcattgcttctgtggttgtccttccttcatctggattcactgtattagagcttcacgattggaagatttctcgtgaggtttaaaccagtgatatagcagtattagagcttcgccaatcccttctgatcttgaaatgatcaattgggaaggagtctgtagaagacaattactctgatatacaaaaacgtaacatcattgcagagaatcatttgcaaacattaccttttttgttttctccaaattatttattgactgatgattcaaccctagattattttgcacaataattgaaaagacagtcattattattagtattttttctttttctaggagtgtctaatttcttcatcaactcattgttagcatttagatacttgttctttgggaagtcagctttcacttgatcattttggtttatgcacagttattgcttgcagaactaagcaatctttctacaaggggccaaaaggaagaaggattaatatagggaacgtactctttttgaattgatctgaattgcatggagggatccttgcctaacaatttataggctatttgtagcttgtgttttagaaacattatatttatcgttgttctctatcaagatttattgctatgaatagacatttaaaatatctaaggtctcatgcattctgacaagctactattccaacattacctggttctaaatttgatcctacgcttttcatgaattgagtttgattatttctgtatttttgccaacttttataaaattatgttgtttaaggtttgccataaacttcttgaagtgtggaagtttgcaatatgcaatattacattttcttgtacaatcctgcacccttattttgtatttacctatggtctagtgagaattacaggagtgctggtaccatgagacatgaaatagaacccaagggaagaatgtggtttggctttcctggacaatcacccagatttggaggcagtggtttatattcagtgattcaatctttcccatgatttgagtggtttagatcaaatcttttttgcacaatcacgtgattgttgtgcaacccaacaatcatggcacttgtgtggggtgattgagtctctgagactgggcatacaccttaaccagcaatataatgaattgttaccaatatcttttagtctttattgttggatgtagaatggaattatgttgtactgaaatcatgtatgaaaaatattgaaatcttgaggttttgaaattttttttttcttgctattgtttattttagtggaaacaggaaagtgtgtttagctggtcaattggaaaaagaaaagaaaagaagaaaaaagggaatgaaagaaaatgtcaaccaagatggaattgtttattgtggtttcaattgcctcatccttgaccttaggacttgttggagttagaaagtttgattggccttgattgcctttagaaggacttgccataactgcgtgaagtatatttctaaaatcgtgagaatatatatatatatatgttctattcttcttagattatcatagtttaagtgcattttatgtaaattgaggtttcatttaatcttcaggacctagagaactcagtggtgcggttgatctgata

SEQ ID NO: 12879 - DNA, 3584 bp, Vitis vinifera
  Intron number 35 from transcript GSVIVT01007875001 (locus GSVIVG01007875001) derived from phytozome v7.0 (chr-ID chr 17; pos 8067956 to 8071539 reverse strand)
gtgtgaggcctgtccctcttgaagttcatatccaggtaagtggaggcagtattttgcatgcattatggttctttcaacatcaactagctttcatatcaaccctgattttcattttctattgttgcattgtacttattattcttttgaatgaagataggtgccaactcttaagtttattttgatgaagtggacatatgtcaagagaataagatgccttgaggaatatacataaaatgatatggtgcccttgaggccaagcccaagtggcaaggggttggagttaggatgggagaggttcctgtttttattttgtgtactagcaacagagaaaaatgaaaaataaaaagaaaacctataagaaaatacacaaagagatattttgagtaattcatggttcttggaaatctgtactaaatgaataaaatgattattcttcttcttttcaactaggttaataagaagcccaaagtttttctcacatttcacaatgtttcttatcttgtaaattaaggttttgttaagtgtttgtatccaaaaatgagggggcattctttcagcaactgattcatctagtaaattacttcgagtcatttcatacccttagtaaatcactacaatgcttcatacttcataaatgcatagggattttctatgctcaagggttggggaggacaagcgagaccatctcgttagttgggacttactgtgtaagtctaagggggaagggggttagggtttgggaagatttctgtaaggaattgtgctctattagggaaatggctatggagatttcctaaggaaagttttgctctttggcattaggttattctaagcatttatgggatacatactaatgggtgagatgccaacactatagttaagtggtcacatcgttgtccttggaagaccattgcacaagtctttcaagatttttctagatatactcagttggtggtgggagatgggacaagaattcatttatgggaagacttgtggtggggggatcaacctttgtgttctcaatttgcaagtctattaagaattgtcacagttaaaaacctcactatttcattagttctcgggtccactaatcctttctcttggaatttaaacttctgtcgcaatctttctaattttgagataggaaatcttgaaagactgatgtcctttctttctcatttgcacttatttccatctagtcctgatataagagcttggttcccattttttttcaggtttatttacagtaaaattgttcttttgagtcttgttcaaccatattgatctaattccatcattcactactgattttgtttggaaattgcaagccccatttaaggttagatcttttgcttggttagtggcacacaagaaggtaaacatcaatgacatgttacaacttagaagatcctacaaagcccttagtcctgatgttttttttattgcatatggagagtggtgaaatggtagaccatatcttcttacattgtcctttgagtttgggcctatgacagactattcagcttggctcatatggattaagttcctcctaggagtatatgcgacatgatgattatctcatacaaaggattgagaagtaccattagaggcaaggtgttgtggcagttcgtttgtcttgctttgatgtgagttgtgtgcgtgaaagaaatactaggatttttgagaacaaggtgagaacttcagagggtcttcggaacataagtcattttttagcctccttttgggcctcttggactacaacttttaagggtattccccttaatatgatccaacttgattggatgttggtgtgtagttccaagggtgtgggttagcaagtatagattatttttgtatattcccacatgggacatggtttgtggaacctcatagttgtatagatttacttgtactttagaggttcctactctctttttatgtagttttttggaggattactcatccttctattgtacttattcttactttaatatactatactattgtttctcatcaaaaaaaaaaaaaaaaagcttcatatttcacattcctttttgtcaacaaggttggtcaactctttgaaatgactttttttctttaatcaagttaattattgcttcactttaggaaaacaagcggtttctgatttgccattatcagttccatgagaaatcacaaatttgatagatcatcatctatcagggtttgtcagattgaggtgtggcttgtaaaatttcaataagattgcaaaagattgtcactggaatgagtgaaggagaggaagagggggaagaacaccaggaagctggaaatcagggctttgcttttggcctgcaaaacctgaaaccagaaagtggagtttctttcagatttgggtttgggtgtcttggtttcatttccttcataatttctatagggtctgcaaggaggattttttcaaagggagaagcaaagaaattaaggaggggtaaaggattatatttcaaggctcagatacttgagcaggcaaatggatggttggtttagggtttgggtttggatgtcttatctcctatgtcctattgtctgaacatctcatgaggggacatagatcaggtttctggggaatggcgttggatcttgtttttattttggcctttttctccctcataatgaatttattgttgactctttgtgtggaagtacttcctagaacggcaatgagtatgcacattttcaagcttctaactgaacactggaaaaacaagggaaaaagggtgaatttacatgtaaaagattttacagaaaaagcttggacaatgtaacatatttatatatttttttaagaaaacagagctttatcataagttgatattttttttcttcctattctctttccgtagatcttgttagttataacttaaattaaaaaaaaaatatatatctcagtagattaagcttgaacaatggatcaacgatccttttctgtgatatatatttttctattcctcatggaatttctcaatggaaaatttgagagctaggaagttgagattcctccattgatgttctatataatgaattgaaagcttgacttcgtattctccaatgtgggggataagtatgaatgtacaaggaacaggccaaatatgtggtcatgttagcatgaacaattctttagatattttgaagagggttgaagggaagaagcgtttatcctatcctataaaaactgaaaaatataaaaccaggagaggtagggctgaatacatgggccacctgctactgatgtctgataaaagaaatcttgattagaaaattgatggaatgacttgttttactgtataatttataattactacaccaaagaaaaaaagaaaaaaaagacctacagaacttgatttatgtttgtcatggtatctcatccaactaaaatttttttcttgatgggtgttagattggttagactggcttttctttgttctaattactacctctgggtatggttgatttggttgaagatcttgtatttacaactgttgtgttatcactctaatgtcacttttcatgaacagggataccctggtaaattttactgcccaagg

SEQ ID NO: 12880 - DNA, 9907 bp, Vitis vinifera
  Intron number 10 from transcript GSVIVT01029697001 (locus GSVIVG01029697001) derived from phytozome v7.0 (chr-ID chr 12; pos 13327382 to 13337288)
tcttgaagattgttgtctttgtacacgggtttcaggtgtgttctcttctgaatgtttgcataaatttatttatttatttgtttataggaaactgtacaggaatcgtgttagaaagaaagaatttgtacaaagaaaaaggatgaaaaatcctagaaaaggaatttgcatagtaaatatagaagagagattaaaaaagtccaaaggcaggaaacctttgccttccgactcccaaggaattagacttccgaagacctcaagggggcatgagatccttaataagaggctcctctcctagccaacctatcagtttcatggtttgcctgtaggcttccaccctaaaagagcaatccaacaccttaccagggtcagcaatcttccacatctaatgaatgatgtccaagacctttccaactgctagccacctaagacaagattgtcattgaatcctcctcaaccaggatattagtgacacctaacttcttgtaatttttttattttttttttataggcaaacatacaaaaagcatatattagaatagggcaccttgaggctgactcaaaagcatacagggagtatacaagatgagccaaagggcacaaaaagaagaggaaatacaaaaccagccctcaactagcacctagccaataaaaaaaactgagtaaaggaagaggaccatcatttacaacctacttagtccacaaccaaaggttacatacaaaagaatttttttaacctatgaatcgaaagctcctcattatcaaaagcaatcctgtttctttccttccaaaccgcccaaaaaatacacaaagaggctgccttccacacctttctacgcttcttgcccaagttaaagccacaccaaccactaagggtatctttaaccgaaaaaggaaggacccaagtaacaccaaaaagagcaaacaataactcccataacactcttgccctgaagcactgaataagaatatgatcaattgactcttcttcctcacagcaaaggaagcatgtgttagctagaaaccggcccctcttttggatttccaagaagcttcccaagcaaagaaacacattttagtaggcacacaaggactccaaataatactattagggaactgaacaactcttcttgaagctagagtactataaagaggtttaactgagaaaaacccatccttagtctctttccacagcattctatcttccaaaagaggattaagcctcctaccccggattgtcaaaagtaatctctccacctcctccacctcccagtcattaaagggcctagagaagctaggactccaaaccccttcttctcccgaatgatcccacaactcctctaaccaagcctctttatatgatgcaaaggcatacaaagagggaaagagttacagagagtgaaattcccacaccaattatctttccaaaatttcactcttctaccatttcccacagaaaagaccactttgttttgcaacagagcgccttcctttctaatgtccttccaaaagcctactccaaatccctccctaacatctctagtataccaacccccttcttcctccccgaacttcctactaatgatgcgtctccaaagagtctccctttcattcacaaagcgccagttccacttacataaaagggccttattgagagtagacaaacgtctaactcccaagccacctttccttttgtccaaacacacggtatctcattttactagatgaggcttcttctccaaagctccccctccccacaaaaaatccctttgaattttttccaatcttaaactaactacaataggtattcgtagtaaagacatcaagtatatgggcatacttgacaaggtgctacaaattagagtaattctcctgcctttggagataaattgccttttctacatggcaagccttttccgaaatctctcttccaccccatcccaaacggccacggacttgtgattcgcccccaaagggatccccaagtaagaagttggcagccttcccactttgcaaccaacctcaagagccaaaacctccagattctctactctcccaactgacaaaattttgttcttatccaaattgattctcaaacctgatatggcttcaaaccacatcaacacctagcttaaataaaccatttgatcttgggatgcatcacaaaaaactaaagtatcgtcggcgaatagaaaatgagataccacagccccgtctccacttcttctttttatcctgcagcttgaaagaaacccccctctcactgctctaagaatgagcctactaagggcctccatcccaatcacaaaaagatagggagaaagtggatcccccttacgcaaaccccttgaactgttgaagaaacccgctggagtgccattgattaaaacagaaaatgttgttgtggaaatgcaccaggaaatctaactagtccacttctccccgaaacccattctttgcaataccaacaacaagaaattccagtttaagtgatcgtaagccttctctatatccagcttgcacaacacctcactctcatttctcttcaacatcgagtctattgcctcattggcaattagggcagtatcaagaatttgtctttcttcaacgaaagcattttgagctaaagacaccacctttcccacaaccttcttaagcctattagctaacacttttgccaacagtttatacaacccccttgccaaactaatcggtctgaaatctctaaggtcctcctcacctgcctttttagggacaaggaccaggaaagtagaatttagactccttacgaatctgccatgctcatggaactccttcaaaaatcccataatctcttctttcgcaaaatcccagctaaattgccaaaagctgagagaaaaaccgtctagaccaggagccttgtccctgttcagatttgagagggcagagaagacctcttcctctgtaaaagcctcctccaatctagctgcaacctcaccatcaatcctattaaaatccaacccttccatagatgggtgccattcacccggatctatcagaaggttcttgaaggctccaaccacacccccccttaatttcctgctcttctgttaaccaggttcagttaatctttatcttagataaacaatttctccttctatgggagttggccatcttatgaaagaaactaggatttctatcaccctccctcaaccacacttctcttgatttttgcctccaagaaatctcctccataagagcccatttctcaaaatccccctttgcttcctttctagcttccagctcctccatagataaaagacgcatcttcttctgagaatcccagaaagccactttgtccaaggccaatctcttattcactcccactttcccaaaaacatccttgttccaagtttttaagatggccttcaaagccttcaatttctctgcaaggatgaaactaaaggatccactgaaacttaaaccttgccaccaccccttcaacagatccttgaatccctcctccttaagccacatgttttcaaaccggaaagggacatgcccccttctcacccctcccccatccaataggatgggaaagtgattcgacactggcctaggaagagtactctgcaccaccccattaaaattgctctcctagtcctccgacaccaaaaaacgatcaagtcttgacatggtttgactgttcaatcctccactccaggtaaacggacccccctgaagagggagatccgtcaagtccaggtcatcgatcacctccgagaatcttctacaccctccctcctcttctaccctcattcggaaacctgatcatattaaaatcttctccaatacaccatgggtcattccaaagcccgcggatggcccctaattcttcccaaaaaaattctctatatcttctcaaagtaggaccatacactcctgaaaaagtccatctgaattcatcttcacaattcttgaaacgacaagaaatggaaaaaagacccacctccatccccattagctctaacactctattatcccagaaaactaccacccctccagctgcacccttggcattcaaagctccccactccagaaatctccccacacctaggcttcgcaccacccctaaagacatctcagtcattttagtctcctaaaggcaaactaaatccactttttgggatctaattaaggctttaattaatatcctcttatttctgtcattcacccctcgaacattccaagataaaatcttaatcttcatttaaaacacaaacctctgtctcctcctcttttgtccgaccctttctttctgctctctccatcataattaattgaacattctaatttttttacttcccgatcaaacctagtcagtcctagagttccctttttcttgccttgatctcttctggttttcaatcttagcagcaattttaggatttccccttcaacgccttctgtcgaaaccccaacgacttactgaacttcaccaagctactttcatcccaattactaccaagaacttccctttcttgcatttcctcaacagcatccagcttattacccttagacttttcctcttctgagtccatcacccacggactaccatcattcaacactgtgcacaacggagcttgaaaaccaacaccttcaacagtctcttccaatcccgaaggccccctcaccaccaaagcctgatcacacccagaagaaggagtagaagagaagaagtcccggactcccccaaagttagcgagatatggctcgtacctggatgcctcggctgtcaacgcttcgtcagttattagcgctctagctttcgtcggaagagcttatgaaaccctccaatcccctccgtgacagcaggcgacccccgcgacctttctagcacgagcacatgaagcctcctctgtagccctagcttccatctccgctacctcaaaaagggaatgagccctaactccatttatcccctctatcgcatgtcctaagcccattttggacataccctcacagcccacaaacgggcccttaatgtaaaagggcctctcttcacagcccgactgccaaccttttaacataataggccttgattccaccggcctttgcaactgggctacctcacaagcaatcttataacttccctccccaaacccgcttctaaactgggcctccccaagaacaggccaactttaagaaattcaggccccaaaccaaatccaccccctttgaccacttttcctgcaccttgacccctattccctagcctatcttctccatcagtcgcctccataccaggcccccttacagcggggtcagagaagaaaactatagctccttttgaagagcttccacaggacggctcaccctgtactccaacctcaccatgggttgtgcctccttttccaacactcttcctctacacacggcacgtgatccactccctgtttcttcttcatcctctgtatctcccttcccataaacacttcccgccggcaccacttgagaaaaccaaggcagggtttcccaccacagctagactgaaaaacaccccgaccccaccactaactggacggaggtaggtaaatccctgccgaccaccttcaccaacaatctagcccattgcaattcaaccataaaatccgtattttcatccattacaatgagaccaccacaaccatcacctatcaatttaaacacctcgcggctccatagatgaagaggaagagccaccactctcacccaagcctcgttaccattggctccattacaaaaacaccccaccttcgggtgccatttttccaaaaataagacattgtctttcacccttctcttccctcttaacaaaatacgctcggcttcacttaacaattcaaactcaaagagcaaaagcccttttcccaaaacaactatgttcaactttcctttgaggagccaagcgtgaccagcccaatatttcagaaaatccagctcagggggtggggtcgcaccattttcccaactgcccactaaatagcgatccaactgctcaagtctttctggcttcaccctccttcccaacttcagtcagaccttatctcctaacctacccgttttcgattttgctacatccgcataggtccttggttctagttccttttccttctttagcacctcaatggatagaggattctttaagcctccagtgggaactaccctaaccgctctcaacttctctgccaaaatattccaccctccagacaaccccttcccttctggaaaaattaagcaaaaacattttgcctctaaatcacgaatagagcaaaggagaaatcttcccgcctcatttgaacgacgctccaacctgtacttccttccctcctcctcccagacgagggaccagcctctatcatctctacctcagcagcaagtctcaattccagccagcaacctactgagacttacatccccaaatctgatccaagatgttattcctttgcatctctcccaaatgcaccctctcagcttacctcctacttcatcaatcaagatttcaaaagattttgactccaggaaaccaacttcttccacccctaggaacttcattctggagaaggactatacttaagccccacctcttctcaacacatttgcgataacattcatattacttacacaaggagaaaatatggagttccacctttcttcttgtaattttaagacccttaagcaagaatctttgctataatggctagcccaaaaccatatatttatagattctgtcttgcttatataagatgcatttggttgtactttattttttaatttttgttttaaaattaaaaaaaaaaattaagtttatgtaacttgtttccacttttttgtttttgtaaaatttgaaagcaaaaattaaaaggacaaggtataagaaatattttcattccaaagttattttaaacaaatattagtatgggaaattagcacccagactcacccacatttcatttttctctaccaaatgaacacacttggtctcacttgtgaaggtttgaaaattgccaaaaataatgggaaaatgcagaaaatcgttttttaaagtttattttttgttatataattaccaaacatatttttttttttttgctttaaaaaacaagaatcaaaattaaaactaccaaaggtgtttgatatttgataaaaataaaaacataactgaaaaaagcatttgtattttttgcttttcaaaattagtgaaaacaaaagtgtattcaaatgacaccttagttgttgataatttttcttttatcatttttagggcttggaatatcttttagttgcctccttagatatacctttatgttaagaaaacacgttttgctactgtttttaaaaatagtgaaaataaaagtgtatccagatgacaccttagttgttgatgtgtatatatataatcattttcagggtttggaatatcttttagttgcctccatagatgtacctttatgttaagaaaacacacattttgctagtttttaggtttaggtaattctccccctaaaagataagaccatgttctgaggttctacctgcttacatgaatacttcaaagtatgtgaagtgcttgtgattgatgtgaacgcgataagggtttaggtacaggatatgtctttcaaattcctactgatcaattatttacataaaaggtgcatccaacaacaaaggaaagaaaaaaaaatgaggaacaaattcaagttttgttctaagtaaccttagacttttgaacattcttagttatacacttcaatttggtctagagatagaaaaaaagaatggaccaattggttatattccatgtcctaagatttgaggattaaacaaatttgacacttggacacactctagcccaattccatgcacatgggtttctattggttgttcataatgtgttttttgttgaattatttatgttaccatagtatacattgcaggcctaaatcctaactgcttcatcttttaagaaagttgtaacttaccatggtatcaaagctagaggtctcggtacaagtctctactactgaccctatttatctatctattgctattgttgatttgtctctccactaatattaagctctcttttggtagcttaataattaggtttagattcaaccctagtgatgcaactattcaaataattttatagagcaattagatgcttctatagtaaagcaattagattcttgtatggtgcttcaattgaaagtatctattgagcttcatttgatggttgtggaagcaattgaaagtagctttttttcctaaaattggaaatattgaagctatattaaaaagttctatggcatttatcaaaaaaaaaaaaaacattaaagttctatggtttttatgttcaataagctttttatcaatgcagcctaaagctttaaaattgaaccctagttgattagtacgttttcttttaccataaacaaaataattcattgcattgaacctgataagtagagtgtataaaattaagaaaaatccttataaaatttacaaaagattgataaaatagaaaatatgtctatgcctcgaaaagagaacaacaaattcctcatcttatacaggaaaccaaaacaatgtacaacctaaggcactgcatatttcaaaggggtatagagtcttggacaaaggacacctagtttatgagccccttggctaaatcatccacttcttgggtagcaacatgcagagcccaaaaaaggaacatctcaaattgctcgctacatcaataatttatcaaatgcacctattatactttcatggacctcttttcctcttaacacccatgaaatggtaatagcagagttgcactcaacccataaatctgaaaatctaaaatttctaacctgcaacaatctccaaaaggagtttgctacaatgaatcctctaaaggagtgtgaatctttgtctcggtagttgttccttcccacaggtttggataacactccaagtactgtaccacaatctctaaacactcctcaaattccaagttgtccaaggttatccaaggagcatctgtcaaaattaaactttatagagcccattgcaggtggaaaccacttaggctgaatctctccatctaactttttggattgaaaaatattattccatctcagcattaacaagctcaaagggtaagaacaatggcacctgaaaggttattatataaaattgcaattctgcaaaggaggaaagaggcctaagaaagaaggaattaaagaacctggagttcttacaagttacaaccttgaagatacttgaaaattgaaaattgaaaggatgctcacctcaccaaatgtcttctcacaaagtggatgatcggtgcattccccatagagaaacaaataaaacaagaaaaactgagaaaaacaagtgctagcctttcaagaacatcaacgccaccacttgataaccatgttggcatcgcatccattggagtgtgacccatatgtactcaaaataacattataccataaaacaccattttctcttggaaatctccacaaacactttcttcttaacggtttaacagtgctttactttgcaagaataacctccctaaacccaaaccttcccccctccccctacacctttttcccaacctatgaatgaataaaaataatttattcaaaaaattgccaaggagggagcaaactccaatataccagatgtatccaatgagcacctaacagaggccaaccctgatcccttaagctgtcctcattatatcagtaatctaattctcagaatgttaatttactttttctgaaatttatttactcactgcagttctaagcatatgtcagttggtttaatgctactcatcttgactcaaacatgaatagggacatcatctggacttacggcttgttcggaatca

SEQ ID NO: 12881 - DNA, 6773 bp, Vitis vinifera
  Intron number 1 from transcript GSVIVT01020148001 (locus G SVIVG01020148001) derived from phytozome v7.0 (chr-ID chr1 ; pos 9811206 to 9817978 reverse strand)
acagaggtctgggtggtggcgttctttatctcacggtttgagctctgccctttattatcaccgtaattagttcatgactctgtattttagttcgtgaattgtagtttaatttgggtgacttggtacttcgtttccaattttaaccttgtgatcgcttatcacgattgtagggtgacaacaaaaggaacacatgtaaattagccaatttcgaactgattcgagtacaagtttatctgatgaaactgattttagtgtgttaagctggctgaatttcttagttgatgaagtcaaaagattctctaatctttatagatgctttaaataggataaaatctctaatattgggctgtaatgaaggtacattttaggttgtcatgaaagaaagtctctccaaatatcttttctagaatttcttctcctataccttttaaattttaatgagagaaaatctctccaaatatctttcccataatttcaatctcttcaatggcaaaacaatcccaaataatggaagggaatttaccttaaatgtcttctttttcttggtatcaaggctttgattctcaggatatcaatcgtttgagcttcactacattttttatttcctctattatgaccacacgcaggccaaaataaagctgcctgttaggcggagggacaaggttttagcctatgtcatgacttaacaactcatcttttgggtcaaattagctgcttaacatgatttggggattagatagtaaaagaaatgttgtgtcaatgtaagattcaatgcaaacatgttagtgtaagaacacaaagataaaataatctatttataaaggtacatgaggttttaacttggtttggcctatcatgcttacatctacggatgagagataccattccactatactaaagagaatattgcaaaagatggaaatcaaatacaactattggattatgaaagattctatgttttcccactccttgtatttacactttgaaccggcccctcacttcgctaggtgtctccaattcttcctcctatttctatttgttaagtataatcttcacaaatctatctccgtcttataatttttttccctcatgaattataatatttataggaatattcctaattacttcccttattctataatgaaatatagtattacaacgatatacaaatattggaaatattttttacaatattaggaatttgaaatgctttccaacaagaaaagatatgaaataggttggagtattaggcaatttaaagggaaacctgatgagaaagtgaatgaataaagaaagagagcagaacgtggaaaaatgggttagagaactaggaaatttaaagagaaaaatgatgaaaaagtgtgtcaaaatgaataattaggatgcttgtcttccatatgttttagaagcatttcccacaagaaaattataattttacattatgcaagcaataaatatttttttctgttgttaaatctgatcttttctttaatttaagtaataaacataattttgtacttctacatgtgattttgtttgttaaataattatgtgaaaattggctttacccatttgaaacttgtttagatcaattaatggttcgagtgtccaaccatacagtttaaaaggtgaagccccattaatgatagtgggacctctttgtagttatatatacttgtatctagttcttagtggaagtggggatcttgggaaggagatggagtggaatcaaagtggaggcttggtttaaaaggtttttatttgtttttatttttctttttgtaatatttataaatttctagtgtgtacgttgctgtgcctttcagttagcgcttttcaatatatgctatattttacttacctgctagggtagcctagttggttagggccaacattgggaagtgtggtcccaataagtgacacatggtcctgggttcgaatcctgccactgatgataccttgaatttatccagtgttggtttttacagggcggttcaaatcttgagggttaggtccacatggagagtctaagggcttgaccatggaaggtttctcggttataaaatatatatatatatatatatatatatatataaatttctagtgctctttttacattccttcttggttatgtttttttattttgtattccttgcatgtgtatgtgattttatctttcttttgcaaggaagattatgttcatgtatgctgataactgaatttcgtgttgccattagcattcatgataccccatttgtccattgtggtgtgtatggggataaatatgtaaatatatctctcattcatagaactaatgtgtttcctctgcatagagcccttaagttgcattccttgttgcttttcttccatatgggtttcttgaagggtggacctctacttctttattgtgctttgtctaccctcttgtagatacatgcttgtggcgaatgttgagagaagtctcctacccatcttagggtggaaggattcacttagtattgtggatgaaaggagggatcatccttaatatgctagggtgggtgattacctatcacttcctcacctttgtatgttgaaattattaatccattctcgagggaagttgcatgggcttggtatcatcaaattgaatattagatatacttcctttgaagatgcatggtagtataatgctaaaatgcttcatgtgtgcctaagttgggaacaaggctcaaagagctcagttgtgcttagtgcaccttggtggtgggtttggcttgctccatcatcaagtatatggaatggttgaagggtctattttgtggctaaagttggaggctattggtgtaagagtaacctaaatattgctaagcctctattagattgacaggaaaggaggctacttagttggataggtctagctcttaccacatattatttgaatgtacatgtagacttctgattaactgttctattctatgaagttggttcttatataaaaattccttataaataggtttgaatgaccaacatttgtgatgaggaaatgaggctttaagaaaatgaaaagaaaaaagaaaaattttgcagatttttagtttctttaacgtcataagtggtaagtagttgacatctttgtatgcatcatatatacctttttagacctccttaggtgctattaatacaattgattttttacccataaaaaaaaggaatgttgtaagtagttggttatttgagttttatttggaacatgagaagttttttaattagaaatttcacctgaaaggaagtttttatatttctaaatttagtagtttctcaaggtcttgttttcaaaatgtttatgtttgtcatttttggaatctagaatgtattctttattaggaacccttattactcagtttttataaatttttaagcttctaattcttaaaagaaagtttctcatttctgtcaaattttattatttggaagatttagtagttttaggaaagaattatgagtcctattacaaattaggtttctttttctatagttcatttgagtctttaaggttcactttgatgtaatcaaggagtgaatcatgaaagataccaatttttcttcatactaatgagactttaagaagactgtagtgagattgtaaagtttcctatcttttttctttattttccaggttatcgtaattttaatttctcattcctctccttaacttgaattagtgaattcctggtcgacctatttgaatatagacaaccatcaaaggtttggcctacattaatttttgtaataaagcaaagctcttggcttgaaagtgcatgctagttgaggaatggaataatttatgcaattgtgcttgattgctataatttttaatgcaaccattggtgattatactaaaggtaaaggaagaggaggattggtgatgtattaccatctttcaaactcatgttgcttgccaagggaggctatccactataatttttgatggaggtagtagtttaaatattgcttcacaagttttcgttgagaagctttgtctaaagataaagaagtatcctaacccttatcaggtagcatggattgatgacacctctattttggtgagttctcattgtgtagtaatgattagctttggtaataattttgagttatcaaaatgatgtgatgttttgccaatgaaattcatccatattatgctttaaagaccatgaccttttgatctaagatcctttgtgatggttacaaagacacttatatgtttgtgcataatgatcatagaagactctttttctagtgaaggaaattccaccatttaagcaagtcaagaagaaatcaacatctttggaatcataagaaccatcaaatactcttattaagaagcaatttaaagttgagagctaagatcatctatgatgaatctagaatcgagagatgtaatagaacatgtcccaaaattacctacaggaaagttaaaagaagtgcttttggatttggctttgactatcttatttgaaaacaaattgttgtctaattaggataggtcaagccttctatgatatccaacattaccatcatagggaagctatgcttgaatttcaaaacaaaagttgttatggtttggggcaataatgcagaatcctctgatggtatgataaggaatgctggaatgtctttgaagttaaggaactcaagaatcttattcatctgctggatagtttacaagacgagtgtggaaagcgatttgctgctagcttgttgattacacaatcttgtggggaactgtcaactttccttacaatccttggaagtttggtacttgccttaacatgaatttggacacaagttaaagaaatcttgggattctctcctatattggcaatgaatttgatgagcgctttggaagatttcagttgctgaaacttgaaatcaagtttcctccaagttaggagaattaatagggatgagtcttcaatgtccattcaagaaaatgaagacaagaaatggatatttttggtttctttgacgtcataattaataaagttggttatttaagtctcatttcgggaagttttttaattggaaatttctacttaaattaagtttttatacatctaattttctaatttttgaaactctttttctaaaagtttctatttggatcctttctagggtaccctttctacaaaaagttttattttttatttttttattttatgaatttttaagcttctaatcttaaaagaatgttttaatttctgtttaatcttattatttagaaaatttaatagttttaggaaagaattaggagttctaataagtaaccatatagattaagagggtgtttggtaaaatttaatatttattacttaccgacttaaattaacctctttttttaactttaagttaaatgattcttaagttattgacttaaaacttattattttatttttactttaagtaataaggttgtttggtaaagttaacttaaaaattattctaaattatcaaattaacatatttattctgattaattttaactaatatctattttgactaatcttaagtcataaatttatttgttaaacatgtattgtagatgtataaaataaataaaaaatatttattataaaagatgagttgtgatgtggagttgtagttgtgtaatactctcactaaacattgatttaatacttaaagttatttttgactttaagttatgatattaagttattttaccaaataaacttaatctacttaatgactaaattaagttttttctatagcctatgaataagactagttgatgtaatcagggtatatatgatgaataatatcaattttctgcctactatataattttttatgatgggcctccattgttttccttgtaggtgagactcctaaaaggctttagtgcaaatctaaggtttcctatttttccttctttacctgttttcttttctcacttttattttctttcccttgttgccataattttagttcttcattcctctccttactcctaaactaatgaaatcctggctgcctattttttagtttttatttttcttgtagacaaccatcctagatttgtcctacatcaatttggaagggctaaaaattttgttctttgaaggacttgctttgcaagaaatactgtcagtcatgtcaacacgctcttcctctcaatccgctctgatctcctctcgaatcagaacctcaccatccatgtgactgaccttttctcacaaaggatccaatataaacaataagaggccaaacaaataaataaataaaagaggattttaatggattagattcgtgataaaaacgagttaaatattacacttgaactattggaaggaggatctgtaacatatgaaaatttgactgtggactatggatatggtatgactgactattgagtttctaatttactaaagatctgtgcatatagcttggattgtggagcagatcttgttgttgaacccaaataggtttggattaaattgtgggcttgggacaaggagtacagaaataaaaaaaaacagaacatttttaggaggtgagaaccgggtttacttctcatgtattgatatagcagtgttatgagaacttagcaaactaatccatgacttttaaggtatctgttactttgtgaggataattttttctccagttctcaatctttgtctcatatttatattctttttatgatacagtttcaaggttgataatctcatttttgttctcttcctcagacagctgaagctcacagttggacctgt

SEQ ID NO: 12882 - DNA, 7977 bp, Vitis vinifera
  Intron number 3 from transcript GSVIVT01018945001 (locus G SVIVG01018945001) derived from phytozome v7.0 (chr-ID chr4 ; pos 18479365 to 18487341 reverse strand)
ctcatcaagaagcaattcaagctcaagctgatatcgtcagtggttttttcttcaattcatgtgcttaaaggacatattctgattattcattttttttttgtttgtttgtttgggattttgctccgttgtcatttttttctaaataaataaaaaccaaattcataatttttttttttaaaaaaacctgcccaagacaccccaaagtacacaaaaagtatataaaaagcacctaaaaacacagaatttagaaaagagtgcctgcaacgaactccctcccttaaccagaacccaaccactcaataaatcaaagaaagacaaagaatttatctctaaataccgcttcacccaaaataacaaattcctaagaaagaatctttatagaaagagcagaacactccttatcatcaaatgccctgagtttctttccttccagatcatccaaaaaatacattaccacaaacgaaccattccaccctaacaaagcctccttaactatagcagaatgcacccattgaataccaaaaagatcaaacaatttccagagaatcctaaccaatgcacaattgaggagaatgtgatctatagattcttcctcttctttgcaaagaaaacacctttgaccaaagatcacccaagtttctgaagctgatccaaagtcaaaactttgccccatgaagcctcccaaccaaaaaaattaactttaaatggacccaaggattgcaaactacccaatttggaaaagaaacaacaacccttggttccaagacagcataaaagagaatggtaaggaccttgaaggtctctgtggagaggaagaccttctgggtcaggttagagggtgaggtcggaggaaaatggtgttcgataacagagcacagtaaaagctctgttttcgtcttaggctttgagaaggaggaggttagttggttgatagaacagttgacaaaggccattgagatgaagatttttatgggtttcaacagaaaatttagaggaaagaccaaagtacatctactggaggtttgcttcaatgttcatggcaggtttataagattatcagagatccaacaggaagtcaacctttctggtaatacctgagggagataatggcaggagatgggaacttttaaagtctgcgtcgtattcaatgttcgtggtcccctcctcgagttttgatgaaaagggaaggcagagcagggaaggaaggattttgaacaaaaatgcggatcccttgcaacggtcctttgcgaatgtagtcagagacgaaggtccgaggaaaggcggccttgttctagttgggagatgggcgagggttgtggtgtgcgaatgtcaagatggtgctgttaactgggctgaggttggccgggccatggtgagaaggctagggcacaaaggcgtggtgacaatcgtcccattcgccgaaggaaaaggatggttttttgtagaaaccttagagaaagctttatcactacacgattcaaggttcatcaggattaagggcggaattatagtcgtgttgagaagatggtcgccaaaggaaaattcagaagtagaggggaaattcaaggaaggttggatagatttaaggggtttaccatttcatttatggtctgaggttcacttgaagaaaattatggagcaatgggggacggtgacaaagattgattggcgaacattgaaacttttttatctaagcaaagcgagggtgaaagtggtaatgaaagaacgatcggttctcccggctttgattgaggtgttagatgggggttgggacttcacagtttcagtcgcagtagccgggaaggaagacggtaggcaggttagagagatgggtgagttaactcggcaattggcagaggctcacacggggacagttggcagaaagagggaagaggaaggtagatcaacggttggaaaggggtcctcggttggggcagtttggcagaacaatggagtggagaggtgctcaaaaggctgagaacgctcttgggaggacacgtggaaagaacaagatgtcagtgggaaacagctggtcccaacctccactgcattcgaatttaaaaaggtagagagctggatctgttggggcaaagcccaatcaaccctctaggatgggtttcgggcctctaaatatatgacacattttagtaagcccagcccacggtctgaaattgacatgggttggaagagggaagtccatgggaaaggcccgattcagttgttgggccaagagatgggagacaatcaagacagatattcgaagggccctttacacagagcttttctctctacaaaggggaaggcgaagacaggccacgaggatcctgaaaatcaacagaggggctccgcgatgaagtgcggttcaaggaagctgtggaatgctctgtttccatcaagctctatatgccgacaaggggaatgaagccgaagcgagccactcacaactaagagatggacgccagtcagtgatactcttccattggaagacgtctccgaagcgagaacacaattggttcaagggtgttccgaggaaggaacgacgccgacgaaggaaaacacggagcaaaggaatcttcttagggctccttttcagtcaaaagggaaggagaaaatgcgcaatactgctaaaggaggagacggagtaggttttaagggttttgtgggttgttctcatagtggattttcattcacggatcatctttcttatccggcaaccagagaaaaaggactcaactttgaggggtactgtggaatgacggaagtggaaattttcgaggtatcttctcatcatttttcttagccttctctgccttttcattctcctttctctggcgtggctccagacccgagttcttctgctatcgatctcttcattccagcctttcaatcccaatctcctacgaaaaatcgagtgttatctgaaatcttttcaaaaaaagatgacgttgggacttatagtcttgggtttgttggcattcctaaccgtgatgatgcggtgccccagctagctagattgaatcttttgtctgaaagctttaattatgataagaccaaacccagctcgcctcatggggcccttattctaggtacagttagccagggagacactgagttctcccagatgggtgggttccaaattgaaggtctttcccctagcaaaatggctaaagtttgtgaggtcttaagctccttggatattaaggtgtattcaaggcgaaagaacagaattgccacagacatttgagttatgttggcgttggttaggaggtatagggtcagtgaggtgtttttatgaagatcataagttggaatatcaaggggttgggatctaagaaaaagagaagggtggttaaggattttttacgccttcagaatccggatgtagtgatgtttcagaaaacaaaaagagaggtgtgcggcagaaggtttgtaggaagtgtctggtcggttaggaataagaagcgagctgctctcccggcgtgcggggcttcaggagggattttaatcatttgggacttaaagaaaatgagcagtgaggacgtggcatttggatctttttctgtctcagtcaagttcttgttggatggatgtggacctttgtggttgtccgtagtttatggtccaaacagttccttaactaggaaggatttttgggtggagctattagacctttttggccttacttttccttcatggtgtgtgggaggtgacttcaatgttataagaagaagatcaaaaaaactagatggctctagattcacttctagcatgagggattttgatggctttataagagaatgtgaattacatgatcccccattacgaaatgcctcttttacttggtcaaatatgcaagagtcaccggtgtgtaagagattggatcggtttctctattcaaataagtgggagctttcattccctcaaagccttcaagaagttcttcctagatagacatcagatcattgaccaattgtattggataccaatcctttcaagtggggtccaataccttttaggtttgagaatatgtggttgcaacatcataatttcaaagagtgctttagcagttggtggagagaatttgaaggaaatggttgggaaggtcacaagttcatgaggaagttacaatttgttaaggcaaaattgaaagattggaataagaatacttttggaatgcttaaggaaaggaaaaaaaccatcttggatgaaatagctaacattgatgccaatgaacaagaaggggctctctcttttgatctcgttgttcaaagagctgtaagaaaatgggagctagaggagataattatgagggaagaaattcattggagacaaaaagctaaggtaaaatgggttaaagacggggattgcaactcaaagctgtttcacaaagtggctaacgggagacgaaacaggaatttcatcaaattcttggagaatgaaagtggtttggtgttggacaattccgagagcatcacagaggaaatattactttatttcaaaaaactatactcgagtcctccaggtgagtcttggagagtagaaggtattgattggtcccctatatcagaagagagtgcttctaggctggattctcctttctccgaagtagagatctataatgccatctttcagttagatagggataaggcgtcggggcctgatggtttcaccatagcaatgtttcaggattgttgggatgtgatcaaggatgacttagtgagggtgtttgcagagtttcacaatagcgggattattaatcaaaacaccaatgcctccttcatagttcttttacccaaaaagagttagtcaaagaagatttcggattttagacctatcagcctgatcacttgtctctataaggtaatagcaaaagtcttgtcagggcgactaagaggagtactacaggagaccatccactccactcaaggtgcttttgttaaagggagacaaattttggatgcagttctcatagccaatgagattgtggacgagaaaaggcgatcaggggaggaaggagttgtatttaagatagactttgaaaaggcttatgaccatgttaaatgggattttttggatcatgtgttggagaagaagggatttagttctaaatggaggaaatggatgagaggttgtctgtcgtcggtcttttatgttattctagtgaatggtaatgctaaagggtgggtcaaggcatctagaggtttaaggcaaggtgaccctttatcccctttcctgttcactattgttgcaaatgtgttgagtagaatgttgttgaaagctgaggaaagaagtttgttgaagggcttcaggtaggtagaaataagtgtagggtgtcccatctgcaatttgcagacgataccatcctctttgctagctctagtgaggaagaattgcaaactcttaaaagtttattgttagtgttaggtcaagtttctgggcttaaggtcaatcttgacaagagtaatctttttggcatcaaccttgatcagaatcatctctttaggttagccttgttgcttgactgcaaggcttcagattggcatatactttatctgggccttcctttgagagggaatccaactgcttgtggattctgggatccagtgattgagaaaatctctaggagattagacgggtgacaaaaggcttacttatctttcggcggtaggataactctcctacactcatgcctatcccatatccctagctactttctttctttgtttaagattcctgcttcagtggctgcaaaagttgagaggatgcaaagggactttctttggtcaggggttggggaaggtaaaagagaccatcttattagttgagatgcagtgtgtaagctgagggtaaaagggggtttggggattgggaagattcctttaaggaatcgcgctcttttagggaaatggttgtggaggtatcttagggagagtacagctctgtggcatcaggtcattcttagcatctacgagacacactcaaatggttgggatgccaacactttagttaggtggtcacatcgttgtccttggaaggccattgcacaagtctttgaggatttttccaagtatactcggtttgttgtaggagatggggaaagaattcgcttttgggaagatttgtggtggggggagcaaagcttcaaagaccaatatccaagactatttagagtagtaacagataaaaatattcctatatcttcaattctcggttcggctcgccctttctcatggaactttaatttccgtcgtaatctaaccgattatgagatagaagatctagaacgcctcatgtgctctcttgattgtatgattttatccacctccgcttcagatgcgagattttggtccttattgtcttcaggactgtttacagtcaagtctttctttacagtcttgtcccaaatgcttgattcatctccttttttccccactaagtttgtatggaaatctcaagtccccttcaaagttaaggcctttgtcgggcttgtggcacacaagaaggtaaataccaatgacttgctacaattgagaagaccccacaaagctcttagccctgacatttgtaagttgtgtatggagcaaggagaatcagcagatcatctcttctttcattgttctatgacgttggggttgtggcacagactatttcagctagccaagatggattgggtccctccgaaaagcatttcagacatgatgttcatcaattataaagattttggcaagtccaagagagggttggttttgtggcaaaacgcgtgcatagatttaatttgggttgtgtggcgggaaagaaatgctaggatatttgaggacaaagctaggaattcagagaatctttgggactccattcatttcctcgcttcattttgggctttttgctcagcgggttttaagggcattccccttaacgttttacaactagattggctagcaatgtgtagttccaatgggacggtgtagtgtcatgttattttttagtgttgtttagttttacttttggcgggaggatttctcattctccttatgtactatttttttctatcaatatattcatgcgtggtttcctatcaaaaataaaataaaattgcttaacagtgaacttattcaaaaccatattcattgacaccatagaaataaatccacaacttcatccacctcccaatcattcaaaggacgagaaaaacaagggttccaatgccctctctccccttattgaacccaaacatcaattgaactgtttatcaaacaaatttgacaacaaagttagttcagaaaattaacaggtctaaacattgtcctgaatattatagctgctcttgtttctttgtgggattttcctcattttactttaaaaagaattgggtactgaagatgatgtactggaaatttgccaagattattgttttaactaacatgtgcgaatgtgcctcttcctcaagcagcaaaacaaatttctgtctatttcagttactcagaggcttccccttttaccatatttaaataaagaagcaaggggatccatttgctaattgtttttttttataactatcatgaatggacagttttgattatgcattctgggtttccatggaatttgagtggttctataatgttttacatgacatatcacatatatgagattataaataaatattttttacattgggcaagtgaacccaatccataatttctgcaaaatctccataaatgaattaatttttggctaaatccatgagcagcaaagaagtttctattttcatgtgataagttatatagaatcaattgagttgtggtggtgagcatcactggacttgtactctattagtattagacttttcatgtgtagcaaatgctcagtttccatgcataaactagaacatgtgatcaatcttgttatgaactgttgcagtttcttagtcatatgtatatttcttaccattactcttgtcattggcaggataagcagcggaaa

SEQ ID NO: 12883 - DNA, 3457 bp, Vitis vinifera
  Intron number 2 from transcript GSVIVT01019371001 (locus G SVIVG01019371001) derived from phytozome v7.0 (chr-ID chr1 5; pos 197051 to 200507)
tgattacctccagttgccatttgctctaaaacaaggtattgcaatctcattactgctactatgaatagattttttgttttctcttttcttgtagagttactattagtggtatggtctactattgtagttataattgcatggtctacatttttcagacgtaaagatgctttgttttcatgatatatttttattttagatgaagcattctaaaacttcctaatattgtggatatcttacctagtttttcaatttattagaatttagaaataggaaactaataatgtgtttttaggagactgcagttggcacgacgcactgaccccaagtcgatccctgattaaaacatactaaaggtttagattaaacctggattacttgaaattttatttctataagatttgtgggagcaggtaggggagcggggtttattggaacctttgtgttactagaaatcttaatgattgggagcttgaaaacatacaacatttttttttgctaaaatgttaggcatgttggtgaatggagaggaagatagggcagtgtggatgattttgataaagaaacattctcaaagaagtctctttatgctaacttagagaaggagagctcaacttctttttgagcacaggtcatctagaatcctcaggttccgtctaaagtaagtttctttgggtggaaagcttgttggggaaaggttttgactcttgaccaactatagaaaagagggtggacagtaggtaatagatgcttcttatctagaatggatgaagagtcaattgatcatatccttctccattgtcattgtgtaagggttctttcatagttattgttttctttgtttaggtaggcatggtgagggagacttgttagggtggtatggttctttttgttggttaaaattggaagaagttatggagagttgctcttttgtgcatattttagactctgtggaaagagagaaatcgaaggtgatttgagaatgagcagatgtctatccaaagtttgaaaaacatgttccttagtaatcttctcttgtgggtaaagttgtagataggtgatggttcaatgtatctaatagattttgttgagtggttggatacttattaagggaggtatgtactttttgtaatcccgccttggttgcttcttgtttttttttttttttttgttgttttctttggccctctttgtataatttcggtgtactttgttgttctgttgctttttttagacgacttacatcattgcctatataaaaaaaagattttcctttcatgtgatacaaacttggcaatggagaaagatgcaagtgcgggtatttattaaataggatgggaagtgccctagtctgtagtccttgttgcatatattttacaagtcttagaatttgattgttggagaacctgttggataaaatgtatccaacaggcttagtagctgttaataagaacctagcagtgaacaacttgatatgttgaaattggacattgtgcaatagatgtatcctagcaaggatcatcctgaattgagtaactgcttgatattttgagtaagttctttagcagttctggattttttgagtttgtctctaattctgtgattttttatttgatgggtaagccttttttctggttagttttttcattttttttttactcctcattgtgacttgaaccaggaccctcccatagctccaatcccaacaccttacctcttgcactaactctcaaggacccattttgtgattcagctgatatatggttggtagttggtactgccaagcttggggcttgaaaagcctagttatgggaacagtgataatgttcatagttttttgggctatttggaactggagaagtagctaagtttttatgggatggagatatagtggaagaggtgagagtctgtattatttgattattgtctctctagtccacctcttttacatttctaggaaggacctatatccttttgtgtaaaatttctccatgtaggatacatcttttcaaccgatatatatatatatttgtattttttcccttaccatttgtatatcattggtatcttttgagaagataaggtgtccaacgaagtggaaatattctttggaggggtccaataaggaagttcttttgcatgagaaatggtttgggaaaatttcttgacttcagacaatctcatgaagagaggatgaagtttggtcaataggtgttgcctctgtgaggagaccttgaatctgcagctcatattctcattcattgcaagtggacttctagcttgtggtttacagtgttttcataatttagcctgtcttaggtactgctcaatttgtttagaaacattgttctcagcaggtatcttccttttgttggagcaaagtgcaagacagtcggaggttgattccattatgtatatattggatcacttggaaagggcagaaaggaagaatattcgaaggtttgaagcttgttgcatagagctgaaagatatatgtatatatatatatatatatatatatttttttttttttttgatagataaaaaggaaatatattaaacgaaaagaggaagcacaaaaaacagtgccctccaagtatacagggagtatacaatcaagcccaaagacaccacccctaaggggaaaggaaagcaaaacaccatctttccttacttagagcctaactagtctaaaaaacttacaagagaagaagggctcaaaactaaagaaaccctgacccaagaccaaagattacatacaaaagaatatttcaatctttgacatatttatataattttttttgataggtaaaacaaaagagtatgtattaaaaggaaacacccaaacagcgtcctgaagtatatagggagtatacagtgactgccaaaaaacttagccaagaaagggagggaaagaacacaaaaaatatcacctgccctcatttagaacctaatcaatcaatgaaactaataagtgaactagagtccacatctataaatgccctagtccacgaccataaattacaaacaaaagagtttttcattctttggaccaataactcagcattatcaaaagcaagcacggagctgaaagatatgcttgtcaagactttgtttttgggtggtgatgagcttctcttttttgtccttttggattttccgaacaatatgaggattgagtagttcacttaaagtgttttgtttattatttgttcattgcttgtatacatcgtatgtacattggctgcatccccgctttttattagttgctttttaaatataatctacttttgtgcccataaaagagaaggaatgaaagatggagaccaatggcagttcctttcgaagatgtttgctggattgttcccaagtacttgggagttcatatttctcttactaactgcattcaaatatgaatttctttgataggtcgggttgggaggttaagcatcaaaattcc

SEQ ID NO: 12884 - DNA, 2812 bp, Vitis vinifera
  Intron number 5 from transcript GSVIVT01030782001 (locus G SVIVG01030782001) derived from phytozome v7.0 (chr-ID chr1 4; pos 16070039 to 16072850 reverse strand)
atcctcttgttcaggttatttctagtatcacttcattttgtaccatgatgaaatgctctctttatgtatgtttccttattatttctctcatcttgttgctttgaagacttgtgatgatactttttcatggatctataatgactatgtagcaatgatgctcttagtctttcatccatttgtatcatctatgtctgttggatattgacacatctctcatattctagttcttagaggttgccatgttagccacaatacttggttggatgttacaacctaggctatgtttgtctatgtgattataaaatcccacaatgggaatgcatgtttgttcggtacagtgctagctagtaaagaaaatttttggattttagcagttgacataaagtgtagaaggcactacacctcttgatattctctcaaattatgccctaggtttactatgtcttttttgtgcacctcttactgtttcctaccacactttatgattccccattgggcccactcagggaatcaactaccttttttggtcctccactttgatttatgtaactctctcctctgtatggagctagtgtcatagtcttatcctcataatgaaaatcttaatcctacatttacatgaaaagacacctccaccgatctgggtgagggcattttaagttggtgtagaggaaatcataggtcattacgggaatgcaacattactaaatacaacttgattgccactagaagaatgatatatttgttggaatatttggattactcaattcaaagccttggatgttggggtgtatgcaagactatcctagggatttctagatctacgcaatgaaaacattcacaaatttgaaccttagatctaggtgcttaaaaaaaatacatgtgatctggagttcccagatcaattccaatcggtgaagagggcggtacagatctcgaataactcatgattttctgcccaatggccttctcctagaccttgacatgtgaggatggtggaatcctctttatggggatggaggctatggttcctctttctaaaaaattgaattgaaaaaactgtaagccctaaacccttaagggttttatttaggcttacctgtgggcttaagtgatttcaactcatcttgggtttgggccacttaatctagcctattaggtcctaattaattaattaattaacccgattgagttccaattaattaattagctttttatataagcttacctatgggcttaagtgatttcaactcatcttgggtttgggctacttaatctagcctattagggcttaattaattaattaattaaccctattgagtctcaattaattaattagctcaatccataaagactatttataagctcttgtgtaaccttgcttatttaccaagatgcctttatgtgcacatatgaataaaaagcaaaaatgtccctcaaataatttaacactaatgagtatgagcttgagcaggaaacaatcggacctagagggaagtattggcttcctcagaatccaattctaaagttgacttaatatcccattatagagagtctgctacactctaatatcttatgatattagattaagatagaaaactcaggtccgtgacctattaacgactacatgcaaactacccatgaattagtgtctgtaatttaacgaggtgaacactgtcaacctcttaagattacctttataatccttgggtctcaaatccttctattatgtaatcaattgacacactctagcttactaagagcatgtatcaatttgtattaaaggaaatactatgaccatagatttcatgatcacaaatctttaggatcacccaaggggatacactgtcttaaactcatgagatatcataggtcctatcttgaaaatatttattatcacttgccttaatcaataatgacccaattcatagggaatatatgaccatcttagggtcttatccataggttaaaaccactaaagaccttaacactaattcaatattctctcaaggttgaaagtttaagcaacacaataacttggtcaagttatgattactcgataaccaatgtcatgacttactgtaggtcctatttaatatgtaaccatatacattacagcactcataatgagaaactcatcctgatgactaagacaagtcattccttcgattaggaggtagtgcattataaccttaaatagattgcctaagtctatgaatcaattatgaatgagtcatcaacttgctaggaacctatgacttggatctttggtgcaactcttaatgcacccaagtcatgtacaatgcaagtagcttgattacattgttggtccaccatttaataacttaagcttttaggttaaattggtagtttaacatggtatttgagcctagattttcagtaagccataattcatatcccacaagtgtttattcccctcagttatttagcccacatgcaagccagcaggctgtttgtgaggtggggtgttagaatttagtccaagtaagttgacttgatatacattgttgacattacgtaacttaagcatttggatcaatttcatagcttaacatctcttatttaccttgactttttgaaaggttatgttccagaattagaaaattaaaaatccatgtttggttatcttagtttgaacattcatattctttgcttatctggtttttcttgttttatttcatcttctttcttgtcattgatatggaaggaaatgagcatgattcattcaatttgaagaattttgacatcaatttcaggcttccttactttcgcttctaccagcagacctgct

SEQ ID NO: 12885 - DNA, 2249 bp, Vitis vinifera
  Intron number 2 from transcript GSVIVT01016106001 (locus G SVIVG01016106001) derived from phytozome v7.0 (chr-ID chr9 ; pos 19082531 to 19084779 reverse strand)
gactgtccagcttgaggagcttttctcaattgagggtaaatcgagtcatggactgagtttcaaaattgatttttttgtttttgttttattttttatttttttgcttgtattcatcgagtgtgtgtttttagggtttggatttcattgcattttccccctcttggttggtacttgattctgcatgtttgagtttttgatatctaagttcagtttgtagtgtgatgatgggggcttcgatcatgggaaattgaggagaaggggcgaggtttatgatttgatttttgggttgttgataatttgagactgggcattttaaagacttcaccccaattgaggttgatttgagtactggattaagtttaagatttgaaaaaaaatttcttggatttatcaggcataggatttgagggtttagatttggttgcatttttttttttctcttggtgagaacttgattctgcatatttgagttttcaaaaccgaagttcagttaagagtgcttgatgatggggttttggttcatgggaaattgtgaagggaagaggttttttatttgattttggctttttgattatttgggactgggggattttaagagttttacttaattgaggataatttgggtactgatctgagtatgaaatttgaaaattttttgttattgattttgttttttttgcttggatttatcaggcttggggtttctaaggtttggatttgattgcattttgctatcttggttagagctaattttcactcgatcttgaaagttctcaattctacatgttgaagtccttgatattgaaattcaatttgaagatgggagtttggtttgatgaaaaataatgaaatagggaagagatttgaatttggagcttttgtttttttgattattttgggctgggctttttgaaggcctttactcagttgagggtaattcgagtatttggcctgagtttaaaattttaatttgtttgagcttgaatttttcaggtctttgggtttggatttgattgcatttttctattctgaatctctgatcaggaataatcttcacttgttttgaacattccctgattctgcatgtttgagttttggatttttgagatattggatttaattgcattcttcttcttgggtgaagtctaagttatcacttgtttaaaaaaaatatttgattccagaaattgagtttttgatttcaagattcagttcagatagttttattttggagtatttgatggtgaactgtttggctgatgagaaattaagggtaaagaggaaaattttaaatcttatcttttaagtttaaatctattttggactgagcaatttaaagacatccattcaacaaggctaattcaagtattgagaatctcatacactaaaataataataacaatcataagttttttttttccttggttgtatcaggtatgggttttgagggtttagattgaattgcatttgatgaatcgtctttttagatttgtctcgaacatgcaactctgaatttatcaggcaattggtgatagataatttgggcctgtgattgaattaaatttgtagaggtttcagcatatatctgtgaacgacttactgtcagttgtcaattatcggtttttgtgtggttagaagagactgtttctataaacagcctgttgggacccatcaaaatccattctctatgaaatacttggctgaaattaatacatttttttataggcaaataaggatatacatatatatatatatataaaaagataacggtgccaaacaaaaagtggcgaacacagtacactggaaatgtagaagtgcaaaaacagacaagcccatacaaccacaaccctaaacaactgtcaaaattgatacatggattgatccactgtcaaaattttcttgaacacccaaaaaccgagttccttgttgactgatttgttaccagaagtcctttgatcttatgcatcttatccatttaaagttttattggcatttacggaagtttatcatcaccctaaagttggttaattcatgctgtcagttaactgaactcctcattaactgatttgttatttcttgttgaaaagtccttttaggtcaattttttttgtattttttttcctctttatgtcttgcacttaaatcattgccagtatggtgataatttatagatggtattttttttaactgaaagggcatttctgaatgacacttttttcctgcaattttaatccagaaccaactactaa

SEQ ID NO: 12886 - DNA, 18350 bp, Vitis vinifera
  Intron number 5 from transcript GSVIVT01028556001 (locus G SVIVG01028556001) derived from phytozome v7.0 (chr-ID chr7 ; pos 9688695 to 9707044 reverse strand)
ctattattgcgaatcctccagcttgtaagatttcttctctttattaactattgtattgcttttatttttttcaaaaacatttattgttcatattgttccattctcctagtatttggttcttaagtgtttgtaaattatgatcatgaagttcataatcacctgtgttcagaatagtgaaacaggacagaaaattgactcgtatattttgtaggttatttttttaggttacatcctagctgatatatatatatatatgtacaagggtcctatattaggaagttaactatacaaagataattactataaatcagcctataaagtaggcactaatactgcaatcctaatttatcctgatatgaattagttaagctctaaaatacattctaacacttccccctcaagctggagcataaatgtccatcatgtgaagcttgtcactcaatctattgaggtcatccttcttaagggctgttgaatataatgtatttatagtatattatctttccttgttaatataggtcacatgtatggtagttaggactcctagccttgtatatatatatatctcaattgtaagtagacaatatatgaatgagaattaaggtttttctcctttctctctctctctttcaacatggtatcagagccaaggaagaaaacctaattctttcctgtttcccgtgtcatcaactccgggaaaccttccggtgactgtgtttctttccggtcaccctccccatctcccaacactttccggtcagtcggatcatcgttagaaaccactcaccgccggcaaaattttccggcaaattttccggcgaactttccggcgacctatttttccgacactgaccataccagaaggagcgcctggaggagatctccaacttttgtgaaggcactagcatcaaaagaggatccacgcgccggccacgctccattttccgtccggcgactgcatctcacgcgccggcgcgtgagggcgcgtgaggcattttccggcgatgcgcctcctcctccagcctcgcctgccgccgaccagcatccctacctacctggttctcccatccgagccctgcacgtacctcttttggggatttttgtctctgtcagccctccaaacagcctttccggcgaagttccggctactttctctccaccccaatccctgcacgtgccttgggaagtgttcatctacctttctggtggtaccacgtcgtgatctgaggctgtctccctttttcggtggtgccacgccgcaatctgaagccgtattagggctctcttcgatccaaatacgtgaatatgaccaccaaaaatcagatctttacctctgttatctctggatctcctatgattacctcagagaaattggttggcagtgaaaattatctttcctggtctgcctctgttgaactttggtttatgggtcaaggatatgaggatcacttggtttcccaggaggcagatatccctgaggttgaccgcgtacagtggaggaagatagatgcacagttatgtagtgtattatggcaatcggttgatccccggattcttcttcatcttcaggcctataaaacttgttttaaattttggactcaggccaaaggattatacacgaatgatatccagcgtctttataaggtggcttctgctattgtccatctcagccaataggacttggatctatctacttatattggtcagattgcctctcttaaggatcagttcttgactgtgatgcctcttactcctgatgttggggctcaacaaacacagcttgacaagttcttcatggtccttactcttattggcctccgtccggatcttgagcctattcgtgatcagatttttggtagttcatcagttccgtccttggatgatgtgtttgctcgcctcctccgtatctcgtccacttagactttgccatctgataacgcttcagattcttctgtgttagtttctcaaactacctctcgaggaggacgcagtggtacccgaggtagaggccaacgtcctcattgcacctattgcaataaacttggccacactcgcgatcgttgctatcagttacatggaagacctcctcgcactgcccatatggcccagtcctctgattctccgctgcctcagcctccgagctcctccgcatctcagacatctcaggcttctattgcctctgttgcccagcctggtaatgcctctgcctgccttacccacacatcttctcttggaccctggattctagattctggagcatctgatcacctatctggtaataaggatcttttctcctctattactactacctctgatttacctactgttaccttagctaatggttctcaaactgtggctaaaggtattggtttgacccttcctctgccttctctacctctcacttttgtcctttatactcctgaatgtccttttaatcttatttccatcagcaaaatcactcgtactcttaattgttctattatcttttttgataaatttgtgaccttgcaggaccggagtacggggaagacgattggcataggacgtgagtctcaaggcctctatcacctcacctcagattaatctcctgcagtttgcatttccactgatgctcctctcctcattcacaatcgtctgggccaccctagtctctccaaattccagaagatggttcctcgtttttccactttgtcgtcgcttccgtgtgagtcatgtcagcttgggaaacatactcgtgtctcgttcccaaagcgtttgaataatcgggcaaagtctccttttgagcttgtccacactgatgtttggggtccttgtcggactgcgtctactttaggatttcagtattttgtcactttcattgatgactattctcgatgtacttggttatttttaatgaaaaatcgagctgagttattttctattttccagaaattttatactgaaatccaaacccagttcaatatttctattcgtgtgttacgcagtgacaatgccagagaatatttttcagcccaatttacttcgtttatgtctcatcatgggattcttcatcagtctttttgtgctcatactcctcaacaaaatggggtagctgaacgcaagaatcgacatcttgttgagacagctcgtactctcctcctccatagtcacgttccttttcgtttttggggggacgctgttcttaccgcttgttatttgattaatcgtatgccctcctctgtcttacacgatcagattcctcactcccttcttttccctgaccaaccactttatttccttcctcctcgtgtctttggttgtacttgctttgttcatattctcactcctggacaggacaagctttccgccaaagccatgaagtgcctcttcttgggatattccagacttcagaagggttatcgttgttattcccttgagactcatcgatactttatctccgctgatgtcaccttctttgaggactcaccattcttttccaccacttctgagtcttttcctgtttctgaagtcttgcccattcccattgtctccccacctgatgctatgccccctcgaccacttcaggtttatcatcgtcgccctcgtgtcgttgctcctctcccttttcctgaggcacctgctgactcacttcctatcccttcggcttcacctgccccggctctgccttctcctaatgacttacccattgctgttcggaaaggtactcgctctactcgtaatcctcatcctatttacaattttttgagttatcatcgattatcttcaccctattctgcttttgtttctgctatatcctctgtttctcttccaaagagcacccatgaagctctttcccatccaggctggtgacaggcaatggtggatgaaatggctgctctgcactctaatggcacttgggatcttgttgttttaccctctggtaaatctacagttggttgtcgttgggtctatgcagttaaggttggtcctgatggtcaggttgatcgccttaaggcccgcttagttgctaaaggctatactcaagtttatggttctgattatggtgacacattctcacctgttgccaagattgcttctgtccgcttgcttctctccatggctgctatgtgttcttggcctctttatcagttggatattaaaaatgccttccttcatggtgatcttgccgaggaagtttatatggagcaacctcctggttttgttgctcagggggagtctggtttagtgtgcaggttacgccgttctctatatggcttgaaacaatctcctcgagcatggtttagccgttttagttctgttgttcaagagtttggtatgcttcgcagtacagcagaccattcagttttttatcatcataactccttggggcagtgtatttatctggttgtttatggggacgacatcgtcattacaggcagtgatcaggatggtattcagaaactaaagcaacatctttttacccactttcagaccaaagacttggggaaactcaagtatttcttgggaattgagatagctcaatccagttctggtgtggtcctttcccaaaggaagtatgctttagacatcctggaagaaaccggtatgttagactgtaaaccggtagacacacctatggatccgaatgtcaaacttgtaccaggacagggggagcctttaggagaccccgggagatatcgactgctcgtaggtaaattgaactatctcaccattactcgtccagacatttcttttcctgtgagtgttgttagtcaattcctacagtcaccatgtgatagccattgggatgccgtaatccgtattcttcgatatatcaaaagtacactaggccaaggtgtattgtacgagaacagaggtcatactcaagttgttggttacacagatgcagattgggctggctcacccacagatagacgttccacttcagggtactgtgtttttattggaggtaatctaatatcttggaagagtaagaaacaagatgtagtggccagatctagcgctgaagccgagtatcgagctatggctttggcaacatgtgaactcatatggttgagacatcttcttcaggagttgagatttggaaaggatgaacagatgaaacttatctgtgataaccaggccgcattacatattgcatccaatccagtctttcatgaaaggaccaagcatattgaagttgactgtcatttcattagagagaagatcgcatcaggatgtgttgctacaagttttgtcaattcaaatgatcaactagcagacatcttcactaaatctcttagaggtcctaggattaaatatatttgtaacaagcttggtgcatatgacgtatatgctccagcttgagggggagtgttgaatataatgtatttatagtatattatctttccttgttaatataggtcacatgtatggtagttaggactcctagccttgtatatatatatatctcaattgtaagtagacaatatatgaatgagaattaaggtttttctcctttctctctctctctttcaacaagggccttggtgaacatatcagcaacctggtcctttgaaggtgtaaacggagtacaaatctttttactggtgacaacatttctcacaaagtgacaatcaacttcaatatgctttgtccgttcatgaaagacaggattactcacaatatgaattgctgcttgattatcacaatgcataggaataggatctgtaaatgtgataccgaaatcttcaggaagtgccttcaaccatatcagttcacatgtagtatgagccatggcacaatattcggcttcaacactagacctagacacaactatctgcttcttgctcttccaagttactagattacctcctacaaaagtacagtaacttgatgtggattttctatcccctttgttaccagcgtaattgacatctgaaaaaccaactaaattcatatttttgttctttttgaaccacaacccttttcctggatattttttaatatatctcaaaatattacaagcagcctcccaatgacacttcttaggtttttccataaattggctaattagtcccacaacatgcacaatatttggtctagtcactgttagataaataagcttcccaacaagccgtctgtaccatgcactgtcctcaaagtcttcatcctccttccacaagtctaggttaggttccatcggaacatctgctggttttgcccctaataggcctgtttcttgtagaagatcagctgcatactttctttaagatagcacaacaccttgtttatcacaagcaaccgcaataccaagaaaatacatcaaattaccaaggttttttgtaacaaattgttgctgcaagtatttcttggtttcttcaatactagtcacatcactacctgacgagtatatcttcaacatatacaataagtaccacaatgctagatgaactatgtggcacaaagactgaatgatcagcctgacttcgcctaaatcttgcaacaaaaactacttggctgaatttgtcaaaccaagctctaggactttgcttcaaaccataaatagccttctttactttacacaccaaatgagtctccccctaagcaacaaatctaggcggttgctccatataaacctccttagtcatatctccataaagaaatgtgttctttatatctagttgacacatcaaccaatctttattgactgccacagatatacgtacacaaacagagcttagctgagcaacaagagaaaagtttcaaaaaagtcaataccctgtgtttgtgtgtaccctttggcaaccagccgtgctttataccgctcaataaaaccattgggactgtactttacagtaaaaatccatctacatgcagctggatgaaccccctcaagtaatggtaccaaatcccatgtgcctctagtaagaagagccgacatctccttatccatagcctttttccaattatgattttgaatagcctcttggtaatccttaggaatagatacagatgaaaaagacaaagcaaaacgactaatagaagaaccaagacgatcaaaggaaacaatactagcaatggaatgttgagtacaaaaacgtttaccttttcagagagcaattggaaaatcagtagaatcactagtagaatacattggagtaggagatggatctggagcacaaggggtttgcaaagcttttcgcctagtgtaaacctgtaagggttttgaaggtggaatagatgtatacaaaggagtaggaagagggacagacagtttgttagtagaaactttgaaaaacgattcagactcgaagagggtgacatctgtagaaacaaatctcttttttagccactggatcatagcacttgtaccctttttgagttcgagaataccctaagaaaatacaactagcagctctaggagaaagcttatccatatcggtctcaaaagatgaacaaagcgcacacacccaaaaatacgaggaggaagaggaaaaagcggagagtcaggaaaaagacctttaaaaggaatgtcacctccaagagcagaagatgacatcctattaataagaaatcctgccgtaaatacaacatcatgccaaaaatatttgggcgcagccatttgaagcataatggtgcgagcaacctcaagaaggtgcctgtttttatgctctgtcacaccattctgctgtggggtataagcacaggatgtttgatgaataatttcattagaagaacaaaaattggagaaatcagatttcatatattctaaagcattatcagatcttaacacatgaatattagaagaaaattgagtctttatttcactatgaaaggtttgaaatacatcaagaacagatgatctatcttttaacaagtaaatccatgtcattctagaatgatcacccacaaaggtaataaaatccctataacctaacatgttagaataaagacaaggaccccacacatctgaatgcactaaatcaaaaggatataaactttgactttctttagaaagaaaagacactgatgttttcctaattgacatgcatcacaatttatttcgaaaacagactcactaaaagacaactttttttaaccaagaaaggttaggatgacccaactgataatgccaataaaaaggagacacactctcagcagcagccgcaacaaacaaagaatcatgagtaagatagtagactccccctaactcagagccatgtccaatcattgtattcagctggagatcctgaaaaatacaatgagtaggaaagaaagtcatggaacaattcaaagattttgtaatttgattaatagaaagaagattaaatgacaattttgggacgtgtaagacttggttaagctcaaaagaggaagtatgacagtaccaaaaccagagacattagaaacagaaccatcagcaacagtaataggtgaaagagactgacaaggtgtaaagttgttgaattgatgctgatctccagtcatatgatttgatgcaactgaatctattaaccaagaattacgagagaaggcagcaagtgcccccagtgcctgactggagggcatgggaagcaatagaacttggttgagagtgaagcaacctatcatactccttagagatctgaataacatccttaggaacggctgaagaagaagtagatccattagaagcaattgtaacagctgctgctttagggatattggacaacttagcacctttggtagcccgatcaggcttcaaagcttatcccaacatcgatccacaatgtgccctcgtttaccacaaaactcacataacctatcacgatttttgctctttccagtgtcacgcacacggccatgtgcagccatggcagaatgctcaagatccacatcaggggaggacaaggttagagaagcagattgtaggctagagaaagcagactgaagtgtaggcatggtattgtccccaagcaattgactcctaagagtgttatattactcatttagattcattaaaaaaccacatacaaataggttttcccattaacgcttctgagtctctaaatttgtacaaagaggtagaagctcgcgaaatttattgataatccctttataggcagcaaaaaattttggaagggacctctcaccttgtttattatcaacaagttgaaacaaagagaatatacaagaattattaccatcattagaaaaatctctttgttggcataccacatctctttagccattgatgccagaccaatagaggcagcaatctcaggttccaaggaattcaacatacatgtcttcattgcacagtcagactaacaccatgctgcatacttggaatccttaggatccaacattttatcaacaagatgatggtcgcgaccttgggaacccaggaaagtacgaaaagctggggaccaaagaacataatttcttccattacacttcactgttgtaccaacaaaaacacaaagatttgaagtagacatgttatccatcatcttgaatcacaaatacaattactacaaggcacacaacctcaaacacggaggcacaaagtgatcaatcacacaagaggggatcaatctaccctcacaataaacaaactaggattggaaaaggaaaagaaaggatcaccaagactaagaggtggctagggttagagttgaacttgctctgataccatgttcagaatggtgaaacaggacaggaaatttactcatatattccgtaggttatttttttcggttacatcctagttagttttcattagaaaaagaatatgagggagagtgagcgagtgcacgagagcgacggtgaggagggagaaagtcgagtggagaatcgaagaaaacggaaggggagtagcttttgggtggagttgaaggtttttgaagtaggagttgaggagagaaaaggcaaatcccaggtattcatcatggaaagtaaaagggggtttcatcatgggttcgtctggggccggcgagtgtagggctttttctggagggtttgtaccagtgcatcaaggatgggaaagaaggtaaatgggaaaagggatggaaggaaaagggcagaagctactctctggtgtcgccaatagtgcgggatgcttcctccgtttaggggttgttgatctggagaagaagagatacaacatctgcatctcgaaaggtagtggagaaagggggggatggttggctatggcggagagtttgcataaattggatgtttgtctcgacaaaaaggagtacaaataggaagagagggtcttgggaaggtcaaatgacgaattggtgaagaaaccgtggagcaaggatagcaaaaaggtcagagtggaggtaaaaggggaggaaataagtagaaacctaaacagattggaacattgtgtggtcggaaactggaaccctagtctagcaggaggaaaggatttggagaggttggggtggctaatggcaagttcttgggggttgaaaggaaagctagggttggcaagtttggggaagggacgggttctattggagtttgaatttgtggaagaggtcagatgagccctcacctctgggaaagggtcggtgggagggatttagatgggtttggagcgctggaatccaaggtctgggtgtttggaagaaggggaattaagaaatgaagcctgggtgaggattctgggtcttccaatatcattgtgggtaccgtccattctaaaaagagtgggggaagtgtgtggtggtttcttagccatcgatccatagacatagagaatgggggaattacagtgggctcagattttagttagaatgaatggggaagacctgccaagttcgttggaaatcggggtagagaagttgacctatcgactctccctttggtgggagatcctgccgtcgctgaggtagaacacggtgaactgcagtggctcgtctggttgatcaagcggagaggttaggggagacgctgatgcatgccttggtctgtgagtggaagagttgacaagcgcgtggctcgaggtgcagttccgatcagatgatgggactggagggcaggtgaacggggcgggtagtgaagtatttgaaatcagggctcaaaatgggtcgttgacccggccttctcgtgaactgttggttgttgggccgtctttgtctggccctgcagtgggattcgcgggctcgaagagtgttgttgggcctatttctcaaggcccatcagaggaagaactcttaaagggggttatggttggtgggtctaggccagaggttgggccgtcgtgttccaaaggtaaggggtgggccgccgttgaggtgaacacgccgtctattgggccttctctcttgttaaaggaaagtcatggcccgtcccagtcctagcttactgtaagtgggcttccattgaaggcttgctccttagttctcactgaaacctgcaaggggagcaactcggagcttgagcttattatgatgtgagaaaaggaagtctggaggaagtagcaggtggattctcactacacaatgacagaccgtgcgctaatggaagaagctgcaaggtatgggtatgattcaatttcgtggggcttaagggtctcggggtcttcccttcctaattctttttattttggtcgggctccgaagcgggagtattacgaccattctggggtgctaagggaggatattcaggaaggaaaattggtaagcatcctagatgcagacgggcatgctgaggttggcaatggttgttggcacttggttgaggttaattgtattggagattcggcaagggatctggagtggggttcaattcagtctgaaccccaagaagtaaggggtgaaaaggaggttaattgggaggaaagcagtctggctaaattcaaccattttttgggcttttcgactgtaggtctggaaaaggaaatactgagcttcttgatcaaaataagaaaaaggagggaaaggatacacagtaaaggtcttctggagaaatcaaaatttgataaagggagcttaagaggttggagtgttcaattaactatgagggggaacttaagaagaaatgtcctcttcagggcagagggagccagtcaacggttgtccaatgaatctaaaaatcttgagttggaatgtgaggggagcgaatgacagtactaaaaggaaaataataaaatctgtcataagaaagcaaaaggtggatttggtgtgtatctaggagacaaagttacaagttatggctaaaagggtggtgagaagtttaggtccggggggattcttagactggagaaccttggatgctactggttcggtaggaggcatcttgatttgttgggacaaaaggtctatggaaattttggattggggggtgggttagttttccatttcctgtagatccaggaatgtggaagatagtgcagtctgggtatttacgggagtctattgtcctttttcctgagaagaaagggagtgtttgtgggagaagattggggtgattagaggaatttgggaagaaccctggtgcttagggggtgattttaatatcatcatatcccaaagtgaaaggagcagacaagggagaataacctcaacaatgaggagattttctcaagttatagacgatttagggcttgttgacctcccgctgcaaaggagattatttacctagagtgggggcctaaataatcagtctttggccagattggatagatttcttgcaactcctagttggctcgatcagttcattagtgttgtccagagaagattacctcgacctacctcggatcatttcccagtcctacttgagggtggtggtcaaagaagaggaccctcccctttcaggttcgaaaatatgtggctcaaagttgaggggtttaaagatcttcttcgtggttgtggtaggggatggtggttagaggcagtgctagttatagactggctgctaagctaaaggaaatgaaacaaattctaaaaagttggaatagggaggtgttcgggagactggagtgcaataaagttgcagctctccaacaagtggagctctaggatatggtggaaagggagagaagtttgatggaggaggaaacaatctataaaaaggaagccaaggagggatatgccaagtgggtgaccttggaagaaacccatcagagacagctgtcaagggaattatgactaagggaagggaatagaaatatgggttactttcatcgaatggctactgctcatcgaagaattaattccctggacaaagtcaagataaatggggtgtggttaacagaggagcaagaagtaagggaaggggtagcgaacgccttttagcaattgctctcagaaagttcggattggaaggcggacatagggggattgcacttaaagcaaatcaatcagcaagaagcggagttgttggatctctctttttctgagtctgaggttcaggcggctttaatggatatgaatggggacaaagccctaggatcggacggtttcactgcggctttttggcaaagctgctggggtttcgcaaaggaggaaattttggatatgttttaggaatttcatgagcagaattcgttccttaggagccttaacaatacgtttctggtcttgctacagaagaaagagggggcttaggaccttggggattatagacccatcagcttgttaaggggcctgtataaattgttggctaaggtgctggccaatagactcaagaaagtgataggaaaagtggtctcccccaatcagaatgggtttgtcatggggagacaaattctagatgcttctttaattgcaaaccaggtgattgattcatggcaaaaagggggagagaaaggtctaatttgcaaattggatattgagaaggcgttaactgacagtttttgatgaaggtttgcaaaaaatggggtttgggccgaagtggctgggatggatgtggagttgtatatctatagccaagttttcagtcttggtgaacggagtgccagccgggttctttccgagttctgaggggttgtggcaaggggaccccctttccctttatctttttgttatgggaatgaaagtgctgagtgttcttattaggagggctgttgaagggggttttatctctgggtgtagcatacggcgaggtagaagacaggctattaatatttcacacttgccttttggggttggggaggtggatgaggtggacgagatggcaacggagctagggtgtagggtgggacaactgcctgtagtctacttggggctgccattgggggcgcctaataaggcctcttccgtgtggtatgggatggaagagagagtgaggaggagacttgccctttggaaatgtcaatatatatcaaaaggtgggagaattacattaataaaggccacgatggcgagtatgcccttgtatcaaatgtctcttttccgcatgccaaagacagtggcaaggaggttagaaaagttgccaagagattttctgtggggagggggtaatctggaaaagaaagcccacttagtcaattgggaggtggtttgcgaggttaaggaaaagggggggctaggcttaagaaagctaacccttttgaacaaagcctggcttggtaaatgggtatggagatttgcttgtgttaaggaggatctttggaagcaagtgcttgtggcgaagtatgggtaagaggatcttggttggaggacaaagaaggcaaatggggtgtttggagtaggggtttggaaggagattttgaaggagtttgcttggtgttgggaaaacatggtgtttaaactgggaaaaggcaccaaaattagattttggactaatctatggtgtggatctacagtgctgtcacaaaggttcccacatctttatgctttggctgtgcataagaatgccacagtggaagagatgtgggaccagaacttcggccaaggcggctggaatttaaggtttcttagggactttaatgattgggaattggacatggtaggcaatttacttcttgttttgagagggcataagactactttggaggaagactcggtttttggaaggatgggaaaaacgggcagtatagattcaagagagtgtacagtctgttggttagccctagtgctgccgttttcccaaaaagtaacgtttgggtggatagagttccaacgaaaattgcgttcttcgcgtgggaagctgcttgggggaaggtgcttactctggataagctccagaaaagaaggtggcagcttcctaattgttgttttttgtgtgattgtgaaaaggaaattgtaaatcatattctaatacattgtacagtggccagagtgttgtgggattttgttcttgggttgtttggtgctcaatgggtttttcctgaaattgtaaaggaggtcttatttagctggaggggctcttttgtggggaaaaaaaggaaaaaaatttggaaatccattccgttcattttttgcacgctttggaaagagagaaatatgctagcttttagagggggggtgttagcaattcagaagcttaaaaattcttttgtttgtaacttatagggttgggctaaattgtatattggtgaggaagcaccctcccttataggctttttggaatggttagcttccaattaagggatggtgagttttttggttttctttctttggttgtttggccttagctaccttgtatactccttgtatgctttgtggctttttgcctcttgttaatctatgctatgcttatttatcaaaaaaaaaatatatattatacaagagtcctatattaggaagttaactatacaaagataattactataaatcagcctataaagtgggcactaatactgcaatcctaacttaccttgatatagaattagttgagctctagaatacattactaacaacctataatagtgaagtgtgccatttttctcttttagtttttgcgtttttgtttgctttgtttttattttgaaaatttggtgattttgtaaataatcacccaatttattttattttatttattttattttctgttaagaatctcttgaattatgtatcttctagataccagtgtggtaacttgtacctggtacagaaatttgctgcaataccagtgcagtaagttggtacagtgctcactatatgtgagaggagttgccattaatttttatagtgtcagtgttacaagttctaggctttaaacttgaaaccttagaggcatataatttttgttgctgattcaacttgatttctcttttgagagcaactattctgacactaaattgacatgtatcccaaactgtgaaaaccatgatgcaggataactatattagttaaaattgctggctaccatcactccatgagtgacgaggtttatgaaggtatgggtttaaagattgtgaagatggaagctgattgttaagttctagggtaaggatttatcagtaattagttcgcttgaattatggaaaataggttgcttaaattcctggatggtggctagtttgggttttggtatgttggataacagtgtaaaggtagagtgtagtttaggattttgtatgtacagggtgttcagtttaagaagaaagaaatgatttcgggttttattgttcaatcaaggatgcattagtgcagacaattaagaaaatagaaaaggaaggagaaggaaagaagaacaagtgaaaggaagaagatgctaacctaccaggtaatcatgcctcaaatgcttagtgatcaaatgaaatcaggctgcaattttccacataagtccttgtttccaaaactgtttaaaaccttttaggcaattgagaaccttctaagggcaagactaatcaatataaaacctattaagaccaaagttacgaattatgatgtttctacaactcataattgaaagattgcaaaccaagaaaggctcctaattgaactcaaactagaagctaaacaaaagtagaaattcaataccatagaagttgaatgaaaattgaggaacatcttgaaatttgaaattttcagctaggctgctagctaaattctaagcaatatttgaatagaccctatcaagagaaaaaagaatccacaacaaaatgactgctaagctagacactgaaaaattcaaatatgtaagattattcaaatacccttagtgattgaattacaaagaaatcttaaataaacctaaatttttgctctcttttcaatgtgctctgaagcagtttatcaggaacgatgaaatcgaatgtttgggtggtttaaaaaatatttccatggtttgatttggaacatgaaaataaatgatgttttctttcttttctattattgttcaacagcccattcatcaatgttagcattgtgatcacgattctcatttgaggtttactcaaacaaacataagacaactcctgtttccacaatatcagactgtttgtctgcacgaatgatattgaaccggatgaacgggataggaagatataaagggggttcttgaaaatttctgatgatttggatgttgcaaccaaagctaaagtaaaacaagatcctaccctctgcttgtctaaaacttgttccaattgggttcttgcgaaagacagtgactgccaatttcttcagtttttcaacttaatcatcaaaattgttgtgggaaaaattatcttaaattctgaacatctgtaatagtgtctaacatgtggctaggagtgcaggaggaatgtcataactgacacaactgacacagtcactacttttagaatggccatttgcagaacttgggatttaccaatattgtctgcctactttgttgctctttaaatgaactagtcaacctccattataataattcctacaacaaacccaattttccctttctttccaatcctgccttgcttcagggagcattttcatccttttgaagatgaagtgatcttgttgtgctaactttacttagtggctagctttagttcagttttccttgatatttcccatctttggtgttgtccatcttcttactcctgggaggtaccagaagcaaaagtttttgcagtggtgctagattagaattagatattcttcaagccattggggcggaaagaaatagaagttgattttcgggaaatctttaaatatttctcagttatatcattctatatggcaaaaaccttattattctttgaactgtaggccagcatgtcttttctcactgctgcaaactctttcttgacattcttattaatatggaacaaatagtttggaaatgatcatgctaagttcctcttcattttcttctcagttaatttaatctaatattatatttccactttatttgatcattgttggacaaagaatttatcctatctatgtttggctgtcttattttctgttactaacctgagctattttttttaggacatacac

SEQ ID NO: 12887 - DNA, 4338 bp, Vitis vinifera
  Intron number 20 from transcript GSVIVT01021366001 (locus GSVIVG01021366001) derived from phytozome v7.0 (chr-ID chr 10; pos 4533107 to 4537444)
tgggatatagtataaaaaaaaaaaggataaaagatgtgattgaccaaatatgttataggacaaataatgaaatatattattcagtctcttttttatatctcatctacatacaataacataatcttaagctgaaatatgagatatagattatgtataggtgtttgaatatgagttatatatatatatatatcttaaaatatcattttcaataggatacgatcgtatcccaagatattatatttaatagaatatgttatctcatgtttatatttaatatattgttaaaataaaaacttgtctagaaaacatatccaatgttcgatctttgttgaaaataaaaattataaagcatccctatatttgctattaaaaaggtataaaatctcttacatattaagtattatttgaaaatagttttataatttataatttaataagtaattttttattcctttattaataatatttatgatttaaatatttaaatattttaaaatgcatctctatggccaaccaaacataagatataatatatcatcccatcttttattttatcttatactatattcaatcaacataacatggtcaaagcatatgtcctatgaatcataaaattatttttctcatctattttcttttctttttttcaatgtttatatcaatcattttaaaaaacaaaaattttatttaaaaaataataataaataaaaataaaataaaattatatatttagaataatattatataatattcttttaatttataaattttaagtattttaatcatgaatattattaacaaagaaataaaaacttacttattatattataaattgtagaataattttcaaaaaataatataatacttaaacatgagagaaattcatacttttttaataacaaatatttggatatataataatttttattctaaataaatatcgaatataaaaacaaaatgcatcttctattattttgtttttaattctttttacaaaccaaacataattatgacatcacatatgatcaaaaatatcttaggatatctttttctttaaatatgaatccaaaatataatattatattattaaaaatgagatttgagagggatataatatctatcatatcgtatgatatatatatcataccctatactatccaactaacctaaagtagcatatagactaagactatgtttggtcataagatagaatagaggaagaaataacactaatgaatgtctcatatttggttacattatcttatctcatgtttaaccgggcataagatatataagtgatgggatagcttatctagtctttttttctttttatatcccttctacataaaatataataatttcaaattaagatataagatataagatatacatatttcatagatggtaaatttattcctctcatcaattttttatattacctattttggggaaatttttttgattaaaaatgtatattttaagttagaaaagaaaagagtttgaaaatatgaatatatattaatttaaaatatataatactagtgttagtgttatttagtatatatatacttaacaagataatagtgcaatatttttatttataaattttaaatattttaattagaaatattattagcaaaaaaaataaaaacaaaaatgatttattgaattataaatgataaagtaattttcaaacaatcttaaatatgagatagatgatggtcacaatttgtgcactctaagttgaattagtcttgaatgagttaatttaggtcacttgtccatcactagtagggttaatatccatcctataatcctctcattaacaacagcttcatttgttctgatcatggccattacaccctttaagtgactcattgtgaaatcttattccattttcatcatcaacacttagagtttctattgattcttcttcttttatttataaacatggggttcccattcgattctttctcaatctcgaatgacaaatgatgttgagaataagaattgcaaatcaatttctaaccatgattcttagttctattttcaattgtgatacacaataaaatgagcagcttaccatttgtacaatttaaatgaatagaacatttcacaccctcatcatcaattagttgtataggacttattggtatattgacaatgaatacatacttcactaaaagataacactctattggatctagctttacaatatgatagacaatccctaataatttttatatgattatagtctttgagacctaaatatctttacctttacttactttaaaatagaaaaataaaaaataaagaagattattaatcatctttattatcacaaatactaccaacaatgctataaaaatacaatatttctaaatattaaacaatttcaaatattgtagccttaaactatttttaacaaaaacaatatttatttgataaaatatttgtaactttgtaagtcatgtaacgtcaagagtgatttgaaaatgagtcaactccggttgtgtgtaaaaaacaaaaattaacgataatatagtattactataaaataattttacataaatttaacctacttcaatttcaatttaatatcgataaagttttggtatacaactaagaaatacaactttatctactatattgaaaccttattataacatatatttacatctatataaatcaaatatgcaaatgttaggactgtcttatttatgtttgttggcaattttgttcttatttatcctgacttaaggaactttagaaataatgacttactctctagtgctaaagattcaaggttgttgttggctcaactggaaaatcacaagtataacaaagtttgtttaatggtatgtcaagtgattgaagagttaaagtgaatcgatattttttttatatgctctaaaatgtttaaattgatgttttggaaaaataggagacgctcgaacggtggaactagcgctcaagcactggaaccattcaagtgcttatccaacgctcaagcgcctcataagtatgttcaagcaatcatctagaatctaccagaatatgatagaattcgtttttgaaaattcacatgtattctttttggtaaattctagatactaatctcttaggcctataagcctatataaaccatctcttaatccatttagggttggacactttgagcaaatcaatcaacttgccttatcattcccaatttctcaagaaagaattcataagattgaattctaagttgttgaaatgacatttcaccccctcaaaggttaagaggaacctactagagtattagagttgttgcgtcgagaatgtggatcaaggtataggtgttggagaataagtctttaaggtaaagcaaccaagtaaatatttgtacgctgatctcaaatagtggattataaattagagatcttaaactctgaagttttttatctttatagttagtatggggttttccacgtaagtcccttactttatttttcattctatttattgttttgattattcctaatatctcataggtttaatttgggttaatttattcatcgcttatattgtaatctttgaaaacacacattcacccaccccctaggtattggctctataggacaaacagattttcagcaaacaataacaaaactatcataaaatttcatgattaggctttattatttaccaacatttgatcttggtcctatcaataatgctccttcaaacttctaaatagaaaaaataatatgttgatttttttctttttaccttttaatgtttaatataaataaaatattataaaaacaaatagtttattacttatcattattaatcattaaagttctatttagaattaagtaaacaaaaaaaaaacaaataaacaccaccttaatcttattaattataactttttataaaattaaaaaaatttaagcatcaattaaatataaaattaaagaaaatactcaagtatttttgttcactaataatatatattatgagatttttaattgaaaatgttgtatggagagaccaaaattaaagcattatgagttcaaaatctacaaattttagattcgatgataattattacataattaaaattaacttgtaaatgtgtcacaaataaataataataataataataataataataataaaggtgaatttaaattaagaaacaaatcattttggaaccccaaaatagattacaatctggctcaaattttttaatcaagaaaatgccagaaacgtagaaaatccactaaattttttcacaattaatcctagatttggtaagatttcttgagatcttcctctccctcaccctcatcc

SEQ ID NO: 12888 - DNA, 11864 bp, Vitis vinifera
  Intron number 4 from transcript GSVIVT01013628001 (locus G SVIVG01013628001) derived from phytozome v7.0 (chr-ID chrU n; pos 1932530 to 1944393)
gggatcctgctgctgtccagaagatcaaacagaaggtgccttttctattgttcaatgcttttaccagtatatttgtatactttctttctcattctgatgcttgcctattctcctccataccaaaaaaaaggttgtggttgggggcacaagtgcaagaagctacataattaggggtttgggtatgaagaagtatatgaacaggagtgatgggaaaactcaagaaacaaggttttacagaaataatccaacagtatctttattaatttgtaagaactaaagaaaataaacttgtaatcatacgagagatgcactgaaattttttgttgggaggttaaaggatttaatatcatgtgttttccctcgcaacaaacttagtttggataaaattagaaggatgagattaagcaaataagaagaacatgactgaagttgtttccttctagtctaattatagtttcaaggtgttctctgagggctgccattgtgttgcagcttttagtttggataaaattattgtttcctatactgattattagggaaaaaaatataacattttgaaaagataaatataacatttcgaatgctttcttggaatgtaagaggggttaatggcagagacaaaaagaaggtgatcaaggctttgataaaaaaaatagggtggatttggtttgcttgcaggaaactaagatccaggaaatgtcaaggggtcttgttcatagtttaggagtggggagattcttagaatggggagctgtggactcaaggggagttgctggaggtatagtggttttttgggataacagtgtgttggaattggtcaaattggaagcgggcatgttctcaatctcttgccattttaagaattgtgaggatggtttcaggtggactcttaaggagggatagggagtgtttctagggtgggttgggggccataaagggactttggagtgacccttggtgtgttgctggggtttttaactcaattagatgtcttgaagagtgtagcatgcgagggagtttgaacttagacatgagaaggttctttgaggtaatagaagacttagagttaaaagacctgctgttgttgggggggccctttacttggagtggaggggtgaacaatcaatcaatgtcaaggttgggtcggttcttagtgaatgaggggtgggactatcgttttagctagttgatgcagtgtgtctttttgagacctgtgtttgacaatttctcagttcttttagatagtggaggtttgaggagaggcccctcccttttagatttgagaatatgtggttgaaggtggagagctttaaggatctcctgaagttgtggtgggagggggacaactttaatggctcttcaagttttattttggtgtcaaaattacatgttgtgaagtttaaactgaaggagtggaatagagatgtttttggcagagttggagttaggaaggatttggccttgaatcaagtggactattgggatgctaaggaaaaaactagcatcttgtctttggaggagttggaagcaagaaaagaagtgaggaaagattataaaaaatgggttctgttagaagagatttcttggaggcaaaaatttagggaagtgtggttgaaaaagggtgacagaaatactggttttttccacaagatggctaatgcacacaaaagaaggaattatgtggacataattaatattaatggtgtttgaattttggaggggaatgaaatcaaggaaggggtggtcagagcctttctgtctttgttgtccaattcgggggactggtatccttctttatctgggttgcagtttgaaacgctagagactgtgggcactttaggtttagagaagccattcttggaagaggaggtttttggtgctctgtaggggtgcagtggggacaaagcactagggcttgacggtttttctatggcattttggtagttctcttgggactttgtgaaggatgatgtgatgagattcatcagggaattttatgaacatggtaactttgttaaaaacctgaatgcaacctttttggttttaatcctaaaaaaagcgagtgctgaagatctaagggattttagccctataagtttggtgggggggctgtataagtggctgatcaaggttttagccaataggctaacaaaggtggtttctaaggcctaaggggtgtttgtggagggtaggcaaatcctagatgcagtgccgattgctaatgaagccattgattcgatcttgaagaataacgaatgtggtatcttgtgtaaacttgacatagagaagacatatgaccatgtgaactggtcttttcttctcacagttatgcagaaaatgggttttagggagaaatggattgggcgaatcatgtggtgcattgacactgcaagtttctctgtgttggttaatgacacctctactggtttctttcaaagctcaaggggtttgaggtagggggattcgcttttgccttatttatttgtgattgctatgaaggtgtttagttgtctcctaaagagggcaatggatggaggttttttgttggtttacgaggtgaagggtaagagtggagaaggggtttagatatcccatttgttgtttgctgatgataccttggtgttctgccaagcttcctaagatcaaatgacctatcttagctagttgcttatgtggcttggggtcgtatcggggttgagaataaatttggaaaagagtgaattaattccagtgggtagggtggagaatattgatgaccttgcaatttggatttagagtgggtagcctcccatccacttatttgggccttcctttgggtgcactgtttaagtcagtgacaatttgggatggagtagaaaagcggttccgtagaaggttggctatgtggaagagacaatacatttccaaaggaaggagaacgaccctacttcgaagcacgttgtcgaatttacccatctattttatttctttgttgcgcatgccgagctctttagatagagactagagcaaatttatagggatttcccttggggaggtggaaattaggagcgaaaaccttatttagtaagatgagcgttggtgtgcttaagtaagaagaaaaggggtttgggtgtcaagtgtctttcaacactaaataaggctcttctttgtaaatggaattggtggttcgcaaatgagagagaggctttgtggaatcaagtgattagagggaagtacggggaggaaagaggagaatggtgttctcgggaagtgagaggcatatggtgttgggttatggaaagggataaggataaactgggacattgtgggtactatgatttctttccttgtaggtaatgggcggagggtaggattatcgagggataggtggtgtggggattcccctttgtgtgtgtctttcccatccttgtttgctttagctgttgataaggaggtgtgggtggtggacatttgggatcccttggctgagggggattgggggggatggaacccttgtttctcaagatcctttaatgattgggaggtggaggaggcggaaagcttcttgaggcgtctacatgggaagagtgtgcggtgatgtggaagacatggtgctttggaccaaaacaaagagtgggaagttctcggtcaaattcctctactatgctatagagctgggcagatcttctttgtttccctcaagttgcatttggaatgtgtgggtgcaacccaaaattagcttctttgcttgggaagctacatggggcaaagttttagctttggatttaattcaaaaaagagggtgggccctgacaaatagatgctttttgtgccatgagaaggatataaaccaccttcttcttcattgtactaaaataagggtcttgtgggaattgtatttaaccttggttggggtgttatgggtgttgccttctttagttagagagactctccttagttgacatggttcttttgtgggcaaaaagtgtaaaaaggtgtggagagcagctcctctatgcatcttttggacagtttggaaggcaagaaatagattagccttaaatgatgatgtgttttcgattcaaagactcaaatacctttttgttttttctctttggtcagaggcaaagttgtttataactaattgacctttaactttagttaattttattaattggttgagctctagttaaggttgtttttttacccaactaggcgcttgtttacttgtacttattggccggtttggtggtgggtgtatgggtattgtataccttgagttgctcttttgacgcctcttttcaatagatcttttctttatctgtcaaaaaataaaaaataaaaaaaataaaaccacttttattaaaaaattaaaagtgtcactaggacacacgaaagtacacgggatgtatgcaaatagcgcctaatagcataaaaaaatgagaaagagccccaacaacaacacccttgcttaacaagaacccgaccactaaacaaaatcaagtaaagacatagaatttgcccttatgtacttctttaccgaagtaaacaaatttctaagaaagaacattttcaaaaaatgacttgaatgctcctcgttatcaaatgactgaagattcctttctgcccaaaccattcaaaagatacataagaaagctgctctccaaacctttttacatttttttcccacaaacaaactatgccaccttaaaagagcctctttaatagtagcagcttgcacccaatggataccaaaaagatcaaacaacaaccgccaaagaatcctaacttgctccactaaaggtgggaattctgaccataattgaatcacaaagcatgatgagcccaccaccacgttaaacaatatcaacaaatttctaccatcaacttttacgagaactttggcacactgcaaaattggtagaatgtggtgtctttgtcgattgccacaaaaccaccacaagtgttccctagttttaaagaaggttactttatcccataaatgcacaagcaggtccactactctcatccatgcctctttgacatgaacacctttcctataacaacccataattggagaccatctacttagaatacctagaaaaagcaatttgtccatgaacatccttcgtccactttggagggccttttttgcattagatattaactcaaattcaaacaagttgactttcccctttagactccaattgtgcattccctcctctttaaaggaggtaaatttgggatgtaatatgacgattttcttcgttgtcttgcaatacaaccccgaaggacctccatttttcttcatgcttcttcccctacttgatctacattgcattgccaatctctgtctaagaaccatgtacaatgtaaaaaaaaaaagacttgtctttcttagaagccattgaaacacccattgctattgaagatgtttttgctagggtaactctttggtcttgtagctagaagaaatcccaaggcttcttaactccctagcaagagtactccatcccctagggaattctctaccttctaagaacaccaaaacaaacctcctcgcctccatagagcataagaaaaatcatccggccacatttctttggagctccaatgaatgctttcttcctcctttactataagcctcttggaaatgctttcttggaaccttgagacaacattcttccaccccagttaggagttgttgtgggagtgatttcaaactcctaacttgcttttgtggagggaagacaaatcttggatgctgtctttatagcaaatgaggtgctagactcaaggttgaaaagctaaaaaagggcggtcatttgcaaaatggatatcgaaaaggcctatgaccatgtgaattgaggattcttattagcaatcttggaacaatgggctttggggcaaaatatgtaaggtggatgaagtggtgcatgtccttagcttggtttttggttttgattaatgggacccctacaagtttctttcaaagttctagaggcctaagacggggagatcctctttccccttttctctttattttttttttttttgatcagaaacgaagaagattatattaataaaagaacaaatacagcccttttctctttattttggtaatggaagtgctttctagtattttgaagacggctatggagggattcattaaggctatgtttggttcccggaaaatttgagggaaaatgcgagggaaagaaaatacaaaggaaaagtagaaggaaagaaaaagtgaaggaaaataaaaaaatagattaaaagttgataaattattttttttgttacttcaaactcatttgatttattttaactcatcaatataaagattaaataatttaaaaatacataagtttttaattagttttaattatatttgattttctttgatatttttcataggacaaccaaacatgagaaaatcattttccttagcattttttttctttcctttgtactttccgggaaccaaacatagcctaagggtttcttggccagtgggagaggaggagagggtatggtagcgtcccatcttctttttgttgatgatacagtgattttttgtgatttagataaggagcatttggaggctttgagtcgggctttcatgtgatttgaagtgatttctagtcttgaaattaatttggataagagtgagttaatcctagtgagagaggtttctaatgtagaagagttggttagggtggtggggtgtaaagtgggcgctcttcttctactattttgggtctacctttgggcacttccttcaagtcttttctcgtctaggatgtagtagaggaaagattttagaaaagactcgctatgtggaaaagacaatacttattgaaaggagggagattgactttagttaagagactttatctagtctaccaatctactatatgtctttatttgtaatcccatgtaacgtgagccttagagtggagaagcttcaaagagatttcctttgttgggggggggggggggggagggagattgactttagttaagagactttatctagtctaccaatctactatatgtctttatttgtaatcccatgtaatgtgagccttagattggagaagcttcaaagagatttcctttgggtggggggcgaggagagctccaaagaaagcctcatttagggaattggtcattagttagcttggataaaatggatggaggtttggggattagaaagttgttcacttttaacaaagccctcattggaaaatggagctagagatttgcttatgagaatgaggttctgaggaagttggtgattgtagggaagtatggagaggaagaaggggtgtggtgttctagagtttcgagggaaggttatgggatgggtctttggaaggcaatcgacaatgggtggaaggaattcaacaacatggttgtttttagggtaggcaatggtaggagggtgaggttttggaagggtaggtggtgtggggaggatcctttggtagaggcttttccagagttgttttcaattgtcattgataaagaagcttgggtaaaccagatgtgggagcaagttggggaagggggttattggaacctagtgttcataagacagataaatgattgagaattgggagaggtggaagagttgcttaataggttgcaagggcaagtgatcagaagtggtgttgaggatgttatggtttagcaggtaacaaagggaggcacctttacaatgaagtccttttactactccctaataggacgttctccaaaaggcttcctattaggtattgtgtggaacccttttgtctcgatgagagtcagtttttttgcttgggaagcagtttgggaaatttttttaaatctagatcaactaaaaaggaggggttggtgtcttccaagcagatgttgtttgtgtaaagatgaagaggattcagcaaaccatatccttctccattgtccaaaggcgaccttgttgtggcacctcatccttgctctttttaatgtccaatgggtaatgcctttctcaatcaaggatacctttcttagttggcggggatcctttgttgggaagaaaagaaagaaggcgtggagagcagctcctttatagttattttggaccctttggaaagagagaaatcaaagagcctttgaagatttagacttgacagaccatgctattttatgctccttcatgtacatgtttttggagtaggttagggtacatttagggtctaacactttgtctttattcgactttattgataggttgggttgtaagtgaagtgaggggggtgtttttttttgtgaatcactctcttttttggccttgtatacatcgtgtatactttagacgcttttaatacaaatgcttttacctatcaaaaaaaaaaaaaaaaagaaatctttcaccccttttagtaaaataaccaaactcttttctccaagtctaatccaacttgaaaatccctgacccctctccaatatcttgcctacaacctgtcctttcgccaccttgactttgatctcaaaggatttagactctactctaaaccagcctttacctattaatgtagtttgtttcctttgtgccatacacaccataacaagcaaggaggagccatgttctcaaccctccttgtcttttgtctatacccccttcactttccaaccaaaaattagctctttcacaaaatctggaagcacccacagcaaccttaaaattgctaacatgttccacaagtttgtgattttgacacaatagactaggatgtggttcgttgattccttattgatgcatctattggcatcagccatcctctccttataaggacatcaatgggtatgatttttctccatgtagcctcccaagcaaccccccaaaaaaaaaaagaaaagttctcaaaggggcgtaaatgccccaaatttctttggtggggatcaaaacttgaatctcatcatgtaagaagttgtagaaagattttacttggaaaatcctatttttctcctccctttaaagaaaactatcctcccattcttttcgtactcttaaccttgtggaaatgcttcataaattgcatcacaacccccaacttccaatcttgaaaatgtcttcttagaagaagggactgggagccttctttctccattactacccacaagtcagacaccgttgcatttctattagaggcaatctcaaatagttgaagaagcaaatctttcatggcacactcacccatcattagaccatttggttttgaggtttttcctaaccagaatagaggttctaaggctaaattcttcccatcctcttattgctttccataaacccatagtacaagcttctctcacctctacagtgtaccaccctccgccacctcttcatatttgtcttcgattatcctcctgcttaggctattgtgctcaaggtcatgtctgcacaaccatttgcctaccaaggctttattaagaacatccaactttctaatattgaatcctccattcctcttatcttacacacttctccaattcacaatgtgcaattgtctctccttaaaatgactccctcacaagaaatctctctgatattttttctaacctactcacttccttaagtatcataaaaagggacatgaaatatatgggaaagcttgtgaaagtacactttatgagggtcaatctttcttccttttttcaagtaccctttcttttaaggtgccaatttccttttgaacctcttcttaattgaatcccataccataaaagactttattatatgctcccaaaggcagcctaagatagatggaagggagacttccaaccacctaaacaatatggccaaatatctaaatcttccacttcactaatcaaaattatctcgctctttttcaatttaactttcaaacctgacacaaactcaagcccatttccaatacttctattgcttaacattagccttgggaaaaaaaagaaaagaagaaactggagtgtcatatgcaaacaatacattttgatgctccaactcaccttggtaatcacctttttttagcctatttgtcaagacagctaggagtttatagatgctcccaaatcagcctaaagtccttgatatcttccacaccttcctttttaggaatatgaacaaaaaatgtagcaaaagatattccaatcttgtggtggattgcattagtcaacctttttttttttcttgttgatttggaaagaaaaaaggtattcctcaagatgtccatgctctcatttcttgacaaattagtaatgtaatcacccttagaaagagagctagagcacatatatcttgaattatagctctcgtgttctagttggaagaagataattaaggcaactagaatctaatttgagaataatcttgtgcaaaatgccataagttctagcatgaagctgattttccagaacatttagaataaatggaatttacaaaagaagataaacttagatgcttttcacaccttataactttttatttattttcttacttagcttatggtaagcttattttttggatctctttcaccaaaggaattttttgtcatcttccaacctttgttttttttactcgcatgcaaggtttgatgtatcagccaatctaggtacacaacttgaccaagttgtatccacctcggccaagcctgttccaattccaatatccaagtttttttaacttggagatgatatggtggtctgagggaaaaatcgaagatgactcattctttgatgctattttttattttttgtggaaaaatggtttgggcctagatttcatccatgttttccaataaaatgagtagagatgattgaggtgccgatgtggtgtggattgattcaaaagggaggagcagcccgaaacttgtggagagggaatatgtttgatttagaaatggaatctggattttttggagctagaaatatggttttattctactcagttgtagtgaaagaaaaaatgggtttgaaagagaagaagaggttttattccactcagttgtagagagagaaaaaatgggtttgaaagaggagaagagagcaggtgatgaagaataatgaataatgaatggggtaatgggtatttggggtaaatggggtaatgggtttttatggtttacccagtgggtatttgggtatttatataatgaataatgaatataatgtgagaaatagaaatatgggaatgtagatataatttgtaagaatttaatttaattatattttagataaattactcaatttttttaatacaattacataaggtgtataaattaaattttgttagataatatattactaaaaaaattaacaattacttgtatcaacattaaatcaaatggcgataaatcattttaaaatttttataattaattaaatttaacatgaagttattgaataaaaggacttttagtattaaaaactaatcaaacacacttttataattatttaaataatattaattataattaaacctaaaattttattatatttaattgtatatattttgcatatcatctgatatcgacccaagatactgagactaatgtgccttaggacctctcgagttaatgaccaagaccataactttgaaccatgctcgcatgattgcctgctttgtttgtattagtgctctgagttggttttatattttattcttatccgtactcctacattatatgtattatatttatatcccttataacttcttatttcattttcattttttatttatttccatgtgtttcttttttctttttttcgtttttttcccagtgtggtttgatgtttgatgcgattgaagatatatgaattttatgtaattatcatttgttttggtcattgatcggtgtccacaatgcaggaagtat

SEQ ID NO: 12889 - DNA, 12833 bp, Vitis vinifera
  Intron number 3 from transcript GSVIVT01010091001 (locus G SVIVG01010091001) derived from phytozome v7.0 (chr-ID chr1 ; pos 15230000 to 15242832)
cttcctcctttgaaataccctcaggtaactactaatataggaaaaagacgataatcctcatttatgtaacttcccaattacttgttgatgtttcatggaattgatctattttgtagcatgctttctcttgaaatgatgtgaatatattttgttttctctgatagtttggtatattttctatttcatgggccaaataagtattttgtgactacatttgaacaatggtttggtgttgtattatggagagtggagaaatcaccgtagcaataaataaagtggaaatgaaaagacttgtttgtcaaacatgttgacgtgtgccaaaattttcaatatatatatttagatgttgtagatcaatagatatataatagagtgttggttcagtgcatgcatgcaactagttggaaaattggaatagtaggtgaaatctaaagcattttgacaactcaattaagagaggcttagtaacttgtaatttgtgattgaatcctaaattgaagttataatcagttatctcctattcatatctcctgcttggtgtttttttagttttattttttaagcaaatgaaactttcttatataattgaaaacataaataaaattccatcttgtttggtacaataagttggtatttaactcaaattattattattattattattattatttttgaagagtcaaaatatgtaacaattgtatttgagtctattacattatttattttgacaatgattaggaaactgttagtttaggtttaacttatagaactctataaatataaggttttgcataacatttttaaagaaagtataaaaaagtgagcaaagaccgaagagaaatagataaagggtgcattgaattttggatagagagaggtcgtgagactttgagtttggatttttgaaatttattaataaatttgatttccctttctagtgaatttaggcgattaggataaaccatgtaaatattttgcctggtataatttactttatttttcctattgtgttggattgttgtgattttcctaataagtaatatcaaagcttccattcccaacaagtggtattataacttttatttttacaacaaatgatattaaagacatggtgtaaagatgtgggaaaattattttgaagatgatggttgacattaaatatgatattgagtcctttgatagaaagaataatttcattatttgacaaaagtgttgttaaggatgttttggtacaataagaacttctcaaaacattacaaagcaagaaactagagagcatgacagatgaagaatatgaagaattagaagagtggtaagtactattcatttaaatctagctcttaaaataaattacagtattttaaacaagaaatctccttttgatttataaaaagagttagaaaaaatttatatgtcaaaatccctaacaaatagactacatttgaagaaacaactatttaagttgaagatggataaaggaacgtgattttctttttgtcatagtcaatgaaaattgtgttgactcttagattttgactttggatattctttttatggatgtcaatataaggagtgatctaataaactttgatgctattgttattctaatggaaaatgattaaagctccaaagccattaagagtagtactatgaaagtgaagatgtttgatggtattgtaaagacactgagtaatagtaagcatgttcctaacttgagaaagagtttaatctctttaggagatttggacatttttgggctatgaattttttgtaaagaacgatattatgaatattaacaaaggtgttttgatagctatgaagattgggaacataattttagctaagtgtcacaggatgcttcaaatgagcctccccatgggtttatatagagcctaggaagcttctggagactcctacacttagccattggagagaagagtgtggaaggttctaaagatgcctagagaatcccacacatctctacactatggtggaaggcatgagaggagtccaaggctttctagataattctagagatctcttgtatattcttgtacataggcttatatatagaattgtgtagggtattcttgaatattcatgatttgtaaggaaccctccaagattcagagagttccattggtgcctataaataggtgagagcctcatttggctaaggcaccaaacaagtgagttcaaaagcacttgtaaaagcttcctttgagcaataaaagcttacattccttaagagtttcctactacaccttctaaagctttcaagttgtgagcatcttagcctagcaagctaagcatcgggagtaaggatgagttagcaagatcaagggtttggcttgtctaagtaccacacaagcttaggaaaaaactaagtccgtgacaattggtatcagagctaggttatgaagagggcatagtaaagaaagcatgtcgggctccaacgtagaggagattagtgagcaaacccatgggaaggagactgagcctactgtatggggtaagggcaagggcaaaaaagataaatctcgtgatgccatagccaacatggaggcaaggctagccaaggtggagttagccatggcagacacttgggaaggggaggacttgattgaacaaggcatggaaaagggcttagatgatctaagaaagcagatccaagaccttcgtgaagggttgctaggctcacaagttcatccgatgtcacacaaggagttcatgtccttccaagacaaggtcataagcatgttcgctagcatggagtcaagagtggaggccttggttgcacgcatggaggcccgagaccaggaggttcgacaagagctggccatctataagattgtcgtatcagcacgagtcatggccactcatgaggtaccaagggtgaaggtgcccaagccacacacgtttagtggcaagagggatgccaaggaactggacaacttcttgtggcacatggagcgctactttgaggctatcgcactgacatatgaagccactaaggtacacaccgcgaccttcttcctcatcggcaatgctactctatggtagcatcggaggtttgtcgatatggaaaaagagacgtgcaccatagacacatgggatgcctttaaacgagatataaaaaggcaattctaccctgaggacgtggcttacctagcaaggaaaaatatgaaacatctcaagcacataggctcgatccatgagtatgtcaaagagttctctacacttatgcttgagaaacccaacatgttcggggatgagctactattcaacttcatggacaacctgcaaagctaggtcaagcaaaagtttaggagacgtggtgtccaagacttagccacgaccatggcagtagtggagtccttggtggaatacaaaaggggagactcctccaagcccaagtcacggtccaagggtaatcatgccaaaggtaggggagatatgggatttagggggtacactcctaaggaaggatcaaacaagacctctggtggcaaggatggtaaaggcaaggacaaaggaaaggagttcacacccaggaccaattgcttcctatgtgatggtccacattaggagcaggactgccccaaaaggaaagccctaaatgccatgatcgaggaaaatgagaaggagattgatgctcatatggaatcattacaactcctaaacgtcctcaaggccaagccggtgcctaagacgtctcaaagcaagggactaaagtatgtagaggcccttgtaaatgggaaggccaccaaggccctggtggacactggtgccactcataactttgtctcggaggatgagacaaagaggttagagctccaagcatccaaggaaggaggttggttcaaggcggttgattactactcaaaaagtgcacttttatagtttgttataaactattttaaacacttttgagtagtatttattaccttttaactcaattggcacattaaggacccttgcaagtgttactaatcaatttttggctagttttggtgtttttggtagcttttttatcattgaagcaagccaagaatgagagagaaatttgtgcaacccttggaaacaggcttccaagccaatcaagatctgtaaggaagaaaaacaaagagagaaattcaacatgaagcaatttcgcatggttatgcgaaatcttcgtatgctatgcgaaattcaaaaggacatcaacttaaagacaaatttagagcactttctagagttcattgtatacatactatatatcgtttagaagcttgggaagtcaggagtccaacgcttcaagtggtgtgcaaatcggagttgaaatgaagaagttatagtcatttgaaggcaactgcaccaagctgatgtgaaaatttcgcatcacctattctctgatgcgaaaatttcgcatcacctttctctgatgcgaaaatttcgcaccagcaaaagccaaatacgaaaattttcacaccagcaattccaaatgcaaaaatttcgcaccagccaaatccacatgcgaaatttttgcaacttcatatctgacttgcgaaatcttcatgtaatcttaagatatttgcacacccactcagttatattttttttctcaagatattttgtgtaattacctatttcctccttgtaatccgctaaagatatttttaggatttttaggatatttaggatatctaaaaggaggtaaaaaatatctctctggatatttcttagaaaatatcttctatatatatctctgatatcatgtaaagaaaagaatgtaatccacggaggaggatcatagtaagaaatatatctacagagcacttgctctgcttttctttcacatttttgcttttcattttctttctagccaaacatcctcggaggcctggaggatgagtggctaggctttttgtgtttcttggattgaaggaaacttggtaaaggatccggatacaaaggtaggagttttccttgttttagtttttaatgaagagaaggttgtgacccggtaatggtttttatatttttagttaacttaaaatcccttataatcacctgggccaacacttggtaagcttttcggactcaatccatagagatccattagttatctcttgcgagcctctgggaggtggtttaaaggtaggattatctagaataaccaacacttggtaagcttttagactccctggagacatccattagttatctcctgcgagcttttgaagggtaatccaaggttaaggatcaccttgaatggaaaatgctaggtgagaggtacgagccattgcaagatgcatcagtgagaaggatttagtgttgaaaccattaatgggaagcaactgtaacacatcggttgggaggataactataggttaaatccccaattcgaggaaaagatccagaatctcctcttttgtataagaaacctgaacgtagtgacctgaaaatccaagaaaccttttctttgtaattaaaatcagttactatttttggttagtttaaaaccaacctttttcaaaccaaagattatgttttcttttaaagctaacttgcaaaagaaaaagcaccaatccaattctttaaactaatatcaggtgtgaaatgaaaacccatcctagtgaacgatcctagaaccactatgctatgctagctatgctaccctagtatatggtgaaataggtttttaaattttgctgataactcccgtctgagtactgaattataagacaccaattggggacaaatcagtagttaattcaactgtcgagccatcacacgaagtagctcgtagggtggctatgcacattagctcatgggaaggaagagtcgacttcatagtggcacccaaggacgacttcaagatggtactggagatggacttcctacagaaggtcaaggttgtgtcactacccttcctacgctcaatggctatcttagaagagaagaagacatgcatgatccccatggtcaccgaagattctcctaagacccctatgttatcggttaggtaagtaaagaaaggtttaaagaggaaataggtgacctacctcgccacccttaaagaagaaaatgatgatgggtcgggggagcccatgcctatggaaatcaagggagtccttgatgagttcaaggacgtgatgccgccctagttcctaaaagacttcctcctatgagggagaaagatcataagattgagttggagctaggagctaagcctcctgctatgaggccatataggatggcaccgcccgagttggaggagctaaggagacaacttaagtagttcctagatgcaaggttcatccaaccatccaaggttccctatggcgcatcggtcttatttcaaaagaagcatgatgggtccttacagatgcgcatcgactactaggtactcaacaaggtgacggtaaagaacaagtaccctattccgctcatcgctgacttgttcaatcaacttggtaggacgagatacttcacgaagctagacttgaggtcaggctcctaccaagtaaggatcgcagagggggacgagccgaagactacatgtgtgactaggtatggcttatacgagttcttagtgatgcctttcagcttcaccaatgccccagcaacgttttgcacactcatgaataagatcttccacccatatttagacaagttcgtggtggtgtacttggatgacatagtcatctacagtaacaccctaaacaccctaaaggagcacgtagagcatttaaggaaggtcttcaagatcctaaggcagaacgagttatacgtaaagaatgagaagtgctcctttgctaaggaaaaagtgagcttcctagggcattgcatcaaagatggtaagctaatgatagatgatagcaaggtgaaggccatctaggaataagattcacctactaaggtgcctcaactaaggtcttttcttagcttggttaactattaccaacggttcatcaagggttactctgcaagagcagctccactcactgatcttctcaagaagaacagggcatgggagtgggacaaaaagtgccaacaagcctttgaagatctaaaaaatgttgtgactaaggagtcagtgttggcactacccgaccacaccaaggtttttgagatacacatagatgccttagacttcgctattgtgggagttctgatgcaagatagacatctaatcgctttcaagagtcgcaagctaaatgacatgaagaggcgctacacaatataagaaaaggatatgaccgccatcgtccattacttgcgcacttgggggcactatcttctagggtctcacttcatagtgaagaccgacaatgttgccactagctactttcaaacacaaaaagctaagtcctaaacaagctaggtggcaagacttcttggccgagttcaactatacgctggagtataagctaggaagcgttaatcatgtggtcgatgccctaagccacaaggtagagctagcctccataacaagccagccccaataggacataatggaccttctatgggaagggctgcaacatgatccagtggctaagagcctcatcgtcctgacttatgaagggaaaactaagcggttttgggtggaggacgacctactctacactaaggggagatgactctacatacctaagtgggggaacataagacgaaatctgattaaggaatgccatgatatcaagtgagttaggcaccctgggcaacgacgcatgagggcactactcgagttggcttactactggcctcaaatacgggatgaagttgaggcctatgtgaggacttgtcttatgtgccaacaagacaaagtggaacaacaacatcctagaggcctgttggagccactacctatagcgaagcgtccatgggagagcatcactatggacttcatcatcgggctacctaagttagagggctatggctcgatcatagaggtagtggacatgttctctaagtatgtgaccttcatagcagcccctactaactgtactatagaagagacaacaaggctattcttgaaacatgtggccaaatactgggggttgcctaagtacattatcagtgatcgcgatccatgtttcattaggaagttttggacggagctcttcaagcttatgggttcgaagcttcacttctccacaagctttcacctgtagaaagatgggcagactgagagggtgaacaccttactagaactatacttaaggcacttcatgaatgccaaccaaaaggattgggctaagttgttaaatatagcccaattctcatacaacttgcaaagaagtgagtcaaccaacaagagcttgtttgagctagccacggggcatcaaccattgactcctcacacactagcaatgggctatacagggagaagtccagcgactttcaagttcactaaggggtggcacaagtaagctgacatagcacgctcatacttggacagggccgctagaaagaggaagaagtgggctgacaagaagcgacatcacacagagtacaaggttggagacatggtgtttgtcaagctccttccttaacaattcaagtcgctaaggtcggtgcataaaggccttgtgaggaggtatgaaggacttttccccatacttgggaaggtcggcaaggtgtcctatagagttgagttaccatcgaggttgaagattcatcccgtcttccacgtaagttacttgaaaccatattacgaaaatgaggatgatccaagttgagggttttctaagagggcacctacaacggctatgacctcctatggcaaggaggtagaacacatcattggagaccgagtcatcaagagatgaggtgtgcctcctactacggagtacttagtgaaatggaagggactaccaaagagcaaggctagttgggagccagtagttctaggaacagattgagcgatttcaggtagtaggttagatgaggacgtctgtggcttaggttggggagagtgtcacatgatgcttcaaatgagccttcccataggtttatgtagagcctaggaagcttctggagacttctacacttagccattggggaaaagagtgtggaaggttctagagatgcctagagaagctcacacatctctacactatggtgaaagacatgagaagagtctaaggctttctagagaattctagagatctcttgtatatttttgctcataagcttatagatagaattgtgtaggatgttctagaatattcatgatttgtaaggaaccctccaaggttccagaaagttccattggtgcctataaataggtgagagcctcatttggccaaggcaccaaacaagtgagttcaaaagcacttgtaaaagcttcctttgagcaataaaagctttcattctttaggagtttcctactacgccttctaaagcttccaagtcgtatgcatcttagcctagcaagttaagcattgggagcaatcctaacttagcaagatcaagggtttggcttgtctaagtgccgcacgagcttaggaaaagactaagtccgtgacataaatctatgaaagtgaagtcatactatgaggagtattttgtcaatgttaagtaagttgccggagtagaagagcacaacaagataatccagattcctttttcaaccaagagtactcattgacataaagatgaaactaactgcaaaagtgatgaagtatgaagaagacaaaagatgatttctccagtcaagtttgatgaaaatttgaacttgacatatgtttattcttactaattgttatgattgagagaatttgagtcaatgtgaagattgttggtatttggatgaaattatttattttttattttagtagtcaatatttgttaagtttgtattgtagtacattacattttttgagtttgactaggattaggaaaccatttgttaagggttagctcaatattgttagaatgtagacagacatgaccataatgcattctctatggggtttcatggctctttggttgagttcatgatcaaggaaactgaaaagcttcatgcctaggttttttagtttctagctaatgtaaaaaagattagtataaatgttgatatctcattttttttttcttttttgattgccttttctttgcatgacaggtgggtagatacaataatctagatgagcatcctttcttctcggctcaattacttgagccaatgtttcctcttttgcaatacccgtaggtagctacaaatatagaaaagacattataatcctcatttatgtaacatccctattacttgtttatgtttcatggaattgatctattttgtagcatgttctctcttgagatgaagtgaatattttggttttctttgacagtttggtctattttctatttcattaggtaagtaggtatttgatgattgcctttgaacaatagtttggtgttgtattatggagagtggagaaatcaccgtagcaataaataaagtggaaatggaaatgaaatgcctttttgaaatcttaaaatgcacatatttgttgaagtactacggaaaaatgcttggagttgcaaatgaaaatatgatacgagttagttaaaggctccaatgaaataatattatgtataagaatgtcattattcaaatttcgcttcagcatcaatgtctgaagttgtttgttgaacatgttgacatttgaagtgtgctaaaactttcaatatatatatatatatatgttgtagctcaataaagtgttgttttagttgcaactaattggaaaattgaaattgtggatgaaaactgaagcattccgacaactcaatcaagacaggcttagaaacttacaatatgtggttgaatcctaaattgaacttatgatcaatgatctctagtgcatgtctcttgcttgaggcttttctttaagcaaatgaatcttgcctattttttatttattgaaaattgtaaataaaatttcatcttgtttggtataatatattggtatttgactcaaattatttacttctttatttttaggagagccaatatatgtcaaacttgtatttgagtaaactacattctttattttgattaggattaggaaattgccagtttagggttagctatagaactctataaaatgtaggcgttttacattgggtttctagagaaaagcataaaaaaatgagcaaagaccgctgagacagacaaaggttatgaagttttgagtggagaaaggttaagagacttagagtttggatttccgaagtttgttaataaattttattggcacaccaaaattagatgactaagcttttaattggaaaggcaacattgactgtggatgagaagtcaaatgttcatctaaaaactaaatattaagcacccaagtagtttgtcttatattagtcaaactcttgtgacgaattttgaatcatgtcatggtaggaataagtcacaaaggaaatattgtgatagcaaagatgatcattcccaatcacacttttggagggatgtgaagcgttactattgccataaaaaaggacataccaaaaggtattgtgaagaattgacaaagtacctataaataaggaaaaatcttgaatcctaagatacttcaaattttactgatattattgatgaagaatttgataagaaagaagattttctttctattataattgatgaaaatttggttgactcttagatttaaactttagatgttcttttcatatgtgcccatgtaaggagtgacttgatacctataacgaatgtgatgctagtattgttgtaatgggtaatgattcaagctctaaagctattgagattggtactgtgaaggtgaagatgtttgatggtgttgtaagggcattaagtaatggtaagcatgttcctaaattgagaagtttaatctctttggaacctttggacattttgagttatgatttttctacaaaaaatggtattatggatattaataaaggtgctttgatagctatgaagaggaaaagggtgaaaattttatatactttgattagaaaaacaattttaggtacaactatgaaggtcaagacatgtcatgaaaagtcttcacgccaaaatgatcaaaactccattttgaactaaaagtactcattggcacaaagatgagactaattgtaaaagtaatgaaattttaaagaaggcaaagatgatttttcgagtcaagtttgacaagagtttatatttgacatatgtttattcttattaattatgtagaattgagagagtttgagtcaagatgaaagttgttcgtatttaactcaatctatttggttttttttttttttttttagtatttgtagagtttgtgtttgagtatattactttttttagtttgattaggcttaggaaactattggttaagggttagctcatagaactctagaaatatatggttttacatagaatttctagaaaaaaaaaagtgtgaaaaatgagcaaagagtatatacataaagggtattgagttttgtgtagagaaaggttgaggaaattttagttcgtatttttgaagtttattaattagtaaattttatgtggggcataggcagttagaccaaaccacatgaatcttgttttattcaatctattttatttttctttgtatacttgggtattgtaatttttccaacaagtgataggagagcttcgtttttctcaacaagtgctatctcagctttcatttcgcaagacaataaaccatcctctcttggaagggcttaagatggcattttattgacatttgtgccgagttattggttcattaactgattctaatttttctgatttgcaaataggtcctgcatccttgtgctgattcagtcaatctaaa

SEQ ID NO: 12890 - DNA, 7706 bp, Vitis vinifera
  Intron number 11 from transcript GSVIVT01019146001 (locus GSVIVG01019146001) derived from phytozome v7.0 (chr-ID chr 4; pos 16174328 to 16182033)
cgcataattcttgtgcatacgtcctctggatacaagtatggtcactttcttctttacttttggtactcgctatttgatttcagtaatgagtaatgttttggaactttttaaatactctcaattttttttttttgactcataattttaacatttcaaaatgatataaatccgtgtgtcaaaggtagaaatgcttaaattgccttgaagtttgtaaacaacattttaattgattaaagatgatgatattgaatttcaaattttaccaattgggtctttccccccttaatctagatcctttttatttttttcctttctttcaattgggaagagttcatcatccttctttgtaagtttccctatatatatggaatgttatgtttgtttattgttaggaaaaaaaatgtaaactttttttttgtttttgataggtaaatgattataatattaagaaagtgccaaaaagggtgcatcaaagtatacatgacgtatacaatggatgccaaaaggcataaaagaaggaagggaaaacaagaaactactcccttcctcaataagaacctaaccaatcaatgaaatctaataaggacattggaccttcaactatatacaacttggtccaagacaacaaattacaaagaaacaaggttttgagcctttggtcagaaagttcctcattatcaaaggatcttttctttctcttattccacattgtccaaaagaggcataaaaggggctactctccatgctttttatcgtttccttccaacaaaggagtcacaccaccctaacaaagtcttctcttacagagtaacgtaacacccaagaaacgccaaaaagagagcaaaaactgccacaaaatcttcgccttgccaatgtagcaaactgcggtcaattgacttcttctaaatatgacaaagaatacatctattagccaacttccaactcctcctttaaagttgatctagagtcaaagcttttccccaagatgcttcccaagcaaaaaaacttgctttaggtggagcccatgcattccaaacaacccctactagaaaatgcattgttctcctaggctctagaataggttaaagaggcttaatggagaaagttccattttttgtctccaaccaaattatcttatcctctccttcctcattcaccaccttatcttgcaacctaaaagggaaatgctccacaaccccaatctcctaatcatttagatgcctagagaatctaggagtccaaatacccctttcaccagattgaatccataaatccaccacccatggctcttttgagctagctatggcaaataaggaaggaaaagggacactcaaaggctcatccccacaccatatgtccttctaaaactttaccctcattccatggcccatggagaaggatactctactattgacaatccccccaatctccttatagccttccatagcccaaaccaagacacatctcacttttttagaagactacccccttccaacttccctatatttgccacaaacaatccgcctctagaaaacctccctttccattgcaagatgctaattccgtttgcaaagtaaagccttgttgagcgaggagagacgcatgactcccaagcccttttcttttatttgaacaaatagtagcccaattcactaaatgcaactttctctctaaaggcccatcatcccataggaagtcccattgaatctgttccaacatcaaactcactatccttgacatctagaacaacgacatgaagtagataggcgagctagataagtgctccaaatcaaagtgagtcccctccctttgaaaaaaaaatgtaagattgatcaagctaaaacattcaggttaattagttgtaccgtttgaaatttgatcatgtttggatgactggggtggaatgcataagagagagcagttgtggatttgatgatcaaagatgcctaaattgagcttatcccttggaaagatgcttaacaatgaggaccaattgtgtggtggaccatgatattcattttgaatgtcgacatgttgaatcacaactagtacttgagcagggagaatttagaaatattggaaattgtgtgatctaatccatcagcataaaatgttcagattttttgaatctcatggtttagattgattgtacaaaagatcccttaagtttgatgttactagaattagaatttagatattgaaaaataaaataaaatgtagtaaaagttagatataatgaagaaacattgatttcttactagttgattaactggtggtttgatttttttagatagctatgtgatgttaagtacaaactcaaaaatactattatctagtccaattagggatttagcttaagaagggcaaactagaataataatggaaggacaataaaaattttagaataatatatacaaaaaatggcatgttgattgatagtatttttatttaatgcagttattattgtccctgacgactttttatattttgaagtcattgcttaataacatcattatttatgacattaaattatatatttcttagcataatcaagttaccattcgtccattggtctctcatttaattgtgcaattaattcttcacaatgttcattgaagaaaatgcctctctatagtatcaatgacaattggtatgattactgttaaagttattagtaattaaactaatgaatgcatagggcattgtgtatccacgagtttatttgcttataacattgacactaattctagggtagctatagagaggacattttttgctatgaataattataaaaaattgattgcacaatcaaatggaagatcaatgaatcaatgatagtttgatagtttgtattcagaaaggtattttttgcattgataatgatgttattatgcaatgctttcaaaataaaagaaattgtctaagataataaaagcaatatcaagctctagatcattagggtgcacaacgtatttgcaatcctagggatatatatatatatatatatgtgtggtaaaattccattcgaagctctggatcattagggtgcatgtatttgcaatcctaaggatattatatttaggcaacgaaagcattctaagattaaaattttagatttaggaacatttctttgatctgaatgttttcaaatcatttgtaatcgatgaagggaatgatgtgaatcttgaatacctcactatttttggcttgatggctttctcctagaccttgacattagaaaatggtgggattctctctttgtgaggatggaggctaggactccgctaaagagaagaattgggaactaatggacaaacaaggattaaatgggcccctttaccacatctgtacaaatagaatagcccatttatatatctagtcaccaaaaagaagcgacaaggaagcaaagctgtctacgaagctttgctcccccctgtagtcatagcactcgactcgtcatctttggaagacaatgacaagagtgtttaatcctaaactcctaagggggttcatatagatttacttataggcttaagtgacttgagcccatcttggcctttgtcactcaatttagctcattgggttttaattaattaattagctctattagatttcaattaattaattagttcaatccaaaaggaccattcgttagctcttatgtaaccttacatatttacccaaacatctttatacacacatataaataaaaaacccaaatatccctcgaacaatgtgccaccaaggaatgggagcttgagtggagaccattgggacctattggaaaataatggctccttgaaaatccaaatcttaaattgatttaacattcaactataaaaagttagctacactagtatcttatgatattaaatcaagataaaaagtttgagtctgcaacctactaactactgcatgcaagctcatgaactaggtgtttataatctaacgagatatatattatcaatctctcaagattacctctactatccttgagtctcagatcttttgattatgtgatcaattaacacactctagctcaactagagcatatgtcaaatttcattaaaggaattactgcagtcacaaatttcatgatcataatgtcttaatatcatcaaaggggacatattgtctcaaaccaatgagatatcatggtgcctatcttaagaatacttgtcgccgcttgccttaatcaacaataacctaattcaaagggaatatatgaccactttaggatatctcccgtaggtcaaaacccttaatgaactcagcattaactcaatattctttcaaagttgagagcacaatcaacatagtagtttggtgaagtcatgaatacccgatagccaacgttatgactcattgtaggtcttattcaacgttatcaatctctcaaaattacctttactatccttgagtctcaaattcttctattgtgtgatcaattaacacactctagctcaaccagagcatgtgtccaattcctctaaaggaattattgcagtcacaaatttcatgatcataatttcttaatatcatcaaaggggacacactgtttcaaatccatgagatatcatgacgcctatcttaagaatatttgtcgtcacttgccttaatcaacagtaacctaattcaaagggaatatatgaccactttacggtatctcttgtaggtcaaagcccttgatgacctcaaaattagcttaatattctttcaaagttgagatctcaaataacatagtagcttggtgaagtcatgactacctaatagctaatgtcatgactcaccgtaggtcttacccaacgttaaccatacacactagtgtgtttgcatgagaaactaatcctaatgattgggacaagtcattcctccaattcgaagatggtgcactataaccttagattgttaaagtccatgaatgagctatgaataactcgtgaacttgcaaggaactcatgacttcgagcttccatgcaacttgtagtgcaatacagatgatgtaggcctgaatacccaaatcaatcataatgtataaataggacaataaaaggataccaaaatcataaatattaatggaatcttaaattgttatatcatgtcatgttttttagggctctaccctaacaatatcaacttttgttatcattagttttaaaatttttgttgtccttgaacttattgttctaggttgtccctcttgagctaaattcctggatccaccactattagaggaaattatattgatgattatccattaaaaacatatactcacgtttgtgttccttaaaggacgcttaaattgttagaatttgttaagacaattaaagatagaagttgtgatttcccacatttagaaggatggaaatcaagcagtgtaccggtcaactgatatgggccatgtcttgaagaactttgagatttaatagaagaatatgccacaaaagttggtaagagttatcaagactattggaaaggttgagcttttcctagatgggtttgagtgcatagtcttctcactaaaaattgaggtagactataatttaatggtgaaaaaattgaagagcaaaagaagtagaacaacaaatatcactgcttcaagtagaaacattttttttttcttgtggtatggtgtgctttatagacttccttatactaggatgaagccctctcctttgctatgtgcccattaaaaaaaaaaataatatatatctctaattctctgataaaaaggaactcttagcctatccttaatgacagcacagaaggaaaaggcagctttcatcacaaataataatataaagttgaatgaaaacagatataaaattcatagaaaatcaatttgctttttaatcttagattagatattacctcatagttatttgctacatttataagaaattagctgttttaatattgtattagcatcataatagttggactaaggtttgtagagggatgttcttgagcagcttgaccagatgaagcatggtcaacgtgcctgcatttttctggttttgctacaataatgtaatatttataacaaagataattggagtgcccaaaagaactacttttcaacattcaagaccatggttgtctatagatgatactctccaattcataaaagagtatatttttttgataggtaagcaaatatatttaaagcacttggaaaaggtgcacaaagtacacacacagaatacaggttgccaaatgcaagcaggaggaaagaaaaacaataaaccaacacccaatacaaaagccttcatcctaaagcctagaaatacgtagaaacctaggcttaacaaacacttgggtgaaaccaacctgaatcaccccactactgcacatccacttttccttgcccttcctgaaaccaccaccttctgccccttaggaattacaaaataagcccatgactccaaaatccttaccttaaggccaggtgagacatcattggtctctctcctcttctataatcctcttaattttgaggagagacgaacacctagcctctaagctaaccaacagcaacccaaaaaataaagcctacccggtcactacacacttctaggtttacagtcccctactagggctcccaaaacctgaagccccttccttactacacagttctaggttcacaatcttggcatccttgggctgattctctggggattccacagccaagcccttgccaaaaatcttatgcagaggcctgtaaatgtcacccttaccctttgctaagagtcccacattcttctcccttcatagaaccaagctttcggtcctccctgaaaaaaaccctcgtctttggacattggaagaagccgaagaagatgaccttcccatcaaccgacaaactggagatgaaaacttgtcagagaaacctccatctggaaatccagccacttcctccacgagggctccatcagtaaggagaagacaaataattgatgacaaaggagtcggagctgagaatgaacctaaccttccaccatcatcggagccgccatctgcaacactgatatccaaaggagccctctctcccttaaaaaggccctccctgttcaaagcctcttggcccaaacttacccaacccacataaaagagaatatgatattttagtttattagcttccattcacaaatatgaaatatttacatgtgttttggaatgatcatatatgctattctggcattgatgttttttctacacccatggacttctgtcacacaaatataaacattcacattattaatcatgatatccatatatgcttcactagctgtgggatagcatatgcaaattcatgctttggtatataactcctttacaaattattggatggatggttaagcaataaccttatcatctataaggtcgttattatcagagtaaatatgttatattaaatacaattcaggaacagctattataaaaagtgtttagactatggaattaaagcaatataggtttgatgtttccttctttctgggcatttccaaaggtttcattcttatatccatgttgtgtttaatgacttggactagatgttgtgaggtggtttagagaattgggttgatattgtacttttttgctttcatgtgttagatggtttattattaaggttgttaactgcagatgccttattattacttgatgtcaaatttttgtgtacaggcatagtttaaaagaggttttgg

SEQ ID NO: 12891 - DNA, 9353 bp, Vitis vinifera
  Intron number 1 from transcript GSVIVT01005972001 (locus G SVIVG01005972001) derived from phytozome v7.0 (chr-ID chrU n; pos 23042103 to 23051455)
taaacatgtgagcggaccatatcataatacaaaataaacctctttacattttatatttttcttaaatctcgtaaaaaaaaaaaaaaataaaataaaaaaaaatatatatatatatatatataatataaaaattaaaattttatttttggtattattttttatacacaaacaataatttttttttaactaattttatcaagcgtattcacaatacgacgtatccgaaaggggttttttcatcttagcaataattttaaaaaaagtatgagcaataacttttatgttttttttatatttgaatttgatgtcaaataatattttattttgatagagttataatgttttatatgtcaattagtgatgttataaataacgaattttaggtttggagttaggtgttaatattcatgattattgttgacgtaagggtttgagacattgtagatgagttattttgatgcattaactcagttgaaaaaaaaaaaaagtgtttttgtctttttggtttttttgttttattttattttaaccgccacgagcattaatttcttgatcacatgaaaaaataaaaatctaattccaaaagtttggggcaggtacgcacactttctagatttgagcgcgaatgaaggagacggcagagctgaccatgcacttgcgccgacacgtgcccacgatcgttgacgagcgcgtttttacaagtgggccacggacagccaattatattatgacacgtaatataatgctagctattgtattatttcattttggaacaagatgggtaattcataaaatattataattaaaaatgggtattcatctcatgattattaacacattttctaatatttataattttttttatttttggaaattataatgaaatgagtgatgaaagagaatttgaatggtggtttcaacgttttttaagaatttgtttacattctagacaacatgggaagggttgagaaacccaaacatttttatttgatttattatcaaatataatgaaaatgatttaatttttatattaatttttaaaaataaataaaaactaataaattttgaaaaaacccacaaaattttttattaagttcaaaagttttttctcctcatattttcaataatagaaaactatgagttcgaatggtttcatgaaaaacatgcttacaaaattaagaggaatttatatgtgtataacattaggaacattcttcatatctgatgtgggatatcacaaatacccctcatataaatacaacattttcgttgtatctcataggattatgaatcccaacaccgggatcaaagatgggttctgatactatttataacgatttgctcctaattatataaatattattcgctctaaacctcaatgagtcattgcaactttaaaacatgtctacataattaaaatatatagatattattcgctctaaacctcaatgagtcattgcaactttaaaacatatctacataattaaaataaatttatacttatatggtataaagaatgttcccctattcgatgtgggatatcacacaaatattgaaaagatataacttcaaaaaaattattaatgaattatttacttatcgataacatgattcctattttaacttttgcttgattttaaaaagatataagaaacaattcatactaaaaaacaatgatgttgtttctcatgttgcatgtgaaacgaaaaccacacaacatatggaaagccaagataatagcaataaattattttttttataccatatggtaaaaaagggaaaagctttatatgtgatattctaccatctttttaggcagttgaaaggcctagacaagccactaaatcttttagtgttgagagatctcaatcaaaacccatcaaagtggatatagacaaatattttttgaaaaaatatccatttttatgatcatcatttgcttgaactatttacgggaaagttaaatagtcaacttccccaagccctacgaaagggggaaaagaaacttattttatgtgctgaatcatttttgttggtactagaaaaatacatgtcaattagggccatcattttggaaggatgcatgaaggagactatacatgtttgtaacatgggaggtggtgggttgattaaattccccccatgtgatagtcacttgatccttgggtttcacctatacatggatcaaggaagtctcctaacaaatctttctttgaaattcttaatttcgtagaaaacaagtttatattatttattagatggattgattcttaatactacaaagtaatcgagatgttgaagtcgaagaggaagactttgcaattattttgaaaagtaaggagaaagaataagaccctatttaataactgtttttgaaaacagttctgaaaaaatgtttttgtttgggaacctaaaatgtttttaatatttttaaatatgttttaaaaataatttttatatttatgttttatttttaattattccatgtacttgtataattattttctaaaatcactttaagaaaacaagcgaaaacaataaaacaactcaaagatattatttgaaaacaacctgttttctgttcttaaaaatagacaacataaaaaagtttgtggttatcaaacatgttttcttatttttttgttctacataatagaaaattgttcttaaaaacaaatgtcaaacaaactctatgtaatttctaaagccgccgttacataaaataacctttaaacattttaatgatatacattaagacacatagtatgacacttggattgttgaacgtggtctcatatgtaacaaaagtatttaggattattgtggaaaatgactcaaattttaaataaatatatgacacaattaacttgttagagttaatattacaaccatttaattttgtattcagtttatattagatgagagttaaattgggaatcacaaatgaattatcacaacattataaaatggagattacgatatcgttaatataatgactttggatcgaaatatatatataaatgatgaaagaatggttggaattctccgcatgatcaaattttctgtttttttgaaaaatataataccaatgtttcaaatatagatgatacctttttaactaaaaggatactgttgggacgtcatttgttttgagtatatttggctctgtgccagtcaagggcgtcacagagtggcctccccaggattcgaactcgggaccttaaccctggcagttgccctcctggtatcatctgggctactattcgaatcctggggaggccactctgtgacgcccttgactggcacagagccaaatatactcaaaacaaatgacgtcccaacataaacgtcggccttttttgctctggtgccagccgtaccaccgaactgtgccagtcaggggcatcacagtcggaatgggccagcagcgcaaagtcttatggggccatttgtttatttgacccttggggtgacgtccctaggattcgaactcaagaccaagccttaaggtgcttgagtgtgccctcctggtaccatctgggctagtagcccagatggtaccaggagggcaactgccagggttaaggtcccgagttcgaatcctggggaggccactctgtgacgcccttgactggcacagagccaaatatactcaaaacaaatgacgtcccaacagatactaccacgtaaagttcaagaaatcgcaaacttaaacttgtatcaaggtggagttattctatgttcttattgatttataacttcaaaagcttaataattgtttcatcaagatatgattcatttaccattttttataataaaaaactaatccatagtatttaatgatcaattcaagactgacattattaataagcgctctaatattaagtttttaatagtgaaatgaatagtgattttgcacaaaaaatggttgagacagagaaatatattgtgcatttattaatttatttgcttgttgcattaattctaatcatgcctattgcaactactactagggagaaaatgtttttttactcttaatatatatatatatatatatatatatatatatatatatatatatacaaaaaatggttgagatagagaaatatattgtgcatttattaatttacttgcttgttgcattgattctaatcatgcctattgcaactactactagggagaaaatgtttttttaatcttaatatatatatatatatatatatatatatatatatatatatatatatatatgtgtgtgtgtgtgtgtggaaaattatagaaggcaattgtaaacgtatttaataaaaacattatctatcaatatatattttttttgtatttattatttattaaatattatttttttatttgttattatcccttgaaggaaaatgctagctccaccattaatgtttgcatccccctcttatgaaaatccaagacattgctttctaaatgccggcctccttttagcaatttgtaatttcatgtctattttgaatcacatctttgtaaaaattgtgctgtaatcgtatccatgtatgtcttatatttccattcacaatcttgcttgacataaaaaaaaaatacaatacaaaaccaaatggtttttgttgctcatctagagtttgtgggtccaatttcttttaaaatcaaatggcaccatcctagccgtgtaaagagcaaatatggttgatatagacctatcctttggtcatacatcactttagctcacttgatgtttggttctaaaaaatttatgagaggatacaagaaaaaaatacaaagaaaaaattaaatataaaaaaaaatgaaagaaaataaaataaataaatttttagtcaataaataatttttatatattactttaaatttattttatttatttatttattatataaagattaaaaatatataaaattttaattatatttaattttttttaatattttcttatcaatttttttttttagtggctcgtcctaaaaaccaaacagaaccttaataaaatttatatacaatgagtcaaagtcttagaatacatctaagagtaataattttgaatccttttgtcaaactaagtagatcagataaacatccttgtcataagtcataactcagtgtggtagctttctcctaagtcattaatctttgaaaaatatattgagggcattcctattaatgtgacatgagactaaccaattattattattttgctgtaaagaaaaaataactacccatacagctgtggtggacttctagctatattttattgttgcaaaatgtcagggtcatatcttttattgctgacattttcagggttagaatctttccaggctcacaatgttttatttttaatctatatttatataattattttttaaaataatcaaaagcaactcaaaatccgcttcacaatgattttaataaacgtttataacttttttaatttttaaaattttttatcatttaaatattaaaaatattaaaaatattttataaaattactatcgaacatactctaaaattgtcgttataaagtatttttactcaaaacaattttaatgaaagttttttcccaaaaaatatttttaggagaatcacttataaagtatttttttttcaaaaaatattactagtcagtttttaccactataagtgattttttagatttttaaaatatttcctaaattttgccaaatacctaaaacttgtttggtaactgtttttgaaaatagttatgaaaaatagtttttaaaaattattttatggtgttttgtaaaataaaagtctaattggaaacataaaatgtttttaactcattttcaatatttttaaatatattttaaaaataatttttatatctagtttttttttttaattatttcacatatttgtataattattttttaaaacaatgctcaaaaaacaaatgaaaagaatagaaaataactaaagtatgttatttgaaagtatcatgtttttgttcttaataactaaaaataaaaaatagttttttattgttcaacttgttttcttagttttttgttatggagaatagaaaactattctaaaaaatagttatcaaacaaacccctaatgttttttaaaaacatttttcatgttaaaaacccttcctaaaatcattatcaaacaaattttagaaaatattttttaaaaaacgtattattttttatttttcagaataaaaaactattttttattattaaacatgttttctttcttatttttagaaatcaaaaaacaattctaaaataatttaccaaacatgacattaattttcaatatatatatatatatatatagtacacttatagaaaatccatcaccaataaaatgatgtcatatatatatattttttcaagtgtatcaagtcctattatttgtgtgagggtttccctccacgtgtcattttcaaatacaagacctattggaatgtgtgaaacgattaatgatgaaaaatagaaagaaaaaaaaaaagaaaagaaaggagaacacgaagatttaaagtggttcggctaattgcctacgtccacaggaacagagaaagaagattttcactatgttaaaattagggttacactctactccgcttcactccaacattttgcccatttttttccatatgtcttttcgctcaaatatgagctacatactacaacaagaccccttggccaaccaagacaaacacataatctgtctaggaccaccccgtctagacgactggcaccagaagtgagaagtttccttcttccacattgctagacaagctaattggactcctagaatgccagatggaatggacagatcaagttgactggacatttcagacgagcaaatcaatctagtcaaattctcaggatttctaacatacgtggttaaccacgtctaatgtctgagcgtcgacccaaacacctgacgtttaagcggcaaacagggctccatttacactcaaaagtcaataccaattaattgttacgcacaatcccagacattggcagactaaatggatagtcggccgcatgattcaagattttggcacatcaacatatgacaccaatcaaccgcccttatatgatatgatcgctcaatcgccctaagggcattcatcattaccagaaaggctagtgtgcctagtcagcactacagtgactatgtcatcaactctatataaattccttaaaaaacacaaacaaggtacgcacgcacatacactcattctctcatacaaaatagttagagttatccttgtttaacttaaacttctgagagaagtgctcgaaccatctatccggacatccttttgtgtggggaagaagtctatttgactttagtgcagctggacggactcctcaagaagcaaaaataagggaagaagttcgtctgactccaatggaactagacggacctggctccaattgggaatgacacctacaatttgtactctcaaatctacttattggtatatcagaacgctaccttaacattttttaagaccatgtatgaattagttttttttcaaagagaaaaaagtttatttttagttttaataaaaccttataagaacgtttttctaggttatttttagttctaacattaactttatctacaacatcatgaaaaagaaaaaaaaatcttggcttattgtgaaggtagaaaatgacgtaaggatgagagagagcgttgagtaagcatttggttttccatgataattaaattaattcttacctattcctcatatggagtattaaaaaaaaagggtcaaatatccttatcttatcatgacgcacataactaaactacattattggtggcattcatttcaaaacaaattgagtgatgttatagttactaaccaacccattaaaaatgaaaggaaaatgttcggtatcatttcttgaaagttctttcaaaaattcctaccatatcttcatttgaaggatcacatgggttaggctctgtatggttcgagaaaattcgaggaaaaaaaaaaaaagaggaaaaagtaaaagaaaaaaaaataaaaaatagaaaatatatttaaatttaataaattatttttatatacttctttaaatttattttatttattttcctctattatatgaatattaaataatttaaatatatataatttttgataaattttaattatattttattttcttttatatttttcattgtgaaatcaaacataaaaaaataattatctttaatattttttttcccttccttattacttttttgtgaatcatagtcttataaaaaatactaaaaagaaattaaagtataattaaaaaaatagttagaaattaggtgtaattttgatattttttaaagaaaaaattagtaataactatgacatggaatgcaaaaactcttatatatttatcttaatgataactatgtttacttcctcaaatttcaaaattttaacaagtaattttacaaaatataaaataagcttatacttctaatgtaagaattccgactattataagttaagtgtatcaaatatttaatctttatataaaaaagttaaaataaatttaacatattgtataaaaataatttattgccttggagcgtattttttaatttttttttcccgttcttcacatttttcctttcaatttttgtaaaccaaacatggcctatataaccatcacgtttaatcgagaatttctttatttaatttagttccaccctctagttggtttagtgtctaatcaaagattaatggagctaagattacaacttgtgaaggtagtgtgctttaatggaaatttggcatttgaattgataatgtcaatgagcctattgcttgcaagtggcggaaagctccatttgcgatttgatgttggttctgagaatggggtctaaagatgaggcacatcacccccatttggtcaaacaatgtgagtatatttatgatcagcacaattaagtcgacaatataaagatttggtaaaaaaaaaaaaagaaaggcggcccaaatttgtacatcatgctttacacagagtgggcttgtgggcagcgataccattgtaggcccaggactaggtcataacatagcagagttgggccaaaatcattttcttcatgctgcaagttctgatccaacgccaaaagcctaaaagtatatatagattgaggcctgagcccacagtattgagctacgtgggacgagctataatatggcggcccaataagaatccagctactcatatatatatactcgtaaaatgaaaccctaagctctctcaatttttagggtttctttcagagagagggagagggaggagccgccattgtagctcagagtcgcagcc

SEQ ID NO: 12892 - DNA, 1389 bp, Vitis vinifera
  Intron number 3 from transcript GSVIVT01011222001 (locus G SVIVG01011222001) derived from phytozome v7.0 (chr-ID chr1 3; pos 9757463 to 9758851 reverse strand)
aagaaatttgaaaacgaaacaggtgatttccccatatttatgtgagataaatactgaattttggttatggtaggttaatagcagaattgcaagttgttttctttatggacagggtcgagcttcatcattcatcttagattagggctcaggtcctgatatatcaggccaaactggaggctcaggaaaatcaggagtgagttctggatacacatccgccacaaatattcacaaaaaaaaaaaaaaaaaaagcattatcatcgtcatcatcataatcataatattatcatccttggaattctcatgtttgtccatatcattggagatgtaataggaatcatcatctttaatatgagtgctccgtaagttgtatacctcaaatatatgaattcgtagatgcttcctcgtgcagaaacttcaaagtcgaagaatccattgaggccatgttgcacaggtataacaagcgaatacaggtgtggggacgtaaagaacggggagaagaaatacaatgtatgcagggttccgaagttggcattcttttgggattcgtttcaccctacacaagcgggctgggatgccattgtctcagagctaggatcttctatcgtaagcctcttctagattgctcaagacctccaatgtaatgcatatcagtaaagagcatcaatgtattgatgttgataaggttattggcggtagggtaactcctacagtcctactcttgtagtatgatcatcccaaataacttggaacttattctattatcattttgcttttgagacactttagaagctttaaaactcatctatcccaactaaaagtaaaagactttcattaacagcatgcatgtgcggttcatattaatgctttgatgtgccccaaaccaaaaggctttaaacttgttctaattcagtgggtatctggcgtcaaaatcaagaaagaattgaagtggtttaaggttgtgacttgagagggatttggaaaggtgaaagtttaagaggtgaattaagatgacatagatcaactgtaataataaggtagaaggtatgaagaattgctaacagttgttacggaaaactttgactagaacaaaataaactcttccattaccttttgcactaaacaatttacacgctcggactcctttgtccccccacttcctccgttttcctttgtctccgtctacccacttttattttcctttttttattttaaaaataatttcgcagaaaatcatttcctatttctttttaactaatttatttttatttatataaaaagggtcccaccgaacagtttctttcggccgctcactttgtcgtctctctcgtctccgttcaccctagtcgttctttagcatttgtctctattctcctgatatcttgcgcctcc

SEQ ID NO: 12893 - DNA, 10455 bp, Vitis vinifera
  Intron number 11 from transcript GSVIVT01024422001 (locus GSVIVG01024422001) derived from phytozome v7.0 (chr-ID chr 16; pos 2387910 to 2398364)
cagtgttgctacaatcttcttagcataatacacaggtgaatggatctgaaactcctgatactttatccttcttaaatatgccgtggaattaacataatactggtggtatgaaactgctctgtatcattatcttttattgaattatttttagggatgcaacttggacagtttagcccaacccaacccaacctttggatgagtttagacaatcattttgaataatctagctggggcttgggttaagtttttcaacctaaagtcaatttaatttggccttgaaccaaggtttggataacttgagcttaacccaaacccaatttgatatttttataatattcataatttatattatcctatataataatattcattttatttttttaattttagagaaaatgtcaaattttgattgtattttcatcttattataacaatatataaatttgtttttacttttttgttatcatcttaaaatatatatatatattttttttgataagtaaacaagatatgcattagaaaaggctaaacgccacaaagcatacagagagtatacaagacgactacaacctcaaaaagaagaaaaggaccaaaaagaactacctccccttaagtggaagctatccactccaaaaatcctataagggagaaagactcctcacctaaatacactttggcccaattccataagttacagacaaatgaattctttaatttttgaatattcaacgcacccctcctaaaagctaacctattcctctccttccaaaccgtccaaaaaatacacaacggaatggatttccaaatctttttccttttcttccctacaaatgaacccctccaggagattaaagcctcctttacagtttctgggaggacccatttaacatctattaacccaaaaataatatcccatagagctctagtcactatacagtgtaaaagaatatgatttacattctcttcttcacaaccacacaaaaagcaacaatttgggagatgcacctctcttatctggagtctgtccagagtgagcaccttcccccacgtagcctcccaagcaaaaaaacaaactttagttggcaccctatccacccatatgctccttgagggaaacactgtggcattaggcttatccaacagcctgtaagcttccttgaccttgaaaataccatttcttccctgcctccacataactgaatcatcctccaaggaaggcctatgacccctcaaggtatggagcaaatccccaaccatatccagctcctaatcattgaagtccctcacaaaaacaagattccaatctccttggcccgaatcttggtcccacatctcctcaatcgtagcgtccctatgcgcagcgaggacaaaaaggtgattgaagcaatgggacaacggagtgtcagtgcaccaactatctttccaaaatttgattttggaacccttcccaactagaaaagccaaattttcccagcaccattcagcttctttcataatctccttccagacccctactccagccgccccactagccttctttgacctccatccatgatcctcttgcccatatttcgtagtgatcacttgtttccaaaggttatccttttcacaagtccaaatccacttgcccagcaaggctctattcagagtggctattttccttaagcctagccctcccttgtgtttttctgtacagaccacatcccatttaactagatgaactttcccctccaagtttcctcccccccataggaaatctctttgggttttctccactcttctagcaacggacttgggcattcggaaaatagacatttggtatattggcatgctagccaaggtgccttttataagcgtgatcctcccccctttggagatgtactgtcttttccaaagcgcaagtctcctcctgaccctctcttccactccatcccacatagaagtagccctattggggacccctaaggggagtcccaaatagtgagagggcaaggaccccaccctgcaccctagctcagctgccagctcaaggatctcctccacttctccaactggaatgatttcgcttttggctagattaattcgaagacctgaagtcgcttcaaaccaaaagagaatccagcttagatgagaaacttgctctttacttgcctcacagaacatgattgtgtcatcagcaaaaaataggtgggatatattcaaggaagttctactaccaccccgaatggtgcatcctgatagatatcccccctccatcgctctcctgatgaggacgtccagaacttccattcccataacaaagaggttaggggatagaggatccccttgacgaagccctctagtgctagggaaaaacccagctgacactccattaacaagaattgagaatttagcagaagacacgcagctccacatccatcccacccactttgtcccaaagcccattttttgaaggaccttcattaaaaaattctaattgatgctatcataagctttttctatatccaatttgcaaataagacccttttcttttctcttctgccacgaatctatcacctcattagcaattaaggacgcattcagaatttgtcttcccattacaaaggcattctgagcaatagagaccaccttaccaatcacttttttgagcctattagctaagactttagccaaaagtttatagagcccccccaacaggctgataggtctaaagtctccaaggtcctcagccccgcttttcttaggtatcaacaccagaaaagtattattgaagctcctaacaaaggaattatgctcatgaaattctttaaacatctccatgatctcctctttggtaaaatcccatgcgttttgccagaaggctacagtaaaaccatccggaccaggggctttatccccactcatctccatcaacgccgaataaatctcaatctctgcaaatgggatttccagactctctgcttcttgccggctgatgcaacccatctaaattctaccaatatccgctttccaatccatatcttcagaaagcatttgctgaaacgaattcacaacttcttccctcacctcctgctcctctactatccactccccattaaccttaattctgtccaaagcgttgtttcttttatgagcacttgccattctatgaaagaaccctgtgtttctatccccctcccttaaccaaatctcccttgagtgctgtctccaatgggcttcctccaacaggacccattttttaaaggaaacttttgcatctttttttaattcagcttcctccacagtcaagtttctctcactttccacccgatcccaaaagtctacttgttgtaaggctgaagctttattaatttctagcctcccaaaaacctctttgttccaaactttcagtttttttttaatttccttcattttaacagccaatctatagctggcgctgcccctgacttcaattccctgccaccaggttctaacaatgtctttaaacccctcaaccttaagccacatgttttcgaatctaaacggagttgggcctcttcttattccacccccctctaacacgattgggaaatgatcagaaattggccgagacaaccgactctgagagactccactaaactgatctaaccagctaggggaaactaaaaatctgtctagtctcgcccacacctgattattaaggcccccattccaggtgaactctcccccttgaaaaggcaggtccaccagctctaggtcatccacagtctctgcaaatctcctcatggctgagctgattcttctctggctgctcctttctggttgaaacagagtgatattgaaatccccaccaagacaccaggggtcatcccaaaggcctcttatcgccccaaattcttcccacataccctccctttccactttggtaaatggaccatacactcctgtaaacacccaaataaccccattttctatagtcttgaatctacaagacaatgtgaaatgaccctcctcccagtccaaaatatccaagaccctcttgtcccagcagatcaaaataccactcgcagccccctccgcatttaaggctctccaatctataaatctccccgtgcctaggcttttcacaataccctccgacatctcctgaatcttggtttcctgaatacacattaggtccaccctctgattccttatatagttcttaataattttcctcttagagctgtcatttgctcccctcacattccaacttataatcttcagcttcattgggcaactatcaactgattccctttgccctgtgaaggacctttctgcttgttccccccctcataattgacagaacattccagcctctttaattccctttcaaacttggacttctccaagagttctttgttgtgaatcttttcccgcctctttctgattttaatcagaaaattcaatctctccttttccagcccctccgtggaaaatcccagaaattggctaaattttgctaaactacaatcctcccatagttcctctttctcattttcggtatcttgagatctagaggcaccagtattcccctccttgcccctaaccttgtctctgtttttgttggcctctcccaacttccaggatccattctcattctcaacattcccctcataaaatgttaaccatgttgacttgtccccccataattcctcctctatttcccctggacgatcgaaagactccccctccggagcccgatcagaattagaagatagaagaagaggtatccccataaccctttttcctttaggatgggaaatcaaatcatacctctgagcttcctcttcaagcgctcggtccgtcattgagaagccagcatccctctgttcccttctaagctcctttggtacccagctcatcaaaggatcctctgaactggatccttttctggagatgaaacggcccaaaaatccagccttctcttggggagcagttgggccagccctttccaagccttccacctcaactgaaggctggcagcccagttcagcagcccaacttctagacgatgggcttgcctctgaatcaccggccacctttgccttgtcttttaaatttcggcccaaaggcccattgatcttagccagtccaacatccttctccaactctttaggacccatgtttgggccaagtgaggacgacccagccactcttccatctgagtaaacccaatcccggggcaccgggccatggatctggttcctgggctctagacccggcccattctcctgcagaaacctctcatcgtttggcaggtgcagttcctcggttcccgcgcctaccagttccttcccaacgcgcttctccgcacgtgaatacatgtcacccctaacctcgtttctccttctgttttccacctcagagaaaatccgtctcaccaccggcctaatctcccactacagcgccagagtgtatacctcctcctctacctcaatttctaacacactcggtctaaaatcacctcttattttgaccagtatcctagcccattgaatctcccccatcgaccttgtccgctcgtcaatttcaacaaaacccccgcattcctcccctattttcttcagaatcatcgggctccatagcgaaattggaaggcctaaaattttaacccaaacttccttttctatctcctcctctacccaacaacccgtcttaggattctagacttccagccctaagtggactcctcccatcactctgctccccgaggaaaccacatgatgtgcctctcttagatcttcaaactccaacaataccctacctctctccaatttggccagccctaacttgccttttaggccccaagaattcgcccaaagacttcccagcctctccaagtcttcttcttcctttgtgttgggcttccagctcgcgacgaggtagtgctccagcttctgtaaatttccaacagtctcctcccttgtgaccttcatcttgattgcatttgaacctttctgacttgttctcatgactgcttctgcatatgatttcgctggtgtagctttttcggcggcccttacttcctgcaaatctgttcttctaccaaccaactcttccatttgatgtatcatctccgccatagccgtccatccacttttgtcccttctacctctcggtaagaaaatacagaaccgttttcgttccagatccataacccccagccttaaaaaacctcccgctctgttgaaaccccgagccaatgaatacaacttgcctctgtctttccactccttttcccatttcccttctttttcgtctcgtatacaatggattagcccctccttgaaaagccctaagctttccagccctaattgaacccatgtcgagaccccacgcttcttctccacaatgagaaactgacgtttccctttcctttcatctagggcaagctcgaaagtcttggattccaccgtgaagcttcgctttcgactcgcctcgccggtctcgtcgtcgtcgccgtcgcacgcgctctcactctccctcacgccctctctctctctctcgccctctctctcactctctcccattttttgtttttaatgcatagactttattttcatcttaaaatattatcccatttactatttagattttgatataaatatacagaaaatttttttaaaagaatattgtgggtgagttcaacctaacctaacctaaccttacccaacccaattctaaaccatacaacttgagttctacctgagcttggaaaaataaggttgggttggttttaggttgaatacttttggttagaggtcaggataggttaggttgggcttgggttggatggtcaagttgcaaccctaattatgtcaccataagttaatatgaagagtgaaaatagagaggctattgttgttgtggatagggaaaaggccattgggtccaggtggacgataagttagtatgaagagtgaaaaaaagagaggctattgttgttgtggatagagaaaaggccgatgggtctgagtgcttttgccacggtttttgactagaactatgaagagataccttggggtgactatcaatcttgaagtattgcaggccagttgggtgacttattgaggcacttgttttacttctattgaccagatcccaaagaaagagggaatccctaaaataatgttagaaagattagattggtgactagcttatgtaagatcctcactaaggtttacttgaggcacaaaggttcttcaagatgcccttttcccctcttgtagagctattgttaatcctatatacagttttgtttaccaaattaatatttctagagaggattaaagcagggaaaaatctatagtgcatgagtggattttaagaaagcttgttacatgagtttagaatttcttgatcatacagtggatcgagaagctctcatgggtagatggcttgggtggatgaaggcttgtcactgttccattagctatgtgacttttatcaataaggaggctagaggttggattttagcatactggagacttaggtaagggaacactctttcttttctcctatgttctgggctggatgattaataaggctgaagatcttggccttgtggaagaattataagtttgaaaaagcagatttctgttttccacctttaattcacggatgacattgtttccttcttctttccctccattgcagaaacaaaaaatttgggatgatgttttgcctgaaaagtgatttttgtaaattcttatttttattttttttaaaaaacaacaacaattgttgctagtgtgttttgattagggttagtgtccataaagattagttcactagattagcatttacaaaggatgtgagattgtgagtggcctttgaaataccatagcctcctggtttgaggcaattttaggaccctatgattttgggacctattgaataaaaattctccaaatgctttgatgagctcaaaaaagaaaaaacacccacaggtagttgttaagggcggattcatcttggcttcgatcacatcctacatgtagacaaagctttagccattttcaaaatattagctacttctacatccgtaattttgaagtacttgcataattattgtttttttcccctcatctgaccatgaggaggttggcagggaacactttgttaggtgtgttttccttgaatgtacgtgtgttttgggtggggggttgggtttggttttgttgtaaagttggttattggtaaatggctgtggagatttcttaaggtacgacaaaactaaaccctctatcctaggaaaagaaagggattcatcgttggcagtgttatcaaaggcgatcgcttgggttgcctaggccatcaagctaggtgaggcagataaaagtcgcctcttgaagacctagtcaaggtggcttcaaagaggcaacacctaggcaattgccttgggataaggcacaaggcatagaggcgatcattgcctttgaccatgaattaagattaaacatacttacattataatttcattcaatttaacattggattaaacaaagtataagatggaatattatattattaatcacagagataatgagatggagggctatcaatatagtcttaatggaagtgatgacaattttaatttcaatgatgactatgatgatgatgcccaaagcttctttaggatgttcattatcttattttgtcttttattatgatttttaaatgtatgaaaaattagaatatgcatttacataggacaaatatctttaaacaatatggtgtttcttatggtgtggggtataatatttaacactttgaatagttattactattttgtcaattttgtaagacatcatgagggatgaaaaattaatagcattgaagtatcgaataggtaaatatatgtatattttttatcaccttactatagtcatgctatcaccttgtttttcgcctttcgccttaggctaaaaggagtcttattgccttaacattgccttttgtgtttgacaacactgattgttggagatggatacagcgaactattctaggaaaatgtttagtggagactgactcccttgcttatcctttgctcacctctacagatttttcaggtcttgaagacttccctttactgccactttgttcaagttattgactacccatattggatctttgatcttttcagaagcctttttgattgagaaatctatgatttttcttcttttgttgtggcctcattaaacactaatttattggatctgatcctaaaaattatgttgcccctctgatacaagtggacttttcacacctaaatcattattttttttttctttcactcccacgtgtctgttctagttccctctggccaaattactttggaattaaaaaaatccccccatagttaacacttttgacttttatttgcccaaaagatggtcaattctgagcagttgtttctaaataggaggccttctgaagtatcaacctagatagatgaggcatgtggcatgactagttgaaaatttatcgatcacttatccctccatggtccgttttaaactagctttgttttgtagctggtattcctctggtagtgcctgtaggtcttgaggacaggatatgattgtggtatcgaggacagggtgattgtggtgttgaggacatgtctttcaaggataaacaaacaaggtagaacaaaaatgtgataggtgcagaaactcaatggaagctgttccaacaaattgagttgactacatgcaattttcgaggaattcttcctctgaaactctagaaaaggtgaaggccaacctatatacatatgcatcaaaatatgaatgcaaacatgaggtctaatctcatctgaagagggatggtctaaggatgactttactttgataggagggagaaaaattggttctgcagtgttctttgcctccataagcctgcattagttggagattttggagagaaaaatttgaggacctttggaggaaaggaaagaaaattgaattctatggaggattgcagttcttgatgttcctgtgagtgtcagtcttcgaaggagtttttctacatcttctctcttatagcttttatttgtggagctgtttgttttgagaatcagaggagtaatgttgtagatatctgcttatcaaaaggtatggtttgatgttgcttggtgtggttttgtttgttgcttttccatttgagaaggaattctcccccttccttgtccacctggtctttgtcattaaaaaatttgtttcttataaaaggcaacatgacagtttattccaatttcagctctgtggatattgcattgttcataggctcattaggtctgagattagtttgaaatggcatgatatgattactataatcagtccaaatgcattgcatccgtacctgctgcacttctgtgaaaataatggctcatgtctcctttctcttgatgcaggctttggacccccattg

SEQ ID NO: 12894 - DNA, 3019 bp, Vitis vinifera
  Intron number 7 from transcript GSVIVT01032828001 (locus G SVIVG01032828001) derived from phytozome v7.0 (chr-ID chr1 3; pos 423314 to 426332 reverse strand)
ggagaggtacttttcaacacatccaaaagcattttctattactttcctttcccattagatttcatagctacaacacaagactgtcacgaaaagaagtaaatgttaggtttatgctaaaccaacctcactcaagaggaagatgaattgggtattagtatctttttccggtttttacaaatacaattttaaatgaatgcaaatggctattcaagcaagacatagaaaacattataaatgaataattgcatataaaaataaaaagataactagtcgagaaattttaaactagattttataatggttcaacataaccctccttacatccattttcatcaacctccaaatgaaacaaacgatccattattcttaagcttttcaagccaaagccttctaatgcttgcaattaaattacaattccaatgaatcttttcaagagatgtttaacactgaactccacaaatattatccatacttggcaaatcccctcatgtaatccctacacttgagcaaccttataaggttacaatttgaataaacttgctagtacaagtttaaaatcaaattgatacaagataaaacatgaattggaaaaacataaaggaaatgagaaaattggcaacatatgcaatttcgttcaaaaaaataaaatgcagcacataagcatgcataagatagattattgaaacatgcaagtacatgagcattttgtatttcctaaggtttcattaattatatcttttttttatcccaaccttatgcaagattataagtcattttatgaaattattaaacatttttatatatatgcaagatcataattcaaaacattatctattttgcctcatgaaaatttcaaatcaataggatggaatagcaaaaataaataaaaaaatcaagtatttctaagataagaacaaaaatttttacccctcttgtattaatttcgtcctttgataataagtgttgttatcttcaatcctttaaaaattctttatttgctttatctctttaatgtgaagttgtttttatttttcatttgactttgcatcctcctctacactaccttgttgagaagctaagcttcatgaatattcttcttcattccctaactcatcatcatttttacaatctctcggcaaaaagggtggtttgatgcatcaaaaacaaagaattgctacatcatcaaagtaaatcaagtttctccaagaacttttcttttgatttgaaaaatgttaggcacttgcattcaaatgaaaaagtaagagatgatttaaaaaaaaaaaattttaaagatgatttatgctttgcaaaatgatatttcaaattaaaggattttaaatttaagaaagataccattaccaacaaattatcaatgtcaatgatccctctttttacattgttttcaaggtaaacatatcttcctttcttcttgattggatccctacaaatcaaattcaagtaacctttaatactcattttctttgttatggttcctaaacggttatcatttttctcccttggaattcaacatgatttaaaactagatatgacattaaaggacaattatcactaatataactacctctcccataaaaactacaaatggtacttagattatatcttgaagcctttttcacaaaataatttttataatacttttcatttttatgaggttgtaaccttatcccttctcatccaaaatacatcttcagtttactaaatcaagatgaaaatctcttattcattggaaaaaattttcaagaaaatatatgagtcataatttttttttttttcaaaacttcattttcttttgaaacaatcattttgtccttctttcgataaaatcttcctcctttgatcttctccaatttgatatatttcataaacttctttgaaataatatcaaagttttcatcttcattttcctcctctttatcatcaatttttaaagctttaaatgcaatatcatatttcttcttttcttcaactctttaatacttattcatgggtatctcatgagtcataagtaacccaataagttcttcaaataggtagtgtggtgagatcttttaacttcttagtcgaccgtcatcttattttcgcaaagaaggtgagatatttaacttcttggatcacgttcatcttattttcacacttctttggtaaggatctcaaaatctttgactttctccactttagtgtaggtcttctcaaaaacatgaagtttatttataatctccaaaactttgtaaacatctcaccaatgaattcaaaatttttaattgaaaacaaatcataattattcacaaacatgcttattttaaataattttacttggttggtgtcttcataggtaatttccaggagtagtaatatatctttagccaattcacattgggagatgctattgtatttctaggacattataaagagttccttataatcatcatgtcaaagatatatggagcaaaagagaatataaagaaagtttatcttcgacgtgatgattctaaggaaatcttcttgtgtaattcactaaattaattagaaaatattaaaacaaattcttattttattatcattaaaacatgagtttaactaaaccttgatctaataataaattaaaactagggttataaattgaaactatggttgcaaattaaaatatgggaccaatttgagctcataggttttgttgcccatgtccatggtaggactttgaatttttttcagctttttgtgagatatggatgagcgattttataatttatctattaaaacagtgcaatttttttataaaaaaaaaaaaactatttagaagattgttgaactagtaaattttgtataagaaagaacaacataaacaaagtctcgtagattggttactttttatgctacatgggatttttatgctaaattacgttaccctcattagaattaatgcttgtcataatattcttaatcaatttcttatgattttctagatcctaccactattaacaactgggagttattggga

SEQ ID NO: 12895 - DNA, 2350 bp, Vitis vinifera
  Intron number 2 from transcript GSVIVT01037858001 (locus G SVIVG01037858001) derived from phytozome v7.0 (chr-ID chr3 ; pos 7056366 to 7058715 reverse strand)
gtacacattcccactcctgaaactccctgcaacaggtctgatcctgtgtctttgaaaccctaattgcttacccaggaaaaccctatcatcaatctccaaaactggaacaaccctatcatcaaactgttttatctacgctgcatttattttgtagtccaaagatagttgcaattggttcaagttttaggcagaatgctagtttgattttaagatctgtttggctgcctagaaaaagagggaaaagaaaagacaagaaaaactgaaaccatatctttcccaaaatttaattctcccagcctaattatattttctgaattgtattttgcttgctacttcttcgggagatcaatttgcatgaattccaactgtaaaatgctactcttatgtgttctggagggtgctttaatattttgttggatcattggggtttagattcaaggttgtttcaaacaaggattgaaatatcggtttttacagatatatcggtacttcaattttacggatatatcggaaatatcggtgaaatatcggtggatattttttcataaatatcggtggagtgaaaattatttaaaattaataggaatgcttgaaaaaacttcaaaaaatgataacataagtaagaatacacattttaaagttatcttgtaagtgtaattgatatatatataattaagaagaaaaatatcgtaaatagagatatattggtagattcgatatttgaattttaaaaataatatatatgaattttgaaagtgtataaaattaaaattgagttaagaaatatgagattgcaatagtccttatactaagaaagatatcgatgtagtttcaatatattattagatgaagggagttcatcttgttgaagacagtatttattttaaaaattttaaaatatttttattaaaacatattttattatattttaaatgaaaaattaaattaatttatataaaatatcttatttgagatttaatttttaaaattttattaaaaatatgtgataataactttttctattaatattaatttatttaataataaaaataaaggttgataattaataattatttatatagagagtggaaaattgttctcatgattttttttatatattttattatattttaaatgataaattaaattaatttatataaaatatcttatttgagatttaatttttaaaatttattaaaaaatgtgataacaacttttttttattaatataaatttatttaataatccaaataaaagttgaaaattaataattatttatagaaaattgttctcatgttttttttattttttattttttatttttttatctcccctaaatctaaaaataaaaaaaaataaaaaaggcacccacttctctctcgggcatcaagaacccttttctgaaggtgtcttccagcgagagaatccctaaaaagccctattttcctctgctactctcaaatctcaatcctcgcaggtactaatctaatcatgttattattattattttttttgcaacccccgtttgattcccaagaaaatccatccccattcgatttccgggaaaattcatcctcgtttgatttccgagaaaatccattcaaaactcccaaagaaaaccaaaaaaattgcttttcttttgctccctgtgttttctggatctgttttaggggtctctttgctgttgtgccattggatttaaatttcacgaaccctaaatccacgatttttgagccaggctgaaaaacacaactgcgcgggctggactggtaggaaatatcgcgatttttctccgatttttcagtgcttcaccgatatttcgccgatatatcggagattttgtcgatttttgaccgatttttccgtcgatcgataatcggtgccgtttatcgtttccatgccgcccgataaccgatatttcgacgaaatatcggcgacattttccgatttttcaatccatggtttcaaacgaccttggtatacgaatcgtcttctagaatttagaggcatagagctagatattcccccatttgcaaggatgacttatacagatgtccgtcttacacccaagttttggttttcatgtggttggaagttgataacatgctacaaaaattgaatttgctactagaattcacataatgctataaaccttaaccgatatataattctgcattctcgattcctgaactgtatcttatagagtagtctccaaaaggcagccgttagtgaccaaaaatttcttagaatcaaagcctttctgtgaataagaaaatgaagaaattgcatttgctaatggaatccacggctttacattgtgaaggtgccataacccatccgaaaattggtt

SEQ ID NO: 12896 - DNA, 20765 bp, Vitis vinifera
  Intron number 6 from transcript GSVIVT01033151001 (locus G SVIVG01033151001) derived from phytozome v7.0 (chr-ID chr4 ; pos 8488210 to 8508974)
gtagatagaagtggcatcaatggtatggatgcagttacagcctcgccagctaccaactgccccccaagtccatcaagcctttccatccaaacagagagtaattttgctttcttcagagaccaagaaacgccttcttctgaatatggcgatccattcagtccaaataggcagacatctccacagtagtatttgatattaattaatcttactaatacaaatcaagtgcaaatgattccgcctcaagtagcagctgcgaatgactgattcattttccttttgtaatttaagccagtggaaccattatccacaaatgtggaatatttcatgaaaaagtagcactgtagctatagcaaatttggttaaaatatttgaggatatatctcaatgatgaactacaccgagaggaggagaggggctgaataggtgtttttaaataaattcgaaaagttctcccaacatatatatattgctttcttccaacgtctattcaacaaagaataaaatacgcaagcaaacaacctcctataaggccactaaacaaatttactgacttcatagtggatagagcaatgcaggattacttcttagtccaccaagtaatagtgacaccattgagtaaaaaacatatctcatagtggatttgcactcatctcaatcactaacccaatctgtattataatatcctcttaatctcaagtctccacctcgatagcaaaggacaaaatctctacatccttggaggtggcgaaaaatcctcttaattgctcgccaatgaatggggtatgggttactttggtaacgattgaccaattgaactacgaagcatatgtagggtcaagtacacaacataacatatatcatacttccaattgcactcacataaggaactcttaccatatgtttcctttcttcatcattcttagggcattgatcaaggcttaggctgtaacccttctcaataggggtgttaataggtttgcaattttgcattcaaaactactctagaatattcttaatataagtctctcttgagacaaaccaagaagtcttcttgagtgatcccttaggatcttaactccgagcaaaaaatttgcttccccatgtccttcatatcaaacgtggaggacaaccatcctttggtagcaacaattatgtccatgtcacttctagttaatagaatgttattgacatacaaagataaaatgaggaagtctttccctaatcatttgacatatacacaatggttctctaaataatatttcaaaaccattagacataattgtctcatgaaatctaaagtactactatctaaatgactattttaggccataaatggaatgcttgagatgacatactttgcactcttgtccctcaacctcaaaatgaataagttgatccatatagatctcctcatttagttttccattgagaaatatagtcttcacatctatttggaagatctctaagttcaaatgttcaactatagctggaataaggcaaatagatgcaaatctcaccactaaggagaatgtctcttcataatatatatcctttctttgggtatatcctttcaccattaaatgagccttagatttgttgattgaaccatttgtcttgtgtttaatttcaaacccatttatttccaatgctcttatgctcgggtgtaagatcaactaactcccaaagataattcattgccatggaattcatttctttcctcatagtagccatccattatactgatttagataaagtcaaagcttcttcccaagaagcagatttatcaagatctaactatgtacacatgtaggtttcccttttaacctcaaaatgatgttggggaatttgaccacgtttgcttctttgtaactcaagaccttgtgaagatcgtctagtgacacattcccaccaggagataagcactcccactatctttggtgatttcaagatgggcttgtaattccctagcctcactcaaatattatgttgcttcctcttgcaactcatagagttcaagactcttctttacttcaccaacagtaggaaaatcattttctataaaatcaacattgtgtgactttgtttcagtcaacattgtgtgactctatttcagtcaatcctctaaccctttaagtagtcaaagtatcttataaagacatttttatttgctctagggtctaacttcttacatctatgagaagtgttatgaacataacctatacaaccccaaggtcataaattctccaaatttggttttgcatcatcccatagcacatatggagttggagggactgatttagaagacactcggttaaggattaaggtagtaatcaaaagagcatccccctaaaaagatattgggaggttagcttgcaccaactgtggacccacatttctcatgtgcgcctccactcaatcggcgagacttacttttatttggtgaaaagttagttttaaaaaagttgaagttgtgacttattttatttttattttaaagggaaaataaaacaagaaagaaaaccctaaaaagtgactccacaatttttgaaaaacccgaatctaggtctggggatcaggttacttattggaaaggtagctctaggaggtagcacccctctaagccctataaaggtctctactgactaagttgagggaattgaggcaattaattggttaattatagatacctaagtaggttaggtgatttaaaaaataagcatgtctaacaagaaggtttgatcataagagagagtcatagtgcgtacctaaacgacttcttaagcgctatcatgaaacataaaagttagtatagaaatatatcacacaacatgtgttttatccacgcaaatcaagtatacacctaagcacacaagaatcacatcaagtatggatatagttatcagtagcatatgtgtccatagaattctcaagggtaggtgtggaggagcgtacctggatagcaagctagtactcctctatgggaaacagagttagtccaataacaaattcaaagtagtctcaaaaccaattctcaaacctgatccatgtattagtggatactcatccgtaaaactgactgcataactaaaaccgacaaacctctatcaaacaattgggaacaaattggggaccttcatcatatataaaactccaaatgcttcctcaaaattggtaatggagaaatatgggcagaatcaggtggagaatcggagggattacatctcaaagtattcacacaactttaatttccagtcttcagggacttacaagagatagtatactaaataaccagaaaatggcataaaaaatttggatagttagatatgggaattccatccaaactcatcgttcgaatgtaagcaattctgctgggatcatccctagcaaaaccatgtcacaaggaattgtctcatttgcacagatcttcaccacttcgccaacttgtatcttttttcattttttttttctgaaagtgaccagcataaagcactatagcctcatgacaacccgactcttggtagcttggcatgtaagggtatcaacaaaatttatacctaacgtccttacactaaagtagcaaagctactatagcatagtggctctaggatcgaacactgggaagggtttttactttaactgatgaagttcggaggatggagtgaacttttcttaataaagattaggttaagatgaaaacataaaaagatgaaggtgttgtaaactaaactaacatgaaaataggttaaaagatggaaaaagaagtttctcaaagctttggatagccatgcttaactcactgtgtaaaaatggagattttggaacttttcacctcgagttggggaagcaactaaggtgatgcttacttcccgaaccggtatgagtttaacaactgagttttagtccttgaaaacttacaaaagggtagctgaacctcataaatgcccttttaatgatataggtcatctcctcgacttgcaatacaatggctcgtaggagataactaatgaacgtcagtggatctaacaataagaatccactgagaccaaaagattatcaagtattggccattcaaagcaagtcagagggattaaaagctttactttgaatgaaaacatttatgacgctcagctacttacattcatggcttggaaatctccatcttgacacgggagcttcacatggcatccattacttcaagaaactaaaaggttttagcctctcatccttggggatttcatcctccaaggatgtttggctactaagaaaatagaaaatagaagagagaaaaagaaagcaaaagatactctgtatttagctaagtgtaaaatttacataagttcgtctcctggggaaagttccccgacgtcataaaatgaaaattacaaaacaatatataacaggttgtttacccctgtattcttgcttaacaactaaggaatcatctaattggtggattacaaggagagaattgggatttagacaacaaatatctgaagaaaaatatcaaaaaacgttggtcgcaaatatctggaagcactcaggagaatttcgcaggcgcacaaaatggctgcgaaatttcgcagccaaaggctgatttcgcagccctgcgaaattggccttcagcttggagtgatctgcttccattggctctaacttcttcatttcaactctgatttgcgaaccgtttgaagcattggattgttgacttcccgatcttcgaaacgacataaagcatgcataaattggactttaggaagtactccaaaagtggctgaaattactgtcatcaaggatgcttcaaggtagattctctctttacttctcctccttgcattccggattggttatggcaaaggactttaaggcttcaaagctctgattcttcatgtttctgagctttccattgctttgccatggattccaaataactctcctccatcttggattgccttggtgatcaaattactaacaaaaacaccaaaacttacacaaagtgattagaagtgattgcaaaggtccttaatatgttaattgggttaaaaggcaataattactactcaaaagtgtttaaaagagttaattacaagctatcaaatagccctttttgagtagtaatcactccccccaaccgacatattgctagtcccttagcaatgaaggagagaaaaataaaaataaacattactataatttacaacatcatgctgatcaaaaaacaattctcaagtggcatgatgatctaactctcacatggaacattaaagaaataaaactcaaacttcaacaagagttatcaaataacttgtctaatcacaattcataaagagaaggcattatgcaaatttaagcttttgaaagagtttccactcccaaagggtcaaaccttactcttccacaaaaatctaagtgttacttattagtttccgaatatagtatgttgaactaatctctccccccaacctagttatttttcaaagcttagcaaactgatcaacctccaataggttaagaacgcacctcttttttcacaattttttcattgtaggagtacaaggcttaaaggtattattttttaaattgtccatgtaacgggggtccatcgatgactcccaaccaattaaggtttagggcatcaagctttaaggatctttcaaccactaactcctcggattttaccccggacttttgagaatatatttttaatacccaagcacctacagtatgttaaactccacctattcacccttgtaacgagcattgaggtcggtgactcccaaccaattaaggcttagggcaccaggttttaaagatttgcaccatataccccttagaccttgctcgggtttcaaggcaagcaaacatttttttttttttttttttttttttttttcttttttccaaagactcattagccttttacaaggtgtctcaacactattaaataaggtcaaaggtaccaagtctaaaattttcctaagtcaagagggaaatagtttttcatcttataatcggaacctattgtgcacagtgtgtgaatagcttaaagtggaagacataagcttgaattcaatagaaacttcaacaattcatcaactttaataaacataatacaaactctaagtcaagtaaaaagacaaaaattcaatttctcccttttcatttattgagaatttttccttaataaccatggagagtagagaaaaaaaaactaaaaaaatttaaaaattaagcgaaaagcaactaaattaccaaaataacttatcattattaacaatacttacttcctcaactctccccccaaccaagctgaacattgtcctcaatgtgacaaaagcgattgaaaaataggggggaagtgatacctcctgagtgacatggagtttgagtcgtataggagaaaccacatgtttcaaagaaaacataagagttagtgagtagaggaaatagaaaaatgctaagtttaaacaaaaatgatgtctatatatgatgtatcatcagtaatacatccaatcccagaatataagacatcaaaatatgaaattatttacactaatataatatgtaaatacaaaaaataaaaagatgatcaagtagtggtagggtcatgtggagctgatgcgtcagtggtggcctcttgaatgggttggatcaggactttggcctctattctggtagtctccttgggtagcatagtctcctcagctgaagctatgggctctgatggtttaaggaggtcagaaatagagtgagaggctttgtgtgtgatctcagtgaaagggctctcctctttagatgcatggttgcggggctctctttgcattttcacaacttcccttggctttgcaaagtgttttcgcaaacctctcttcattttgcaagtcatttttatagcctggaggtcattttgtatcttggagatcatcttgcagccaaagggaaaaaaagaaaaacattttcgcagcccatggaaaaaatagaaacattttcgcagcccattttgaagcttgaaaatcatttcatagccatttggaagcttggagattatttcatagccatttggaagtttgaaaatcatttggtagcaaaaggccattttcgcagcacatggaggatttggcagggggtagctatggggctgcgaaaacatttcgcagccaaatgggattttcgcagccgggtgccattttcgcagcccatttcgcagctgcgaaatggggttgggcggctgcgaaatggcactcgtgtgccaaaggggtgtttcgcagctgcgaaacaccctgcgaaatgaggctatggctgcgaaatttccgttggtgctttgcgcgttcgtcttcaaacggccataacttcttcgtttcaaatccaaatcgcataccgtttgaagcactggactcctgacttcctaagctttaaaacaagatatagtatgaaaaatttgagctccaggaagtgcttcaaaaatgtgtccaatggggtgcggatgcgacatttcagctcattgtttgcacagtcttcaaacgaccataacttctttgtttcaactccaaattgagcaccgtttgaagttatggaatcctgacttcccaagctttgaaacgagatatggtatgaatgaaatggacttcaggaagtacttcgaaatgtgtccaacaggggtgcggcttcagggtgtgtgcgctgaaggaatagggtatcaacaaaatttatacctaacgtccttacactaaagtagcaaagctactatagcatagtggctctaggatcgaacactgggaagggtttttactttaactgatgaagttcggaggatggagtgaacttttcttaataaagattaggttaagatgaaaacataaaaagatgaaggtgttgtaaactaaactaacatgaaaataggttaaaagatggaaaaagaagtttctcaaagctttggatagccatgcttaactcactgtgtaaaaatggagattttggaacttttcacctcgagttggggaagcaactaaggtgatgcttacttcccgaaccggtatgagtttaacaactgagttttagtccttgaaaacttacaaaagggtagctgaacctcataaatgcccttttaatgatataggtcatctcctcgacttgcaatacaatggctcgtaggagataactaatgaacgtcagtggatctaacaataagaatccactgagaccaaaagattatcaagtattggccattcaaagcaagtcagagggattaaaagctttactttgaatgaaaacatttatgacgctcagctacttacattcatggcttggaaatctccatcttgacacgggagcttcacatggcatccattacttcaagaaactaaaaggttttagcctctcatccttggggatttcatcctccaaggatgtttggctactaagaaaatagaaaatagaagagagaaaaagaaagcaaaagatactctgtatttagctaagtgtaaaatttacataagttcgtctcctggggaaagttccccgacgtcataaaatgaaaattacaaaacaatatataacaggttgtttacccctgtattcttgcttaacaactaaggaatcatctaattggtggattacaaggagagaattgggatttagacaacaaatatctgaagaaaaatatcaaaaaacgttggtcgcaaatatctggaagcactcaggagaatttcgcaggcgcacaaaatggctgcgaaatttcgcagccaaaggctgatttcgcagccctgcgaaattggccttcagcttggagtgatctgcttccattggctctaacttcttcatttcaactctgatttgcgaaccgtttgaagcattggattgttgacttcccgatcttcgaaacgacataaagcatgcataaattggactttaggaagtactccaaaagtggctgaaattactgtcatcaaggatgcttcaaggtagattctctctttacttctcctccttgcattccggattggttatggcaaaggactttaaggcttcaaagctctgattcttcatgtttctgagctttccattgctttgccatggattccaaataactctcctccatcttggattgccttggtgatcaaattactaacaaaaacaccaaaacttacacaaagtgattagaagtgattgcaaaggtccttaatatgttaattgggttaaaaggcaataattactactcaaaagtgtttaaaagagttaattacaagctatcaaatagccctttttgagtagtaatcacctcacgattgttctccacttcattattctaaattagtctaagatgcctcccaatctacagaaaatcacgatggtattcaacttcccattccttctctcagcgatctcaatttccttcgaagtctggtatgtgcctttcagctattacatgaacaccatttaaataattcaacgaccaaaaagctcaataatccaagaggattacatcagcaacatcacccttacatgaaacccagatcacacagcggagcacactgacttaggagaatacccagtagatatgcaaattgtcgtgtagtaaggaaggggtgccagagaaataggaaaatatgcaaatagaaagaaagaaacgaaaaaacagagaaaagataggcatagtgtaaatcatcaaacaaagccacattccataacttcgtcaatgggcttaaaaataggcttcaatagctgagagcaatggcttgattttaaaatcatccaattcaagaacgagccactcatcaattgaagggagtagtcataaaatcaaaacaaaatatgcaaagaaaaagaactctgattcatcataacaaccaagtgaccacaagcgtccacatcaagtaacaaaaataaatctttagagacagccaaggaatgaggtgaaatcgaaattaaatgacaatatagtaaatatttggaagcatacctgcacgatctcccctccaattgcttggctttgggctactgcccctttcttagactaggaaatcttctctaagactggaatctgcccacctatctcctgttcttcctctctccccaccgttctcaatgtgtgctgccaattccctcttttctctatgcatgctatctgtactccttttcaaaaaccttcccccttttcttccctccaatcttttcttttattctatctccatttttccaaaaggaaactttcctttctcctaccaaaaaaaatttgccactttcatttctccaaaattctggtgatcttccttccaagtagatggcagcatgttttctcatgcctaataagccaagaaatatgatttagaaaactcataataaaataaaataaaatcaaaatcaaatcaaatcaaatcaaatcaaaataataaagaaagtcatgcaagccacataagtcatgtaggtcatgcaataatgtaagtcatataagaagtgagtctaaaagttcctaagtgggcctaagtgtcctagatgggcctaaagtggtgcctaatgggccaagtgtgcctaagtgtctaagtgggcctaaggtggtgtctaagtctaaattagggttaccaaaggtacaatgaggggtcagataaatccttcaactaaagtctctgaggtggctcaaaaaaaggtaagtagtatgagtagcaataggccaccaaagacctactatggagcactggaagtgaacttaaagacatgtgctaaatggataaaattgaaggtctacaccaacattgacttaaccatatctagtaaagaatgatttcttctttccgctatactattttgttgtgaagtgttaagaattgttaacaatctacatatccctttgtcttcacatagtttctgaaactgatatgacacgtattactgacctttgtcagtttgaagaatatttaaattatgattctcaacctctaccaaaaaacacttgaaacaattcaatgcttcaaagtgatgaagcattaatgaatgtgagaaaataagaggagtcatggtgtacctttacattcataggtccatagatatcttaatagactaactctaaagggtaagaggccctaggtgcctttccaaaaggcttcttataggctattcttgcttgacaagactctacctagtctaatcattctttttttacttatgtgttctaatatagaatgtcaattcaaagaatcaactgtattaccacaagctgcataagaagatgaagaatctaaattcaacatgaatataccattagataaaaaaatcttgttcatatagggccttatttaaatagaaatcaacttttatcctaataaaatgaaatttaaaacctaattcaagtagtgttattactgaaagtatattataatggacactaagtgtatataacacatcatgaagaagtaatgtatgcctcgtttgagttggtatgttccaacccctaaaacatctacccttgattcgttacctagagtaacatagtgtcttccaataggtatccttttttaatctttgaatcccacttgatcccttgtagtgttattatttaaatagaattcaacttttatcctaataaaatgaaatttaaaacctaattcaagtagtgttattactgaaagtatattataatggacactaagtgtatataacacatcatgaagaagtaatgtatgcctcgtttgagttggtatgttccaacccctaaaacatctacccttgattcgttacctagagtaacatagtgtcttccaataagtatccttttgtaatctttgaatcccatttgatcccctgttatatgatttattctttgaatcccaagaagagaatgaaaaattaattcatgtgtacaagcatatgaaaagagactattaagatttgggtataccttctttggcttagtgcactcatgagcaaagtagcctaactttccatagttgtagcatttcattttggccatatccttgtctgcagctcacttacttctctagtttttttttttttttttttccttttgttggccctagatttcctactgtaccaccatgtgttccttatcccttatgcttaaacttattagcctattgttgccccacatgagtggcaattgtggtgtgttgcacccctaaatgctccattttcaattcaatgtggtgagaaatatcagtaaaagttttaatattctctttgtctgtgagcactagttttccttatgattcaagcaaagagcatataacaactatgacttgctacttgttagtcaggttattatcgactacatttaagtcacaaattatagctaaaatttccctcaaatgttcagccatggtgtgtttagggtccataatatattgctcagatttcaaagtgagcactcacaacctagttataaatgttaaataataaccaatcttcagcttattctacatgtcttagggaatggggcaattctcaaactcccattttaagtcattatgcatgctacgaaacacagtgaaacatgcacaaaggtctcttttaacctaataataataagcttccatatcatagtagcagtgggctagattcctttcttcaagttgaaccatgatattaaggtctctaagacctcttgttcatttaacaggtattggatttttctatgccacatatcataattattatcatctaatttttttccttttatcaaattaacaacgtttttagtaaccttttcactatatttattatgtaggacacattagcatacatttatcaatttcaacttagtctatgatattcttgttaacataatgagatcgaaaattttgtaatgctcataactctcattaaatgtgaactagatcattataactaatttaaaattttaattttttaaaaagataccaatattccttaaaaaacactattagcctaatggtttttctaatctcattttaataataacaaatcatagttagtttgctaatgagttaaaattaagataagttttaggtaataattatgaaaaaaaaaatcaaatagaaaatcaatataatcatcaagggatcaatgaagagcaagactgagtgtgcatgaaggtcattcaagcttagaaatcctatgtaagatgttcacttgggtgcagttaggggtttaaatttatccatgcattgttttcatattgggttttaagctttaaaagtaaaatttttataaacttgagttttaattcaaaaccataggcaaaaacctctcaactagtttttataaaagtgtttaaagttgttgtctaagtgttagaaagaattgaaattgaaaaagataggttttcgagaaaaaaaaaatggtcaatcaatcaagagctatctcaacgactcaattgattaggaaaccgattgaccaattacccttttatggtcaaggcttagtcaacaagcacaacaaatcttctctctcttctagaagggtttctttgttgatcaagaaaaacattttcccaaccgaggtctagtcaagcccctaatggtcacctgccaaacatttaatatccaacgactagttaatcgatcaatcgaagctcgatcgggaaaggcttgttggagcactttttggtgtccaaggttgaaaacttataaattgagagctctcattcttttattgcatagagaacacttgcattaaacttcttacctactagtttctcacattcaatgctttctttctttctttcttgatgcattaaatctctcacttgcaaacccatctagtgcacccttgttgttcatcctaattgccttttatttcctcattaattgtgctaggattgagtgatcttaaactctcatttattgaagtaaggttgagttttaagcttcaagtttgaggataagacttgaatgattgcttatagtgcccattggagccaaagaatccaattgtaaaaacttgggagctaagttgaagcttcaaattagtggaatcctcatttaggaagaacttgaggagagtgatgattactactcaaaaagtgctatttgatagtttgtaattaatccttttaaacacttttgagtagtagttatttccttttaactcaattaacatgttaaggacccttgcaatcatttctaatcaaattgtgtaagttttggtgtttttgttagtaatttgatcaccaaaacaatctaagattgaggagagttatttggaatccatggaaaagcaatgaagagctcaaattcatgaagaaccaagctttggagctccctagccctttgccaaagtcgttcaaagtatgcaaggagagaagcaaggagagaggaaaaacagagtgaagaaaacagaggacagcagctgtagtcttctttcgcacttttggagcacttcccgaagtccattttctacatgctatataccatttcaaagctcaggaagtcaagaatccaacgcttcaaaccgtgtacgatttggagctgaaatgaggaagttacagcctttggaagatgactgctccaagctgaaggaaggattcagcaaagtgttgcgaaatcacccttttgttgcggaatgatttcgcagcctttttgcacagtgctttggatttcccttgaagtttcacgccgcgatggaagccaaacaccacaagatgaaagccaacttcgcagcggtgcggaatcagccttttgctgcgaagtaatttcgcagccctttgtggatgtctgcgaaatctcgcatacctcattttcacctgcgaaatggtccttagtctgcgaaatggtccttagtgcttcccgatatttgtgaccgacactttaagatatttttcttcagattgttgtgtctaaatttccattttctccttgtattcaaccactcatgtaattccttagctaagaagtatccaaggaagggtaaattaccttcctatataaactcccttgcatccactgtaatcaggggatgtaatatgatgtaatccaaatcgatcaatatatagaatatacagagccttgctctgttttttccttctctttcatttttcatttctttttatttctagccaaccaaactttgaggatttttcctcagaggatgaaaggctaagctttttgtctcttggagtgaggaaagccgagtaagtttccacatgcataatttggaagttttgttgttttagtttttaatgaagagaaagtgtaacccattaatggtttttatctttttagttaacttaaaacgcctttaaatcacctgggccaacacttggtaaggcaagtgatctccgtccatggagatgcactagtttaccccttgcgagcctttagtaggtggtttgaaggtaggattttctagaattgccaacacttggtaagcttttggactctaaggagacatccattagttatctcttgcgagcttttgacgggtaatccaaggttaaagatcaccttgaatggcaagtgctaggtgagaggtatgagccattgcaaggtgcatcagtgagagggatttagtgtttgaacccattaatgggaagcatttgtacaacaccggttagagaattaactatatgttaattctctaatgcgaggaaaagaaacaagtgaccggaactctcttttttgtatgaggaatctgagcctagtgatctgaaactccaagaaacatttttctttgtaagtaaaatcaattactatttttggttagtttaaatctaaacctttttcattcaaacatctttatgttttcttttaaagttaaccttgaaatgaaaagaatccaattcagctttgaattaatatcatttgcaaagtgaaaacccatcccagtgaacgatcttagagccgctatgctatagtagctttgtctttgctaccctagtatatggtgtaataggttataaattttgttgattactccctcaatcaaggagcaccagttggacacgaatcagctgagacaccaattgggcatgaatcaaatggcgccgttgccggggatcgaacctcgaatcaaatggtgtcgttgccactaccgctgctagggacgaatcaagtgacataggcaaaattgaccgagccactataaaatcagtgtttgcaacctctctatgtcttatctctttatttttattatttttttttgttattgcttgagaataattgtccaaaaagtttttaaaacccaattctcccccctcttgggtgtttttattaagttaattagcctatatataagttcaatttaaatggtattggacaaaaaaaaaaaacttacataaacaattcatatgcaaataaacattgtatacattaaaaaaaaaaaaaaaagtaatccataaattcaataaccttattaccaaaattcttttaatgaatagtgtagcaacttgagctgaagtgcactttgtagtagcatgtttaggcctatatttttggattaaacttgtgcttttgggcaatccatttttttgtgtttgcatgtttgagcacgcacttttggattggacatgcactcttggataacccatttttgtatttgcatgcttaagcctacacttttggattgaacatgtgcttctaggcagtctatttttgtgtttgcctacttaggcctatacttttagattgaacctacgcttttggataacctttttattattattataaacaaaaataaaaactcttcaattaatggacacaaatatttatttatttcaaacaaataaatacaaatagagacaaaaacaagcttgatctagctatgataccaatataagataaaaaattaaaactataatccaaaaaacatacttatggaagatctttgtagcttgaattgtactctctaatattgataattgctttagtgaggttgttgtgattgtgatggagaagattagatcggtccaacgaaaaactagctattctgcctatgcagttaactatgcttcacatcttttctctatcctctactaacactagttatgtcgcacttattcgatccccagctcagtttgtatcccttactactattattgtatgcccagtccaaacagtaccttggatatgtaggtttggatgtcacagctcttttataggagtccaggatatatacctccagtcagtctccttgcattaacaaacaaagaaaaagaaaatacccatattccttttctcatactctctctctctctctctctctttctcttaagtataattaattaatctaacatacgatatacgatcaatgccctaccaagaccaagccaagtgaatattatttccagtttcttttctctgaatgaaactcaagttcaacacttggatctcaaccacgatattttatcgaaagttcatgagtttcatagaacgtatgcttcatcatctggactatccaatacaatattacatgaattcaaagataatgaacccccaattccatgcttatatatagacgtcaacttgtgttatgtagaaatattaatattccaagttgatatgtttacactgggcttttgagttttgagttttgactggctctgcctgaaatgcaggaaatgcagggaaatatttgctttcatggttgtacatttggtacaaaaatgttgaaatttcctaccagctaatacgtggttctcatgccagaagctggagatagagattcatagagattcaaccctatattatacaacagctaagcacctccactagttatggagattgaagaaaaagtcaatttttgacgcgacaaggaagctatgacatgagtttccatgaaggatacctatgatttttcgttgtaagctactctttgtctcttaattatcaaggaaacaatagctaatacttcatcatatcatactgtattcttttgaagtcaatggtacaagggaaaaaaaatgcaaaacttagagtctcagcgtctacaataaagtttcaactctcttttaagtgctgacttttcactgcaattaaataaaatgaaagagaaaagaaaattgataaactaaaattataaactatagtgttatatatatatttgtgaataatcagacacacttaaaatataatgttaaaagaaaatttacaatttaaaaattattgttactttttaaaaaaaagtctactaattttaatgtattatttattgctaaaaagttaattgatctacttcaaatatgtttacaagaaaaaaaatcggcattatttacttataatttgcttggcaagtgggtggaatatatactttcttgcaaaggcttaattaaaatgacaagactattgtttaatcgcctgttaggtttggtttgatgggattgactacgactttcttcagaaatttgttgtgaaaggagcatcatcttctatatggtttgtagcatgatgtgagtcccacaaaacatactttgattttgtcaaggtaactaaattcaacatgagaaatcatgaccagttatacactttccactcctacggaccacgctaaatatgatattatatggctgcttttgcttctaggacatgcaagttatatggatatttggtgcaatcgttatggactcggaacatccccaataagaacttttcaaagttgcaactttacatggttaatctaaatttataaatcatgaagtagttgaaatatttagagttttagaatcgttttgggaaaaatgaaaagaagaaaatgatttccctttaatatttgacaagaattagagtttcttttttatgtgaaatatatcggaataaatttgaactccaattaaatttgaatgaagatgaaagttgcaattttcaaagtttcttttatatatatatatatatatttgtttgaatttgatttatgtcaaaataaagcttaacattatcgagcatttagacaatttattttttattaatgtgtaaatactattaaatgttgagttgcatgttcttattaatgtttgcatactattaagcattaattaattctatttctttttacacattaaaaatatttataaaaataattattatgtttcgttttattttacataattaagataaaatatttaaaaattaactaagaaattagtcattgaataataattaagattttggatattttaaaatcaattaaaaattgctaattgaataataagtaggatttttaatagtgtttgattgctaagaaaatattaaaatgtttttaggttaagtttcattaataactctttaatttatatatggtattcctcaaattaatgaatttgtaattaaaaagatgaggttcttcacttggtaacattgatattaagaataatgattatacacttaacttggatataaagtggttgaatcaactaccatgatcctacttgcatagtctaagggctaaatataaaaggtatgctaacattgccatagggttaaataagacaagaccaatttgagagggtttttgcccggtaataatatcataaccaatccaatataagcttgattcttataatactaggatatcttaccaaagacatatagtcctaagagttctacattttgctaaattcatatggtttattttattgtgaatgctcaattattaatacatgtttaacttctttataacaatcatgtaatataatccaatcactctcatgcttaccagtaataaattggttaagcttaactacatggattgaaaaataaatctaaacattttctcacataagaggagttaaaatgggtggtaacttaaaattttgctccaaatacctctaataaactatcctcactagaagagagagatgcttatcatagatgacataaggtggatcaaaaggctaggtgtatcatactcgggtctttagataacatgttggaacagcaatatgtgtctcatgccatgacttatgatattctcttcattttacaatagatctttgatgacaagggtaagtcaactagaaaagttgctttaaagactatcatgaacattaggatgataaaaggaactctcattaaaaatcatatggtatatatgattaggctctttaatgagataaagatccttgtagctaagattgatagaaaaaccaaggttaatttgatcttagagaccttgtcaaattcctttgaaaattttgagttaaactattctatttatgagtgattgtgaaacttgtcagagcttatgagggagcttgagatggatggccgagaggattctaaaagataaaaggtaattactttaaaaattgttcaaaattttgaggtataaaaagttttactatctcaaattttaaaattttacatcctcactcttgtttgttattttttatttaattcaaaattttattcttggtccactaagtaaaatatattgaaagatccattaaaaattacttattgtagcattattattttgatttagatatgattccatttattttttttaaaatataaaccataaaaagaaattgtacgatagtcggcagataggagtgactttcttccatctaaaggagcataaaagttccaagcattgacggtgtactcaagaagtattcctttgtattcaacagttagtcgggtcctttctgctaacgttgtgtggtgtggtctttcttggatgctgccgattcctacttttcaagttctaaatactataaataatatcattattctcccaaacattatgaatcccaaagcctcccataaaacttcagaatgagaaacaaccttacccaactccctttatttctcctctgctgtctgtctttatggattttcttcatagag

SEQ ID NO: 12897 - DNA, 12288 bp, Vitis vinifera
  Intron number 2 from transcript GSVIVT01012612001 (locus G SVIVG01012612001) derived from phytozome v7.0 (chr-ID chr1 0; pos 18344 to 30631)
acagacgttgaataaagcttgggaatctgatcttggtgggttggattttttgggttttaacttcatctttcattgatatttttttttttggagtacgttttgatatattttttatctgccttgtgtttgtttgatgaattggaggaaaagcatgaagaaaaatgaaataaaactagggattttaggggtttttttaactatgtctcccattcatttgtttttccaaggtatttgatttgatttgtggttaggaatgtctgttttgaggaggaattgctgaataatgtaagaaaattgaattacattttctcattactttctgaaaatgtaattttctatagattttttttattttttttgggtacaatttctttaagaaaatttggcatttcccttttctttttctttccatggctcctgcatttgaggccaaatgggtgtgatgcatccaaatcttgaatttggttcccttgatattagtgtctaaagtttgatcttcttgaaatgttttatttaacatccttttagttttcttggtattagtttctgaaatttgaacttccttagatgttttctttcattatgctatttgtttatgaccaaagtttaaaatgttgtttggggaataactttggttgaagatcctgcacaacattccactaattaatttcaatattttgatttctttcctattcttatctacgatctagttagttcttgaataactgataaaaaaataaaataaaataaataaataaaacatacaatctcattttcatttctttctattcatattcgattctaaaattttgtttccattatagagtgtctctaattttaataatttctttataattgtgtttccaattttgttctagggaaattagggttacgatttataggttttagggtttaaggtttagagtttaatccttaaggtttatggttaggtgttttagggtttagattatatatttgttagaatatgtgtaatatcctttgtatctttatgaaaattgagttgtcattttgttttcacgaaagttttgtataattggtgcttttgcaataatcttataaagtctccccacaggactagtagacctaaaatcctgcacgtcactagctccaacttttttcgggataagaactaagaatgtagcttcttagcaaacataaagctgagttttcccctaaaattgtaagattgccaccattctttaatcttatccgtaaaaccttccacccttagccacatgttttcaaatctaaatgggtttttacttcttctcacccctccacaatctaacaaaatagggcaatgttcagaaattggtcttggtagaagaatttacattgcccttgacacaaggtcctcccaatctcttgaaaacaaaaagcggtccaaccaagcctttaaggaacctccttcccctccacaccaagtgtatgctccactgcccagtggcgggtctactagttcgaactcatcaataaagccagaaaactctctcatcgtggttgacatctgcctaccattgctcgtttcacctgagaactgcaccacattgaagtcccctactatataccaaggttcattccaaagccccttgacagcggctagctcctcccacaactccctcctctcccttcctttaagcgggccatataacccaaagaacacccaaacaaacccctcgcaatttctatagtggtatgaaatagaaaaagaacccacttcaacctccagcccttccaaaactctcttatctcacagaactaacaccccacctgtagtgccccttgcgtctaaagacacccaacccaagttcctaccaaccccctagcttctaacaatcctatcagacatctccttcatttttgtctcctaaaaacacatcaaatctggcttatgttttctcaccatcggcttaatggccatccttttatctgggtcatgcaagcctctaacattccaagataaaatcctaagcttcataagggaccacaacaacttgccttcccgacaccccttcctctgcttctcttcccgccaagccgtcataattgatagtgttgacgagctttttcaactctttgtcctttcttgaacccgtcattgttccccttttgctcacttttggcttactggcagagcacctcttattctcaatctcgttaaggattctcaaaatatcctcttcgaagccttcaatcgaaacccccatagacttacagaaccaaaggaatttctcgttcacctaagaggatttttccttttccatttctcctgttatagtgatttgaagatgtggtgtctcctcttttgaagaatcaagattgtcgtgcagggtgagagcttatttattttgaaaccttagggttaccgcagcaacccctcctcccccccccccctgaacgactagccttggcagggtaatggagcatccatcctcgagaatcatacgcagcagcacacttaataactcatgctccaaaggattttcaaccatcccctcagtctcccttgtccaaatgttccacacagaatcccctagcctcgagagagaaggagaagaaaggccagaatagtccccaatcacccccccaagagcaggagaacgtgagatggggtacgtatctgaaagacacccctccaaaggagttcggctaaggccttggtccagtggggacatctcctatagcaagacctccgcaatagaaattgactttgggagctccatcgtgaaatccccagtcttagaaagagggaggcctaggagagagacttgggccaacccctttttaaaccctttatttcttttgggcctaacagaaacaacccaacgacccacctttttagagaagcccaagcctactcttttgttaagagacttggtctgagggagactggcttcccagtgctagtaggccctcccaacggctctttagacaccaacccaacccacttggattttttactaagctgtccacccccttggaaacccctccattgccaaaaggtttctttccttccaaccttaaaactttagacaccccattttttctttcgtcataagtctcattcaccttaaaggcaacctcctacagagaaacatctacttcaccttcacagtctttttacctggagttgacctcgggttttcgaggctccaagccaaggtccctgtcatctacgtttgtagcaaggattccttctccacagagaccctcttccacgcacaccaaaccgcgtgaagcagtccccacttcttcctgcacaatggaagccttgctcaccgatgcaactcctctttggggctttagaacaattgccacctgaagagccaagaaccacaccgagtcctcccaccacaacggaatggagaaagaagcaaaccctgctatgacctttatccttccaggcacctcatttccattgtttttaactaggattctagcccttcctgttacggagctttttggtcctcatccatagcaacaaatcccccacaagcatcccccacatttttaaataactcaaaattcctgaactgttaaggcaaccctggaattctatcccatgagacatccctttggaactccataatggagcaccccacagttggtacccaccaaaaatttaatcttcatggagagaaaacattgcaagaagatcagtcttggatgcttcctttatccatttggagtcatactattgaacatggtgatgtagaggaggtagacaacatacaagcagcaataggaaaaaaaaatgacatcataaaaccaacggtagcagaaaatgttgattcaaacttgatggtttactctaggaggccagggttatcaatccaaccaatgcaaaagcaaaatccaatctctcttacacatgatcagtcatcatctccaaaattaggtacatttaatccttctcttcttaatcatggtttggacactgatcttgatgttcctatagctattcgcaaaagtgttcgaagttgtactaaacatcatttgtcaaactttatatcccatcataaactttgcctccaatataaagcctttatcattcatttgtcttgagattcggttcctaaaaatgtataagagtctctaagtgatcttaactggaaggaggctataaatgaggagatgaaagccttgtataaaaataaaacatgggatattgttgatttgctcaaagataaaaaatcaatgggatgcaagtaggggttcactattaaatacaaagttgatggttcgattgaaagtataaagctagaatagtagcaaagggatacctacaaacctatggaattgattgccaagaaacttttgcactcgtggcaaagacgaattccattagagttctttaatccttagcaacaaatcttgattggcttctataacaatttgatgtcaaaaatgcattttttcatgggaacttggaagaagtatttatgaatttgcctcctggttttgaagaaaaattcagcagtggaaaggtttatagattgaagaaatcattatatggtttgaggtagtctcctcgagcatggtttgagagatttgctaagtctcttctcaaatttggctatcaccaaagccaaggagatcatacgcttttcatcaaacgatcacttaaaaagaagattattgcacttattgtttatgtagatgacataattgtcactagagatgacataaagaagatgcagaatcttaagggaaaattggcaaaagaattcaaaatcaaagatcctggaaatctaagatattttcttggcattgaggtggcaggatcaaaagggggaatttatgttactaaaatgaagtgtatccttgatttgctaaatgaaaccgagatgctaggatgcaaacctacaagtactcctattgatcaaaatcatcaattaggcaccatcactgaaggaataccagttgagaaagggagatatcaaagacttgttgacagattaatttatttgtcccacacgaaatcagatatagcatttgttgtcaacatggtaagtcaatttatgcactctcccttagaatgtcatatggatgtagtcttgagaatcttgaggtacctaaagttaactccaagaaaagttttattgttctcaaagatgtagattggccaagttatattactaatagaagatctacttcaaggtattgtacttttgtgggtgacaacttggttgcttagagaaagcaaaaaacgacatgtagttgcttgatctagtattgtaattgagttttgagccatgacccttcacatttgtgaactcatgtggctaaagggtttattgagggaactagaagttaatcttgagaatcccatgagattgtattgtgataacaaggttgcaatcaacattgctcataatgtagtacaacatgacaggactaaacatattaagattgatagacatttcattaaagaaaaagattgatggtagactaatttgtactccgtttgttgcatccaaactacaactagttgatgccttcacaaagggggttcagaatcctacattcaactctatggttggcaagctgggcatggaagatatctttgaaccaacttgaggggaagtattggaatccaataattatttctaatttcatggaatttatttgatttattcctgattttgtgcatatttaaattagttgactatacaaatttgggaagttgtaatttaaaggatttgtaggaagaattttaggagtaggttagctgtcttattctatattcatttattgtacaagtttgaaggtcgtatatagattttgtattaatttttcaaagaaagaataagaagatttttgttttccagcacttactccttgttgcacctttctattcttacccttgcattcctatattcttcctcttgattttcctttttttctctttttatgtactgattcttcactatcttttatgtgtatgtgtgttttccaatttgccttcttctattctctgtctcttttaattccatcaacttgtaaaccactaagtagcatagaactttgattatgtacatgggtggttcttttatccatgcataatcaatgcaaattgtatgggctcatggaaaactccctaagcatctgaagttgaaaaaactccttataaaaataaatttttcttactctagtctttgctctgtctatattgttgcttcattagtgatatcgatgtcctttttactgcttttaatattgtcagcagaaaatttaatcatatacatgagttgttccttctctaactatatttttttccattcaattcaattcaattcaatgatgtatgaatatcactattcaaagatacagttgggtttcaaattggaaaagtagtgcatgaagacttagaattttatatcccatctcacagttcccaagaagtttaaagtttgatcacttgacatggcacaacttttgactgctggtgcccaatcatcccattcctccttcctaggaaaagtgcacactaactcttacttgtacattcttataaaactaaaaagcctaacatcttcctcataaagtgagtgcactgttcaatcactagtatcaatccatcttaagcgtcaattggcaatttttgatgagggtaatggagaaaatgggctttgggactaagtggagggagtggatatggagctgcatatcgactgccaagttctcagttttagtaaatggggagctagccgggtttttccctagctctaaggggcttcggcaaggcgaccctctatccccatatttgtttatcatgggaatggaggtgctgagtgctcttcttcggagggctgtggaagggggctgcatcacgggatgtagaatacagaggggtagggggcaggctgttagtatctctcaccttctttttgcggacgatgcaatagttttctgtgaagctaagaaaaaagatatgacttttttgagttggaccttatgctggtttgaagccgcttctgggctgaggattaatttggccaagagcgaaattattccagtgggggaggtggatgagatccttgagatggctgtggagctgggttgcaaggtgggtcagctgccttcaacctacctggggctgcccctgggcgcgcctaataaagcggggtatgtgtgggatggggtggaagaacggatgaggtggaaactagccctatggaagcggcaatacttgtctaagggtggtagaatcaccctcataaagagcacactggttagcatgccattataccagctgtccctattccgtatgcctaagggagtggcgagaagacttgaaaaactgcaaagagacttcttgtggggagggggaagcacgggaagaaaagcacacctagtcagttgggagaaggtgtgtgtgagcaaagagaagggggggcttggcttgaggaaaatagtccagttgaacaaagcccttcttggaaaatgggtttggagatttgctcgtgccaaggatgaaatgtggaaacgtgttcttgtggcaaaatacgggcaagaggaatttgggtggagaactaaaaaagcaaatggggcatttggggttgggctttggaaggagattatgaaagaagcagattggtgttggagcaatatgactcttaaggtgggaaaagacaccaaaatcaggttttggaaggacacttggtgcggggatgtggagctggcctggagattccctcaactcttcaatgtggctgcccaaaaaagtgccactgtgggggtattatgggaccagaatgctggccaaggaggctggaacctaaggttttttagaagcttcaatgattgggagctggccttggttgacgaattgttgcaaatcctaaggaatcaaatgattactttggaggaggatttggccttgtggaaggggggaaaaaatgggaagtttggtgtcaaggatgcgtatggactgttgaccagccatagtacatctgttccccaaaaaggccatttgggtggagaatgtgccttccaagttagcattttttgcgtgggaagctacttgggggaggatccttactattgataggcttcaaaagagaggatggcaaatccctaaccggtgttatttatgtggtagtgaagaggaaaatgttaatcatcttcttatacattgtacagtggctagtgtgttgtgggggatggttcttagcctgtttggagcccagtgggtcttttcagaaactgtaaaggaggtgattatcagctggaagggttcttttgtgggcaaaaagaggaagagaatatggagatccataccgttgtttattttttggacggtgtggaaggaaaggaatagattagcatttagggggggggggagctagctatacagaaaattaagtattcttttgtctgtaatatgtgggggtgggcaaatttgtataatggtgcggagtcccggtcccttaaggtttcctggagtggataacctccagttgagggctggtgggtttttttgttgtttttttggtcctttgttgtgaggcctttgtcgcctcgtatactccctgtatgcttcgcggcgtttgcctttgctaatatattggtgtttatttatcgaaaaaaaaaaaaatccatcttatgctattcagccaccaaacaccccattctcctgcttgctggaaaggtgtcaccatctccagttccctgtcttgaaatgtttaatgaagcttgaacactaaagaatggcaacccctcatttttcccttctactctgccatccatgcctcctttctgcttcatgaatggaaaagatgatatgctcatcagaatggcaaccttttctagtgccagcaggaatcttctgctgattttggtgtcagaacttttgtaaggaaaaaaagtcgggaaaaaggtcagagggcaaaactgctcaggatgaaagcctgcaaactgaggtaaaaattgagattgagtcagttttctgaagataaaagtgaggttaagtcagacccaagcattgttgctttagtgcaaggtactggcatgaaaacagctataaagaagaaaataattaagaggataacaatacgaatggtcaatggagtgggaaccaataatgtgcctgctgacagaaaaaaagatggtgatactgatgagaccaaaaatgtgtcagagcaagcagtagaagtaggcaacccggttagtgagcctaacaaattagagaagaaaacgactcctaaaacaaagtcaaaaacagcaactttcagcaagcaagatgagaaagctggctctgtgactaaagcaaaaatcgacgctgagaagcaaaaagtttctcaaaaggatagtcagactggcaagagagacaaatcaaaagatcaggaagagtcaaaggatgaaaaagagaaagatgggaaatatgattctcgggtgaacaaacccaataaagacgcgaaagaggagaaacatcttgaagagcctccaaggcaccctggattgtttctacaaacaaactggagcaaggattctaaagtaagttgaatctcacctaaacagcatagcatttgttttgataaattgtatgttagtgtaccatagtttgtatcaaaggcatccaccatgtgtttctgttataccctgtgttgtacaccctttctgattagaaaatattctgctacaactacattcattgttgtagaaagtcaagaattggaaggtaaaaagaataaattcttctttgattttttgatttgtacaaaggcccacataggaatatacaaatattcctagcaccaaaaaatttggatggtggatagtagtacttatatcccttttaaattgaagaatatcccacaaaaatacaaatgattgctcttggatccaattttcccttgttttgactgtggccatgcacaaaggatattaacccaaatatgttatgaatgagatggtttgtggttctcatagtaggagaaaacaatgagaatatttccatgggacttttgaaatctaagattttagaaggtaattagtttatgagatgtgtggcggttaggatggtttccctccaataagatttaagcacatgtttttggaacaaaaaagctcatgttgtatcaaggaggtggccatttttcctttcatctgggagaacaaaactcacattagatttgtgtttaagtaagaagatccaagagactctagtacaacgatagatgaaaaacataaaccattatggcccagatgtatttgggataggggaaggaccccccctcccagatatctctatgaattagatgaaaaggctttgagcttcttttattactaattgaaaatgtagtacgcttgtgcttgactagttcacatacatcatcatgaaagctctcaacatctaattttctaatagagaaggaaataagatcttaagagttctaaatgatggatgtccaagcctacgataatgaaaccagattttttctttattaaaaaggtgaatgatttgcttggtgtctcaaggtagtatagcctgttccgttctttagcaagtccaatcatcttcctcaaatcttagtcttgaaatacacagggggtagggtaaaaattacaccacaacccaaatcttgtgtaagcttttatatagagataagattagtagacaactttagaacatgaaacacatttctaagtgtgagtgtaagactaatttggatatctcctacacctacgatggcagttaatgaaccatcaactatgactattttcctattgtttggacaagggtttatagttgttaaattgacgtgatgaatttagcctcggtcaaggaggttggaacataagactctctagaaactctaatgactaggagttggacgccttaggagagctgttgcatatgttgagggacttgaggatttctcttgaagaggacgcagtgatatggaaaggagaggggcacggccgttttcggattagagatgcttacaagctgttgacagggcctaatgtcattaccttcccgaaaaagagcatttgggtggacaaggtcccaaccaaggtcgctttttttgcatgggaggcttcttgggagaaggttctaactttggacaagcttcaaaggcggggatggcagcttccaaaccggtgttttttgtgtggttgtgaagaggaaaatgtaaatcatattcttttacactgtacagttgtaaggcctctttgggagattgtattggcattgtttggggctaattgggtgttcccagagaaagtcaaagagatgttagtcagttggaggggcccttttgtggggagaaagaggaaaaagatttggacctccattccgttgtgtattttttggacggtatggaaggagagaaatagattagctttcaggggggggctctctagctattcagaaactaaagaattcgtttgtttgtaacttgtggagttgggctagggtatatatgggagaggagtcttcttcgcttttaggttttttggaatggctggccattccctaaggggtggtgagtgttggttcttgttaggctactatgtatacttcctgtatgctttgtggctttttgcctcgttttatatatgcgcatttatctaaaaaaaattgacgtgatgaatgagtcatgtgatctatgacacctgaatccataacctatgaattggtaaaggtttcatctaaaacttttaatctaatggaaataggaaactaacctaaaagtgctagtgagtaggtacttgaaggtttctcaacaattccaaacaaagtccttagtttttcaatctcctcctaattgaatctgccttgttctagagatctttcttcaactatttgaacaaaagacaagtgtgcttgtccattatccttttattgccctccattctaaccccactctctgctagatatagatggcttgccatggagtttctagcatttctcccgtgtatgtcttgccttctgatagtaagtgcatcacaagtcatccttggtttggaacccttaatcgatcaacccttttgtgatcaatagtgtttactttatgatcacttctcttgttggcaaccatagtcaagccttctaaattttgaggtttgagcatgatactcctactttcttctacttagataatagagaaagtctcattcagagttgggagctctttgttaagtatttgaactttaacttggtcaaactcaacattgagaccaaccaaaaaatcaaactcttatcattttttatataattcttcaggattgttgcatcttcaggacatcttatcttaa

SEQ ID NO: 12898 - DNA, 7479 bp, Vitis vinifera
  Intron number 7 from transcript GSVIVT01020780001 (locus G SVIVG01020780001) derived from phytozome v7.0 (chr-ID chr1 2; pos 2071596 to 2079074)
cccatatttctccttatatttgcttttgcattcaggtgagtctcttgtcagattagcttcttattaaattttacttcattcaatgtagttgcattttaagtgtctttgtgcaatcatgctattgattttgagttattacccacagataaatcatcattttcattaccgtttcaatttcttgaaatctatttttgagcaatttaaatctaatttgtgtttgggaattttcaacattgaatgatgacatattatttcaaaatgttcaaacaacaggctgaggcctatctatagatgcaaaccaagtatgtctaattatcgaccattggcttactttcgtgttatcatctactttaattactgttaatatatcttatttgcatttaattatgaatatgaatctttcttttttgataggcaaactagaaatatgttgatttaaagctcattccaaaaatggggaaacaaccctaatctacaggaagtgtacaagatgactcaaaagctaaagaagcaaaaaaaaaaaaaaaaaaaaaaaaaaaaaaaaaaaaaaaaaaaacacgactggcataagaacaacatagcaccttcccagttgttgcattaacctggtctgaggtatttgacaactgcactgacctttcctctttgtgacaaaaaaagggatcttacctatcagactttgtttcttaaaggcagttaaccatgatgtaaaatgtcaaagttactctttcgctaaatcaagggtaaacaacaccattttgccacttcaccttcttttttttccttattttttccccatctttatcttcttcctccatcacatctcttacaaaatcttaatcccatcatttttttttttaaatcaagttggaaaaataaaaaaatgaaacaaaataaattgaattcaatattcacaactattagcagctattgtgctgcagaggtttcaagtacaaaaaagaaaaaaattaaggaaaaaaaaaaatagcacaatgggttctgcttataattgataacacatgctgcagcaacaaatcatggaaaatgcccaacagggaaaagttaaaaaacagactgggaaaaaaacaagagaagcccaacatagaaatagcatacgagaggtagcgtattgagcttcaagcataatcatggaacatggccaaggagaaaaattaaaaacagattgaaaaaaaaatgaagaacaagataagcccatcacaaaaaaatgagaaatgtattgaagaaattaagaaataaaaaatttaattaaacccaaacccaatttgcactaagggtaatataggtatttttcaaaattttggctgtattagcagtgagattagcaacgaaatggtacattgatggctaattaatggcatatgacagtcttcttgtttgactaaaatctgaaggaggctaattttctttctttctttctttctttttttttttcctaatctacttttcttttgaaatagaggaaaagtttgtgtaattagacctaacctccttggggtggggggtggttgctttcatttataatttttgaatacagggaattactatggttttagactttatcctcaagaaaggtatatctgattagacccattctcaggggaagtcagtaaaaaattcccctagataaattaccccttgaccatacaaacagagatttaatgttggttacagccaaattagaaaacttcagcccataaaaaacctttgattaaactcttcccaaggcatcaaacaaacataaagggactattcttcattccttcttgtggtccttagcacagaattatcatttgacctctgtgcaatgtgcctttaacaggatgaggcagaatccgacaccctgaactaggaccaaaaaaaaagaaaaaaaaaagcaaacaaagatctcaaactgcatgctcaaccagagtgtatgataatgtggttagttaactccttttgtttgcacaagtaacaccaattgacaagagtctaggcagggcttacaagttgattgattgtaagaatcttccctggaactgacagattggtaggaatgcttgtttgtgttagccatgaaggcgcttagctgcctcctacagagggcttgggagggtggctttctgtcaggcttcaaggtgaatggtagagttggagagggtttgaaggtttgtcatttgttgttcaccgatgacactttgatgttttgtgaggcttctaatgcccatttgaccaacttaagttggttactcatgtggtttgaggccatttcgagattaatctaaccaaaagtgagttcatttcgattagaagggtggagaactgggaggagttgaccgttgtgttaggctgcagagtgggtgtgctcctaatctcttagttgggccttcctctaggttcccctcataattctttggctgcttgggatggagtggaagaaaggttcggtaaaagattggtaatgtggaaacaacagtatattttcaaaggggggatgctaactctgattaggaatactctttgtagcttgctaatctacactatgcctttgttctggatgctgaggatggtgaggttaaggttaaagagaattcagcaggactttagaaattcagcgggactttctttggggaggagggatgttagagagaaaacatcatctagtgaagtgggccactttttgtttagttaagaggaaagggggcctaggcctaggagtttgacgtctttcttcgcataataaggcctttttgtataagtggaattgacgctttgcaacagaaaggaaggtgttttggagacgaattgtaagcggtaagtatggggaagttgaaggaggttggtgtctaaggaagcgagtgatggttatggttttgggtgatgaaaaaccataagaaatttgtgggagacgattacttgtagaatttccttcttagtgagtaatgggagcagggtaaagttttggaaggataaatggtgcggtgatgaacctttgagtgtttcttttctttcattatttgccttagctatgtccaaggaggcttgagtggtagacttatggtctcactctaatggaagaggcgtgtggactcctggattctcttggcatttaatgattgggaaattgagagtgtggagcgcttcttggcaaggctacttgttaaggtggtagttgaggaaggagaggacttggtgtgctggttggaagcaaaaagaggaactttctttattaggtccctttactctaacctggaggtggggagatctgagccgttcccatatggtattgtgtggaatgcttgggttccacctaaggtgagccttttcacttgggagatgacttggggaaaaactttgactcttgatcagttacaatggaaaggttagtctttggccaatagatgtttgtaacactcatgaggagtcaattgaccacatccttttgcattgtagcaagttgagggtgttgtaacaacttttgttttctctttttggtatttcatgggtgattcactcttctgtgagagacgttctattagcttgacatgactcttttgtggggaggaagcggaaaaggttaggagagctgctcctttatgcctttttttttttggataatttggaaggagagaaatggaagatcatttgagaatgaggagctctctaatcatggaatgaaagtcctatttttatgtagattgttttcttggtccaatctgtttataggcaacaaattgatgtccttatttgattttattgattggtttggttcggtttgagtgagggagtattttttgtttttccaacattttttggtgcttttcaatacaattgcttcttatctatcaaaaaaagaaaaaaaaaaagaaaaaaagattggtatgaatacttaagagaaacaaccattcttagagacctttcacacttgtctttcttcaaaactaccaaataaaggtaaataaggtgtaaaagcgacttcacaaacttaatttccaatggtggacgctggtgtcctatgagttagctgcctactctaataatcaaccacccttgcatttttgtaagatgctatgttgagcaagtctagggaacaaattttcaacaaagaatccctagcccaaacaatgctgaaacctgattaagtccattgcctatagaaatactcagtcttggttgaaagaaaactaaagctgttttaatagctttcctacgaactaacttgcgatccttcctatatgccctagaacatcatcacctgtatatcctgcagaactcattgaatgtaactcttctgcacaaattaatgctcaatggaaaatctcctcagccattcaccaaataaagccttcttgggcaccaaaagacttataatatcctactcacttgtatccttaaaagaaaaaaaataggcctacttcacctaatgcagtttacttcctagttgcccatcatacctcctaacaggaaatcattctggactttttcaagcttaatccccaccattgagaaaataaagaaagagggcagaagatatatcttcaaaatgtgcttcacttgcagagtcacaatggaggacataaggtacactaggaagctaatgagggtacttcaaatcatagttttaaaaggtttgaggtgcacctaagacataaaaatttcctacaacttaggtgcaaggcgcaacacgaggtgtacgcctaagtgaagtgaaatgcgacttaggatgcatatcaattttatagaatatgattcaaaatctaatccaatcgataaataattcaagatgtcaaacatttaaaagaagcattcaataaaaaaataatgaacttatataagtttcaaatgtaattagaaatttcaagaataaaagtgttaaaaaaggaagaataaagtagacaaggtgcaactcttcaataagacacatgtcttggcaagtgaggtgttataactagggagtggtcgtgcttttagcgcgcattttaaaactatgctttaaataaacatgtcacgttggtggttggcaactttgccttcctacaaccaaacggctacatcaaattacattcaccacataacctactagaataaggccactttcctctattgactttatatctagagctacaacaaaacataaaggaatccacgttcgaataccttgtcactaattgactcataaaatagaagataatcgcgaggaaaaaaagaagacaatctgataaggagagaggttccctttgcctcaaacctttgtaggtctaaaataaacttctataaataacgaacatggatgctatacaccaagatctatgggccatatacaaagggcatcaaaaacccaaaagagagaggacacccaaaaccaaccactcccttcctcaccaagaacccacctaatctacaaaatcgataggaggcattgagcctacttcagtgtacatgctatcccatgacataagattattaagggatgagtgttttagtgcttgaactgattgctccttactttcaaacactctttggtttctttccttccaaattgtccaaaaaataccaaggggagccgctcttcaaattttcttatggttccttctcacaaaagaaccatgccattgttatataatgttacttaccgaacaaggaaggacctaagcaacgctaaacaaagagggcaaaagctgccaaagaaatctctttatgggacaatgaatgagagtgtgatctattgattccttttcgcatttgcaaagaatacatctatttgccaatgcccacactctcttctaattctgatccatggttcagactttgccctagttagcttcccaagcaaaaaaactctcttttgaagggacttaagaattccaaatgatggccatggggaagggaattgcattccttagctccataatgaaataacaagatttgacagagaagaacctattcctagaacccatgaataacaagatttgatagagaagaccccattcatagaacccatcctaaccactctatccttcatatcccttttcatgggcttcccttaaaactttgaaaaaataaattgttttgataatctagctcccaattattcttgtgtctaatgaaataaggattcaaatgtgccctttcacccatatattctcaaacattcaccacctaagtctcttttgacgaagttaagagttaagacataaaaatagctaagggttcatccccgcatcacttattcttccaaatttcaccctccttgtatctcccaccttaaaggatactccattgctagctagttcccaacccttcctgatggttttccaaccccaacctcatacccttcccttactttataagaatactaccttgaatgacctttttccaaaaagcctcactctttgatccatatctccaactccattttcctagaagggggttattaaggaaggaaagattctttattcttagcccctcttcctttttaccctgcaaacaatcaaccattcaaccagatgaaactttttttctaaagcccctcctccccaaaggaagtctacttgaatcttctcaatcaatctaacctttttggtcatgctaaataatgacacggactatataaggcatattggacaaagtacttcgaattagaaaaaatagtttttttacatatgtggtaaacataatgaaggatgagtaatccttccaacatgtactattgctattgaaaaggtagaaaagtatgctattctgtagaaatcaaactatctgcatagattataggctgaaaaatactgtacacactaaaactgctctataaatagggagtaaaagagtttccaacaaaagaaactagttgctttgattagctaagctaggaactgagagaaggggtatcccacctcattagcaatatctataatattgccaagccaaccatcaaacttctatgagcctctcttcctgttagacacctgggaaataacgcagaagcagactagcgttgattaaccaacatagcaaatccaagtgtggagatgcatttggtctacccaattggtttctatacaaagcctgttctctgctcaaaaccaagactgaaatactaattaacatgattgtaggccttcttcattttgtagttaatggctttattagcaaaaaaaaaaaaaaaaaaaagacaccacccaaaatccgcctctcctccaccataaaggtattttatgaatgagatgccactttcataacctctattttcatattatttgttatctacagcttactttggtgctaattgtatacaacatgtgtaccttgctatgcccttttcaggtgctttctttatacatatttcttcttgtttgcctataaaaaaggaaaagttatcctcaaatgtaagtttcttgaattatacttgcctttcttgttttgatggaaaatttttatttgaaaggttggaatctcccagcattaaacttctaggtatta

SEQ ID NO: 12899 - DNA, 9638 bp, Vitis vinifera
  Intron number 7 from transcript GSVIVT01016092001 (locus G SVIVG01016092001) derived from phytozome v7.0 (chr-ID chr9 ; pos 18765212 to 18774849)
acatctttaatctgcaggttgtacccaggaaaatacacacctaaatcctgttttaaatgatttcttttatcagaatatttcttttttaatttttgatggttctttataggaacaaaagtacttttttattttttgaaaagaagggagaaatattagaaggataagctatttgatggggattaatttccaagatctactcatgaaaggaataaaaagaaataaagaaatctaaattactctattgagggtatttaagtaattttgagttttattgagtttttgaagtcataattagtttgtagttaatatttgagtttcactagaatttaatttttttttttatttcagtccttttttagaatgttcctctcttttttattaggaactcttattataggaaattcctataatgttttaagtttttaattctaaaaagaaagtttctattttcctttttattccattatttaaaagatttaggaggtttagccgtttaggaaagaaataaaagtcatttatatatgttaggtttcttttttcatagtcttattcagttttttaaagcttataaataagactaatttgtgtaaaatgaaattaatgattgatgattaatattaagttttcttgcataccttgcaattttcaatttggagacttcattgcttttttttttttagatgagactcttagaagatcttagtgagactccaaagttatttatctttcttctttttatcttttctctttctatcttttattttacttttcctgacttatataattttattttcactcctctccttacaatccttaaaaattgaagtctgagtccacattatttgagtgtagacaaccatcctagggttaggctacataagagctatagcttccatgaggtcaactgatgtagatggtgactagtatgactagtaactaaggtgttgtttaataaaaataaataaataatgaaaagtgaaaatgtaaatgggcccttcttatgtgtgtgtttagtaatacaataaagttatcacttatatctatattctactaaaaaccacttaatatgttaatagcagtttgagtaatcacttaaagcaaaacacaataagtggttttaagatttttttaattttttgttccctttggctacattcttcaattaaattcttgttatattctatccattttgaaatgaattccttgaaaacaaactattcatactctattatcatttttatgatccttaaaaatatttttctctttttttgtctttttcaaggtgtgtgcttgtgtgtgtgtgtgtgtttttttcttttctttttttcaaaatagatattaaagttcttataaaaatcttgcatgtttattgttgttttcgagattttataaccaaaactttcaatattcttgtatacataatgttatatatatttccatttataaaaatgttatcaaatttggattgacctcatatgtatcttgttggaatgtaatatttgtatataaggatgactagtataaacgttgtaagaataaatttgtcaagtaaacaattttggaatttaatttttcatttatcaaacaattcaatcaaattcagatttaaattataggtaggctccttatgacctctaaagactaaagaatagagattccatttttttttttttttggtacaaagttaggggaggaatgaaaaactacctcattcatttggatcaagtacatagacccaagaaaggaggtttaggacttgggaagaggaatatatatatatatatatatatattttatttttccctctttgaggaataaagctctcctatgaagtggttttggtgattgatttcccggggaaactacaactttgggtcatcaatcatcttcaatacttatgggttgtactctgatggataagacaccaaaattgtcttaagctggtcatatagttgcctcatggaaggctattgctcaaggatcttataattttttctcttttatatgttttttagtgtgatggtacaaaaatttttttttgggaagatatatggtggtgagatcaactcctttttgactcattttccaaatctttttagagtagctacatttgaactcctcatctctggtattttacatttctccttttccttggtgtcttagaacttcacttttcaccatgatcttttgattttgaaatcaagaagtttgaacttttcttatcttctttgattgacatgtacttacctcctttactccacatcattgtgacatgtgttgtactagcggaggtctcaatgtaaatatgttagttcaagaacacaaagataaaataatccacacataaaggtacgtgaagttttaacatggtttgattaaccatgtctacattcatggatgaaagagaatcatccattgtaccatagagaatattataaaggatagaaactagctattaggttcctaaaacatgttatgtttcctcgctccttgtatctacaccctaaactacaaactttctcactcattccattataccatagagaatattacaaaggataggaatcaactacaactattgggttcacgaaacatcctatgttttcccactccttctattcacaccctgaaccacaagctcccttgatccgccaggtacctctcgttcttcctcacatatctatccaccacatatggtcttcaaaagcccatccccatctcattagctttccacctcatgacctagaatatttataaagatatttataataactttctgtcactgagaaggaagaaaaactagtatgtactgtaattcaattttcttccttcaaagaataacatacaaccctaatttattctaagactcttcaatagaatcctcaaaatctaggaaactagaaaaaataggataactaccaaatagatagctatctttatttttaaacttagataagactcctaatttgataaacataaaatttaaacaacaaagattaattcaaataacttatttgaaactaagggaattcaaatgacatttgactctaacttccaacactttccttattctatgaggaaatctaatattacaatgatatatgaatataagaaatattcaatacaatatgctttacaaaaatcaatttataccaattagatctttcatctctcttgaaacacctttttatatcacatcctaacgagagaacaattgactccatcttcaattaaaattccttttatcatgctcttgtatgcttgtttttctttggttcttaaaaaaatcttcaaccaagtgtttgataccaattgttgtgtcaatagaagctttaatgtaaacatgttaattcaagaacacaaagataaaataatccacacacaaagacatgaggttttaacgtggttcaacttaccatacttacattcatggatgggagaaaatcattctactatatcatagagataatttgtgatttgcattctccataatgtaaaaactatactttcgaacttactgattccaagcctagatccatcttctctaaccattgctctcactcaaatcagactttgataccacttgttaggaaaaaatatctattaacgagagcaataacacacaagaaatagaaaatagatagagcatatacaagatttataatggttcactctcaatatgaaagctacatccactttgtcgctatagaatttctactctgatcaaaaagaaaaatgcaggatgatctcaggttgaatatctcttctctatcttcacacaccctcaccctaaaaatgttaccctaataatcccttatataatgaaaaaattatggcaaacaaatacatgtatagaataacctaaaacaccccttaaataaaaattagactccacataactcaacaatcgcttggactaatccattattgaatggctcttgtagcggaaacacatcctcattccttaagtgagaagtccaactgaagttgtatacaactttagtttctctattgtgattgtcttcattagcatatcaattggattttgatacctcttaatcttctcaagagccaattttccatcctgcaagactgattgtaggtagtaatatcaaacttgtatatgttttgtcctggcatgatacaatcttttgctaaatgaatagcactgtgactatcataatacaaaatgtttttcctgttctggcctaagtcgtctaagaaattatgtaaccataccaactccttggtagcttctgtcatagcaacatattttgcctcagtagtatagagagcaacaatattttgcaaccttgagacccaactgactgttgtaccactaatcgtgtatgcatacccagtagtgatcttcctgctgtcactatcactagccattttagcatcaacatagccttgtagatccaagtcttatttctttaaatataggattgaatttatagtacctcgtaaatacctaaggattcattttactgcctcccaatgttattttcctggattgctcatatatctacttacaactcccactgcatgtgttatattaggtttggtatgtatcatggcatatataagactaccaatagtaaaatcataaggtaccttggctatgtaggctctctatgttaagggtgactactctttggatagtctaaagtgaccagccaaaggagtgttcacagctttgcttcatccatattgaatctgataagcactttgttcagatattcttcttgcgatagctttaggaggctgtgcatcttgtccctagttgtcctaatccccaggattcgttttgtaggtcttaggtcttccattgcaaactcctttgacaactccattttcagcttattaatttcttgtatgcaagcccccctacaatcaacatttcatcaacatataacaataggataataaaggagttgtcaaatttcttaacagaacaacaatgatctgattgacaccacaagaatctgttattactcatgaacttatcaaacttcttataccatcgtcttgaagccttttttagaccatgcagactcttctaaagtttgcactccttgccatatactttaaaaccctgtggttgttgtatataaatttcttcctctaagtcaccatggagaaaggttgttttttcatctaattgttctagatgcaagtcatcttttgccactagtctaagcactcttttgatggtggtcaattttcctactggggagaaaattttagtataatcaatttcttccttttgttgaaaccctttacaatcaatcttgctttataccacttactctcatcatgttcgtcttttacccgggaaacccatttgctattcaatgcgttcttcttttgcccaggaaacccatttgttattcaatgcgttcttcttttacttgggaaacccatttgttattcaatgtgttcttcttttacttgggaaacccatttgttattcaatgccttttcaccttttggtagctcggtgaattgccatgtctaattagacaataaggagtccatctcatctttcatggttaggtcctactcaactgactcatcaacttacatttcttcctcataactttatggttcacctctattagtcaacaaaatgtagtataatgaagtggagtatctctgtggttgtctgatattcttggaagatctcttgagttcaatcataggagtatgtgggtccacctctggagttacattttcttgaccatctcgatcacttttctactactcattcattggaaaatcttttaattgaactatttctgacttttaacaattgaacagcttaggatctgaatcttgatgctaaacaatcagagtattaacttaaccttcatttaacttgaccctaagaaaggttagtacttgtgatataaaagactttaggcccattactttggtattgtcatcatggtggatctttctgggctccattgcattgtgcttcatgagactattttcttctcccagaagcctttgttcaggtttagactaattcgtgtgatggtaaacacatttatagatgagaggtggagattgaggagggagtggtcctcaaaatggattttaaaaaggtttgtgattatgttaactgggttttcttggatcaaatcttctgcaagggttttggatgtaggaaccctgttggaaaaggtggatactgggattatctactacttttgcagtgcttgtgaatgagagtgccaaagttggtttggtgcatctggaggactttgccaaggagagcttccattaccctttttcactcttgtggtagatattgcctgcaggactatattctagtggagggttttcagtttggtagagataggcaagactggctcaactttagtttgcatatcaagaaaatcaacagtttgtcagctccttttttgtcttgtctaagcgtcttcctctctatgttgcctatcctgatgtgagatgttgaactttggcccaacaattcattcttcttttaatcttcttaccaagcccgtcctttctaagtcaattatcctttgtccttctcaaggtaaactaatttggaattcaaaaaatactgtaaaacttggatcctttacttatgtgatggctaataaaaggtaaataaggatgatctgctttagctgaggaggaggaatctgcagaccatccttatcctccattatgcccttgtcttggagttgtggtaaaggcttttttcaattgcagggatagccaagatggcttcctgaggtgtttatgttatgatggttatcttcttttagggttctgataggagcccaaggagggttcagtgtgtgttagtatgggatactatcataatgaccttgtagatagctggaaaggaatggcagctgctctcttatctctctggatataacataccacacttgcatgttccataagtcaaccttctttaatttattacataagtagatttttcaggaagttaaattcctggagctattcaaggaattttatgaccaaagatcttttgctaagagcttgaatacaacgtttctggttcttattccaaagaaaggaggcgccgaggatttgggtgactttcggccgatcagcctgttagggggattgtacaagcttttggctaaggtgttggcaaataggctgaagatggtcctaggaagggtggtttctttggaccaaaatgcgtttgtgaaggggagacaaatattggacgcttcgcttatagctaacgaggtgattgatacttggcaaaaacgtaaggagaaagggttgatttgtaaactggatattgaaaaagcctatgacagcataaattgggattttcttatgaagattctgcgtaaattgggctttgggtctaggtggatggagtggatttggtggtgcatttcaactgccaaattcttagttcttgttaatggagtgccagcaggcttcttttcaagcaccaaggggttgcgtcagggagaccctctttctccttacctttttatcttgggtatggaagtgcttagtgcacttttaagaagggctgctgtcgggggtttcttttcaggctgcagattttggggaaggggtaggatggagttaaatgtctcccatttgctttttgcggatgacacaattattttttgtgaagcaaggaaagaaaacatgacttttctaagctggattctggcttggttcgaggctgcgtctgggttaaggataaatctagccaaaagtgagttaattccagttggcgaggtggaagagattgaggagatggccgtggagctaggttgtagggtggggtctttgcccaatgtgtatttggggctgccgttaggggcttcccataaggcttcttcgatgtgggatggggtggaggagaaaatgaggagaagattagccttgtggaaaaggcaatatatttccaaaggcgggagggttaccctcattaagagcacgctggccagcatgccgatttaccaattgtccctctttcgaatgcccaagatggtggcaagaaggcttgaaaagcttcaaagagacttcctttggggagggggaagcttggaaaggaaagttcacttaattaattgggaggtggtgtgtgctcaaaaggagaaggggggtcttggcattaggaggattgcccttttgaataaggttttgctgggaaaatggttatggaggtttgcctttgaaaaggataagctttggaagaaggtgattatggagaagtttggtcaagagggccttggttggaggactaatgaggctcgtgggacgtttggagtgggagtttggaaggagattctaaaggaggttgattggtgttgggataacatagagttcaaggtgggtaaagggaccaaagttaggttctggactgaccattggtgtggcaatgcagcgctgtctcaaattttcccccttttattcgaattggcagctcataggaatgcaacggttaacgaagtctgggacccgagttttggccaaggaaattggaacatcagtttctctggagactttaatgattgggaggtggatgcggtaggtagtttgttgtccatgctaagggactacaaaatttcttcagaggaggattcagttttctggaaaggtgggggaagtggcatctttagggttaaggaggcttacaatctgcttgttgcttcaaatgatattgtatttccgaaaaagtgcatttgggtggacaaggtcccaactaaagttgtgttttttgcttgggaggccacgtgggggaaggtcctaaccttggataggcttcaaaaaagggggtgacagttccctaaccgatgttttttgtgtgggtgtgaagaagaaactgtaaatcacattcttctacattgtacagtggtccgggttctttgggagattgtcctagtcttgtttggcattcagtgggtgtttccagaaacgattaaagatatgcttttcagttggaggggttcttttgtggggaaaaaaaggaaaaagatttggacttccatcccgttgtgtattttttggacggtttggaaggaaaggaatagattagcttttagggggggattcttatctatacagaaacttaaaaattcttttgtatgtaatctgtggagttgggctagggtgtatattggagaggagtcctcttcactcttaggttttctagagtggctagcgtccacttgagggtaggtgtggttgtgggcttcttctagtttttgggtttggctgctttgtatacgtcctgtatgctgtgtggctttttgcctttttaatctaatatctgcttacttatcaaaaaaaaaaattatcataatggtttacaatacaggtaggtggctttgatgaaggggtgggattcatttctaaaacactgtgtcaacatcctggaatatcctttttttgtttccaatattatataatattcttttatccttagacttgaacaatattttacagcttgctaattatgttgctgagatccatattctgcactcaattcattcaatgccattgggtggctagtactaatgcctgttgtttttgttttattttggtcctttttcccctcaggtttggtacagcaacccaattttaaaagattggtt

SEQ ID NO: 12900 - DNA, 1841 bp, Vitis vinifera
  Intron number 3 from transcript GSVIVT01005827001 (locus G SVIVG01005827001) derived from phytozome v7.0 (chr-ID chr1 6_random; pos 316481 to 318321)
tgtgtgcaaggtgaaatacggtgcttgtgttcgatgtagtaatggaacatgcagaacttctttccatcccatgtgtgcgagggaagcaagacacaggatggagatttggggaaaatttggttgtgataatcttgagctacgggccttttgtttaaagcactcaaaagtccaggatgttagcagcacccaacagttaggagattttttttttttttttttgcagctgttggtagcaacatttcatgtcacccaccaatgacatcaattaagaaaccacacaagttgaagattgctctcagaaatggagataaaattgttgttcatgtggaaacacctgataacaattccaatagagtgatggtgaatttcaaggaacaagattgccaaataccaaataaaatgctgagtttgtattaggttgtactgatgcacagaaactcattggtatgcgtatgctagagctaattaacagtgaaggtgttaacccatctaactccataaatcttgcactgatcccaaagaagttaattgaccagggaaaatttagtgtgaaagatgtagcactaaatattagagtttgacctaattcattgctcgcaacacttgctgatgatcacttggtccctaactttcaatgcaaaatagtgaaatgaattaaggatcatgcttacatgggtaccttccaaaaaaaatttgaaagtcaaaatagaatctgcaatttcatcaaagaatgaaatttgagaaattgatggctctgatgttgtgcttgtctctgagattaatattccagaactaatttctatgaagcaattcccccatggagaagaaccaaaagcaacattaggattttgaaggataacataataatatgcttatttgaagtaacatttagtgacaatggaacagtaatggatgaggtaaacacagatcaactttttggtgaaggacttgaaaattcaagtaaatgatcttttcctaatgccattgaaaagccttttttaccaagactgttgggtttcaagattctttggaaatgaattcacctaaatttgaaagtagtgaaccttcaaactacagtccttctaaaagtggtcgaattgaggaggatggtgctgaggataataattagtgaaattgaacaaggaaaatcttgtaagttcagttgtggatctagttgctactaatatgataaacaaagaaacagtatttggttcttacattcacccacttatctaccagaaactgagggaaacatagagtgggttgcttttaaataacacaatttgtaaggttgaaggttcaagagggctaaaaatttctcctatgaaaacatcttcttatgctagagtttcttgcaatcaccaaagtcaacattcaacatgcactaaaatgatttgtaaatctaatggagaaaatttagagcagttggttaaggctaggaatatagggtctttagaactttctccagaagacgaagttgtagggaacttatttattttcaaaataagcttcttggcaatgtcgttgcaagaaagaaccttagtgatgatttaatttgtaaagttatgaaaagcctacttcagaagattgaaatggcaaggaagcataagtaggactttatgcttgttaagcagtatctttgtgagattaaagaagcaaaggagtaggaaaggaaggaaatgaggcacaaagaagcaccaactgtacttgctactgctgttgctgttgcttcttctaggatttcatcatttaggaaagatgccattgatgaaccttctcaccaggagaatctgttgaaggtgaacacttctagtggaggaactgggctttcctcttagcta

SEQ ID NO: 12901 - DNA, 5398 bp, Vitis vinifera
  Intron number 1 from transcript GSVIVT01036578001 (locus G SVIVG01036578001) derived from phytozome v7.0 (chr-ID chr1 3; pos 18494728 to 18500125)
ccaaatccaggtaatttctctcgtaagatcattctttttttgaatcaatctctgttgaaatggctaagcttcctttcaagagtttgctttgtttgatgcaaaaacgtttcctcacaacatctccaaccctgtatatatcttcgttgtcttcttcatcttcaacattattatcaccatcgtacacagcccaatttcttgtgaaatcttgtgggcttcccttggactctgccatttccatctctcagaagctcaaccttgatgaaaacaaaccgcaaaaacatgcgtctgtgctcgaattgctcaaatctcatggattctccaatacccatattgtaaaacttgtgtcaaggtatcccctgatcctccaatcccaagtggataagctcaagcttaaagtagagtatctccatgacaatggcttagtgggtccggtccttcatgagcttattgtgtctaatccgaatattttgaggcgaagcttggataaacatataaaaccgtcactcgattttctcaaggagttccttgaaaccaatgagaaaattgtaacagctataaagcgcggatcatggttgttaagcttcgatctgaagggaattttgaagccaaacacttttcttttgataaaagaaggggtccctcgtaaaagaatatcgcaattgattacattacaaccgagggctataatgcaaaatgttgataggatgttgtatgccacagaaagggccagaagtttggatatcaaaccaaccgattctacatacgtaactgctattccagtgattctctcgatgaccgaatcaacttggaaaaggaaagtggaactgtataagaagtttggtttgaccgaagttgagattttcaaagctatcaagcgtcaaccatattttatggcttgttcagaggagaaaatcaagagtttaatgaatttttatacctacacaatgaagttgaagccatctgcaatagctacttatcctaggcttcttttgtattcatttgatgcaaggatacaaccaaggtttaatgttttgaacatcttggcttcaaagaagctgcttaagacacacaaaaagattgcatggttgctcacacaaagcgaggctaagttcttgaccaattatgtgaacaagtacttggaccaagttccagatttaatggaactatatcgtggggtcaagacaattgatctctgatgaaattgaagtaagttgtgttttatggcacagcattttaaaagtataagacacacgtgctcaagacacacaaacacacacacacacacacacacacacatatatatatatgcttttaatttgattttaatcattggccttgtcatcttctgacagacatgctcaagacacacacatatatgcttttaatttgattttaatcattgtccttgttatcttctgattgttttgaagagtggtttcatgaagtcatttgtggttggtggttaatcattatcacattagtgctagaccattgcattggtttccatggtgttttcattgatgtttcaatttgacatagtgcaagtaaatttcaaaagtagtcattgctagaatgatagacaaaccaatagctaaacaggaaggcatggccagctttcaagcacctgtgcattaaaaaatttcctaataaatatttttccagtcatgattattactgaagttttgttttgcattattgatgtgctatttgtttgattcttttattgcataaaaccaattaacaatatcttccataaaaccaattaaagatatccttagaaatagaacaaactatttgatatggtaagtacagctcatgagccaaatgggtttgcagtttgtttgtactataatgaagtctttgtagtttttatatttattatttacttcaataaccaatatgcagaagcggaattcaattatctgattaaaggggggaagtgagtagatattagaatttttagtttaggggccttgacagggatatgcaacccttaaatttggatgcgtagatgggaaacaatttttcaggtggtctgctatttgaaatatactaagttaattataattttgttttgctttgatgatatggccttactgttgtaaggtgcattaagcatccctgtgtaatcaaaactttgtcctattttcttccatcttgggcttcaacgattgtcctagtgcaaactgtttgcttgtactggcattctaagttttattttcgatgttgttggtaactttattgagctaaggaccaggcctctggaagaagtgaggtggattaggtatggttttaatgtggatggatagatgctcaatcgagggttttggtagtccaaaagagcttatcagttaatgcttttgtttaaataatattgtgaaggtttacaagaaggacaggaaagagttgtcatgttagggtatcatctttggtggagctttttttagggaatcgaagaagatgatgccattatttgatttgtactcttactgaggtacttgttgttattcgatgttgttattaccagtcatctttcactgctcaacaatcacaatgccattggttgctagttgccatgggcctagccatatgtttggctggagtcttctccagctaatgatgccctgatcccaaagtggtaggagtattttctaggtaagtgcttctatccatatggagaattttctgttacctagtagaacaattttactttgaagcactgcatatatggattcaacctctctggtttccattccaggctttaaatgtgtgagagcaaggtcaattgattagtcctcatagacttttagaatctttgacagtttcacccttcctattcctatcaaaaatttcaaattaggctcagggtatagtttcaactttcttttcttcagtgctactactagtggtgttccttgtacttggaactcttgggtactactgaaggtgggctttttgcttgggaggctacttgggaaaaggttttgaccttggatcatttaaagaggagagggtggtctttggcaaagaaatgtttcctttgtcatttagaggaagaatccattgaccatatccatattcactatgtaatgacaagggtttaatggcatttactattttccttatttggcgtgtcttaggtgcttccctctttggtcatagagatgcttttgggatgacatggcttgtttatgagtaaaaatggaaaaaggccccgcatgttgctcccatatgcttgttttggacaatttggaagaaaagaaacagtagatagtttgaaaatgaggagcattctgatcaagagttgaaacacctttttttctattatctattggtttggtctaagttgtatatagtttttggtcccctttctctagtagattttgttgcccctcttttcttgtggagctgtttttaggcatttgttgtatatttcctatgtactttgtggcactttgttggtgtttcttgtttagaatattctcttgctttactcataaaaaataatatcaaaatgtcattttcctattaaataacgatcatctaaaatataaaattcttcttgttctatttaaaggttataatgcattttgactaaaaggatttgaagttgtttcattgtctaaattctaaagctaaatttataatacctttgttactcatgttatgtttggttactaggataagatgtggatatcctaggatatcatttctagtgagatatgatattctattatattatacctatcaaaaacaatatatatttttttatattatattcagtggatgttatgcttatatttggttcgtaaaaaaataaaaatataatggataccctagtgtttaatgttagatgtttatttaaaataaaaattatattacattcaaatatttgcttttgaaaaaaatatgaaatatatctcatgtttattattatttggaaattgttctataattttgaattaagtaattttttatttatttgttaccaatatccatgattaaaatatttaaaatttatataaaaaaaaaagtgttatattatattattcaatatataaaaataatttttatatattaaatattatttaatataaattaaatagtacatatactattaatactatttcataatatttttatgcatatttttttagttctcttttttaactacaaagttatttttattaatttagtttttgttttgcaaaataaatattataaaaaaaatgaaaaaatttaatgagaagaataattttatgacacatgagatatatatgtcttattatcttatcttactattaacatatcttatataaagaggacataaaaaagagttaaatcaaggtgttccaccacttatcttatcctatgtttttttgagcataagatatgataagtgataagatagcccattcaatttcatcaccaaccaaacatagccttgggaattttattgaaggttaattctttcaaacataaaggtgcggtctaaaactgaaataagactaaatgtgaccaatgacacaggtgcagtttgaaactaaaataagacatgatgtggtcttgagataccaaacccaagttatttggagagccctgctttttgtggtgctttagattatctggaaagatgaaaccacgagattgtttggcatgcctaagcttggtgtttatttgtttgttcaaagtttctaaatgcagaggtaacttgatgcaaatctctggttttatcgaatggggggtttatctaggaaactctgttttaatggaaacctcagcaactgctttctcctttaaatcttgagtttttctggttgtctatatccaccttatgggctgttatccttccaggctttttttctccccctggtttggaatacaggatgatattatattccctgtttttttcggcctaaattaatctgtgtggattattaaatttggaaggccggaattcctgatgaagtgatcttggttagtggcttattagaagttaaataccaacacaaataatcaagaatcagaaatatactactaccaaatacactctttccctgaattgttgtgtgattgatgtttaaatggaagtcatatactgattctggctgattcatgcccccctgactcctgagtcactctgaagtgaaattcttctttccatggctaattggattgctctttgttgagtacaccaacttatgttaaaagtataggccatctctgcagggttcaatttcaaatatattttggtggtttcttgatttgtagacatgaaacattcatagcccgataatttctttggttactctattcattccaaatgtgtcaatctagatatccagagatctgatattgctgcaatattaccctttttcagccgtttactgttctggtt

SEQ ID NO: 12902 - DNA, 6006 bp, Vitis vinifera
  Intron number 11 from transcript GSVIVT01024449001 (locus GSVIVG01024449001) derived from phytozome v7.0 (chr-ID chr 16; pos 2715053 to 2721058 reverse strand)
gtggctggtgagttcatttctggtcaggccatttaccgactttcaatcttctaatgtgactttaatattgaatccacgaatctctctcctcattcagaggcatcaattccaagtaccaacccaattgatatttgtattcctcctcctttcactgactgtgacttctgcactgttctccatttctataagcctacaataccctacaaaagaacctgaaaaataaaaggcttctgtcattgtttgatcctcctcccctcttgggaaaatgttagacacctgtcttttctctctctgcacccactttatttttcttttttcaaatataaaacatgtgtgaaatgacataaatatcattttcttcatcttcttcactacatccatccatcaaaccctaatcttgatgcgaagttttctgatgggcaaaagagcaatagataatattaaagagccaaaaaaggctacatcaagtacacaggaagtatacatgtgtgcaccaaagaaaaaaaaaaggtttattacactttaccccccaacctataccgtgttttgcatattgccctctcaagttcaaatcgagcaatataccttccatgtttaatagttacatgcaatgtacattttttgagtaatggtgttacatttttggatggaaggcgcatgtgctctccatatgatcgagggcgaaagggtcatttcattttaaaacccctaaaaccacctagtcctcctccttcgatcgtcagttggaattttcctagaattccaacttgataacctagaattccgactaatagaattacaaatcttatggtgattggaaccaaactcaaaaaattttacaaaaaaataacaatattattaaaaaatcacttcaactaattcaaatagtcttagattcaaaatttaaaaaggaaaaaaaaatcgattgattttctcactaaccaaagtgaaaaaacccatgacacatgtatacaacatagaggaaagaaaaactgatgatatagagaaaagagtacaaaaggctcgacttgctgctagtgctgtgctcctcctccatcaccttccgctgctattgttgttagggttagggttgagtttcatttttatgttatgcttctgttttataaggtttcgttttgatgtttcagaaagttgggggaaattttggagaaatttggggaaaaaaatcaagctttttgaaaaaactcaaatcaagaatttggaaatgctagcataaatatcatcaagctttttgaaaaaacccatgcttttataacatggaattttcagttgaaaaggggagaagagagaaaaagaagaagaagaagaggaaaaggaaagtttagaaaaatactacctcatcgccattttcttgcaattttcattctgcaatatgcttccgctacaatttggggattcaatagcaacaaggaaggaagaacgaaggaagaggagggttgagttagaattttgaggttttggggaggaagaacaaacgaaggaagctcaaatgacctttttgccctcggtcacatggagagcacatgcgctttctgtccaaaattgtaacactgttactcaaaaaatgtacattacatgtaattataaagcatgaagggtacattgctcgattttgaactcgatggggcaatgtgcaaaacatggtataggctaggggagtaaagtgtaataaaccaaaaaaaaaaaaaacacacacacacacacacacaagaacgctctattatttggcaatctaaccaatcaataaaatcaatcatagaaaagaactcttgccttaaaccccctttgatcaattctacaaagttgtatggaaaagagattttagctcttgatctgaaggctcaacattatcaaaagtcaaaggggtgtccccacgccaaatgtccttccaaaatcttaaccttcttccattgcccaaaacataggaaatcttacttttgaaagcatcccatcctttccttataaccttccacaatactacaccataaccctcccctcacctccaaagagcaccaacgcccttcttctatcccatacttatcaatgattactttcttccacaagggctccccttttgacatgaacctccaactccatttgcctaatagagccttgttcaaagtagagcgatttcgaatgcctagcctctttccacccttaacttacaaactttgtgccaactcactaagtgaggcttattttcaagagatccctctcaacaaataaagtccttttgaagtttttccaatctacaacacacacttcttgaaataacagaaatggacatgaaataaatggctaggctagacaaggtacttttgataagacttaagcacctcccaccccttggacaagtattgtctcttccaccttgcaagctttctttgtattcactcttccaccaagtcccacactattgtcaatttaaaggtagcaccaaaaggaagcccaagatacttggaaggtaacgccctcaatttataccctagaatgtccaccaactcctctattataagaacccttttaactgaaattagctcacttttatcaaggttgatcttaagccttgaaattgcttcaaactacattaagacccaatgataatgcaatagttggtccttagaagtctcacaaaaaatcaatgtgtcatccgcaaacaaaagatgagacacccaagagagggagtgaatagggtgtcggttaagtttaaatagtttttaccaaaatggatgcaaattacaataaatgcaaatttgagtaaataaagagaggtaagacatgagaagtgcaaacgatttatagtgggtcaatgcaacttggtctacgttcacacttctcaagcttcaattccaagcccattctactaaagtcttaaacttgtacacttagattttcaactccaatagacctttaacgccaatcctcaagtgataccttacacttgatacaaaccctcaagtgatacctcacacttgaatactttctcatagggtttgcaagagatatgaatacgaaaactttcctagtttacaagtttgaacttaatagtacaatggaaactaggattgaagatgcactaaataaagatgcaaagttcttggacaatgtgcagtcaaaggcactcttaaaggcttaataaataaatgaccaatgatttggaagaattttattgatcgattgattttttgtcatttatcgcattaaaacacagttcataacctaattcactattttagagtagtttgtacccaatcaaaaatgaatttagtacaaacaactttagtatagtaatttttaggtgttgtctactaggatggattattctcggtgattaaggcttgaatgagggaaaagaaatggttgtgataaagtgaaattaatgatgaaaaatcaaaataacaatgatttctaattgagaagaagaataaaatgtaaaacaagaaaaaattaataggaaaagaaattctcggggttaggattttctagaaaacaatttctatggtgaatagatgttgagatctatttttcatcaagttagattaaaaacttaaattctcatttaatttgattttatatttaactttaagtctagacctaatttctcttcaaattaggttatttaatccaagatatcaatttaaactatatattcaattcatcttaaatcatcttccaatgattcatacaatgcaaatatttgatcttatcaaatttagctttaaaaatttaatgaatctacctcgtttgcaatttaatagtcattcaagataatttgcagagaaaaatccccaaattttaattaatcaatcaattagatcaaattacctttgcaattaaagctcaattctaaaattcaccatagatcttgcctctagatcttctttcctttgagaaaaacgagatttagtcacttatgcttggagatttggtctcacaaggcatgtttggctagtgagaaaatgaaggaaaatagagaattctatcaagagagagaacctagaaaattccacaatcaaaagtgtcaaaaaagctttccaatgaaatattcctatttatatgccaaggtcaagtggacacttggcatcatctaagaggtcttcaggaaccttctcaattcaataatctggagtttagcagcaaaatcaccatttcacgtgagtttgggtcatttcacacgaagactttcattttcgcacagtcgtgcgaaatcagtggagcaacagtagcaacaacaaggagctttctggaccatttcacatgttcatgcgaaatcaatttaaacatcctccttagcctgcagcctaaattcctcttttggtctaattcgcacaaatcatgtaaaaatttttcatgatcatgcaaacgtgcaacatttggtttttgagctcctctttatcatttattccattttcttcttttgactctacattaactatctccaaatcccgatccaaactaattacattgcttcttcctcatcatccacattatttaccctcttcaattccatttatttcttttgttactcaatgcatcaaaatcaccttaaaatgaccccaaaacttcacaaaaatcattagtatctcttgtgaggccaataatgtattaattgggcatgttaagcataattactactcaaaatgtatggaatttatgagaattattatttaaaatgtgttctttttgagtagtaatcacctatctacaataaatgaagtattggagccttacacaagtgtcactagttgttgggggtacaaaaggtacaactggtgacctttggaggcagaaacctcgactggtggtcattaccaagtttggagctcaaatccccttaactagttcaccccacggggttactagttggccttttgacttgatttttcaagattgtgtgaaaaacttcattttttagctcaaaaacactgcagaaaagccagttaaacaaaactccttatgattttgaaaaccttttagatatgaattacctaattttaatgtagttttgatttgaaagatacttcatacaatttgttaaaagatttaaaacaatttgattgaacttcgaagagttttgttgacttaaaatgatttcttgcattcctagcttagtgcaccccgattttacatgaattttttattgagttgcatagcttcttttttattcatccgggtgatctttttctgttagttaaaattaaacgttaaatccaaactttattttattatgatcaaaacttaagttcaaccaaaccttgggctaacacctaacccttccctttcccctcctctcattttcatttttatagatttttccttccctttattttcattttcatattcataaatcttgattgttttttgtgttaaaaattggtttgaaattgatagtgcttgaatagatgatgaaaagaatgaaaatgagagaaaaaaatagaaaaacagaaagggaaaaaaaaaaaaactaacgaatccaaaatccaaggccaactcttgggcggggttaccctccataaattcaaaagagaaaaaaaatgaaagttgaagaagagaaggagaaacaaaaggaggggagtggaggaatgggtaagggtaagggtaagggtaagggtaaggataagggttaggattaggttagggttatggtgaagatgaagaccaagagggtattttgcgatttcacatgagttctataattttcttttagaaaaaggcaggtgcagatagagaaaacgcaagtgtatttaccaattccttcgccctagttttgcagcattctttattcctattttagcccttgtgggtgatttcctcacctttggactggcaaccaccaccatctgcagcctaaatggtccaacttggtaccgttttgtttcattcatcgcttgacaagcttgaggattagaagtaatgaggattgtagaatttgaaacaactacttacttccattgctttgcaggggaattccttttgtagctgttg

SEQ ID NO: 12903 - DNA, 4084 bp, Vitis vinifera
  Intron number 14 from transcript GSVIVT01013491001 (locus GSVIVG01013491001) derived from phytozome v7.0 (chr-ID chr 13_random; pos 1698537 to 1702620 reverse strand)
ggtcctttctttaagaagataattctatctttcaggttggttttgggcattatacttattcatagtttgtataattactggacttgcaatgttgtcttgatcattacctgcctattcccacaatcagtggttttttaaaaagttaatgcatattgtggggtgattatgatatggaacataaccctatggtagcagtttccttttaatcagtagaaaagttaatattttcatttaaatatctaatggatactttggaggttccatttgtttagcttttgtttgtgggaggattcctcatccttctattgtattaaatcctaatttaatatattacattgttgtttctcatccaaagaaaaaaaaaattataatggatacttttaaatgctagaactggtcttcaaaaagtggaaactcataaatagagaaagaacaaatggaaaagaaggatgtatgattttgggaaacctgttaaccccaatattaatagctcataataatacttaacttttattcatttgggaacactgtcatattattcagcaatgtgttggtgcccttatttatggactctggaaaatttgacaggtaaatgaggaacgtttgaaatacaaaatgactgattgacaatgaaataggactcaaatttctccaagatagaatgaaagattgacagtgaaataggactcgaatgcttataaagaaaagaaaagaaaagaaaactccttgctaattggtgctacttacatggatggagtgaagagacaagcaatcgtcctttatggcatagaggttgtggaaactgttatcttccatcttggatatttttttgggtgctgctgtattcagtttaatagtttctgatatgttggcaggtgcttttgttgggaaattgataagggaagtgtgggatttggctctgatacactttggttgaaaaaatgaaccacagagggataggaactgaaatttttttgaaggggtgttaccctctgattagctttgaagaccattgtctaggtttatgttattttggtctaaaaagtcttttagggaggacttctcatccttctcatgtttttctattttaatacaattgttcgtttctgattaaaaaaaaggaaaaaaaaaaagagtagtctcttagggagggttgcttgtcctttctctatttcattgactgggtgggacttggttagtggctgttggtttgggccttgatgttacccctttgacttcttttctttcaatgtgttatgattgttacttcttgtgtgccagggctttgtcccttttataatagttatgctatatctatacatatatgtgcatatatgtatttgcatgtgtatgtatatcatattatatatatatatatatatatatatttgcttattaagaaaaataaggacaatattccttttgcaccatattatatatttttgtgaaataattaaatcaatgctattcatgattttaaaatttaattcatcatccttttcctatggaacatgaaaattgaatacattctcaatgtgtttatcactatgatcttgtttgtttggttttcttatgtattgcaatctaaaccattctttcttgatgtcattttgttcatgtgatggtttggagctgatgaatcatattttttcctagaatttttctggggcatgttgaaaatctcgagggagtttgattaggaaacaaaattaaaggaggaatgagcagaagtggtaattgggaaattggttaaaattttgagcaagaagtgggaggtcctagctattgattgctatttgctccaaccatatttttgcttaatctagatttgtgattttaattgttaaattaatcttggtcatgggaatcgtaaattttttgtaattaatggttaactgaaaaaactatttttatgataatttataattcttggccaggtgtttaaacttaaactagagttatacatttgtgatcctggttgtagaaattgataaactactttgatgttatggaaaggataagaatttgcttgaaaccaaaatagatgctggattatctttgtctgcttgaggttgagttgtattgcacagaaaggtagttaaatatttataaaaatatatgctggaagatttcaaataaatgttagagaaaaaaaaaaaaaaaaagtgtctcagaattataaaaatgatcctctgccttggtaggattttcatgatcatcaacttatagaaaactaaatcagtttgtttatatgaatattcaaactcagtctaaagttattgtaggtcgatggaccttatttataaactaagaaaattttgtagataagtaagaaactttaaaaaagaaaagtgaagactaaccaatatcatgattgtagagaacctaaatttcccaaaagtagatactttcctgatatacctagtttgctggtagggtaacccagaaaagactcctaattgaattattgtaaagaataagaaaataaaaaaaatataactggattcctgatttatgatcactagttgattggcttaattttcttgttaggtaattctgggtattgtcttctaatttaattgtgtgaattcaactagctaagcatagcctttttttagctctgttgtttcttgataatatggttttggctttggcttctcagcttcttttcctcttcctcttttctttttgaaaagcatctttgagttttgtttccaaagggaaagtgcattgggaagtttattgttccttcttaagttgggcattcacattgttagtgctaataaaagagttagtaccgtaaacctcatataggttggtttatgggagcattcaaatttcttaatcctgatttctgatcattttggattttccgtaagttgcaaaacagcagatcactttttcgtcactgtgctgtaacttgccttttgggatgctcagtgtttttagaatgttggaggagacaaatcactttatgtaggctcgcttgctattctctctggtttggctggagagtaattcaaggattttcaaggatgagtggtggccagtgagtcttatgtgacactattgagtacctttctttcttttaagggttggtttctattgagtttaggagtatcactgttgacctgcttgtgttagattagagagaggcatgctgtagtagtgctcacagtaggatgcaggttgggtttattacagtttgggatgcttcaccttcaggttatctcaaattaaatttagatggatgtgcagtgaggaatttaggctaaatgggaattggaagcatcttccaagatcacaagggtagcatgatgaaggccaggtagttcagttttggaacatggaggctgtaaccttatccttgatggaggcaaatctagaggaattactaatttctgaatggaaggggttcaactgttgtcatcttgtgaattgctcaaggaaagaggggagcctgaaaatgagatgtggattaggtagattgtagacctttgtgaagaaatatgctgtggccttttggttcttaggtctactgacaaggcagagtatattagctacaagaggtgcttgatggtggaaactcttgatactgatttcctacttcattgacgctgccaaattgattatgtttgtgatccttatttatttatttgctgaatttatgaagtctttggcacactcctcgtttgggcagggaatggcatggagcattttctttaggggtaggagacacaaggcccatcaatacatgccttgttaacttccctatgctgtatgtcactagacaatgaaacaatacaaattgaaatgatccaaccgatcttgataataggtacactaacaaaactattgagtgagttaaaaagagtaaatatgttcctgccacttagttttagtgctaatttgtttatgtttgtgccagttgtttctatgacagcatatgtatctacttaataacatttttatgtatatctggtacacaatatttgtgtccggtgatgcaaaattatttgcttattttgagagatgttccattttgtcagggagtgttgcactttccagcattcttgtcaaagca

SEQ ID NO: 12904 - DNA, 3882 bp, Vitis vinifera
  Intron number 5 from transcript GSVIVT01009286001 (locus G SVIVG01009286001) derived from phytozome v7.0 (chr-ID chr1 8; pos 6988331 to 6992212)
caagagcaaaaccatatacagaagctgaaattaaggtactaccttaaatttatatcttatatttcacatcactatttgagcaatgaaaatatagttgttttcttcttttttgttttcctgatataattgtcaagtttccatttaattttcaattaagaaccgtcttttatagctgttggtactattgctgacatactagctttcaaagactgtgcaaggcctacatattggtcttgggcctgcaacctagatgacttgcatcctcctaactcttatataaggcccatatttgggtaagtgtgaatcttttccagcactcaggaatgtactcatttcacttagcatgtttatcaagattctgagcctcaccaactttttcaaccacccattttctctggagccactctgttctccctcaagttgagagaactcctaaccaggtttctaacctatacagttatctaccataagcaaacatcaacatgacacaccttgttttagttggtgtttgctgtaaaatgatttgtagctggttgattatgagggcctaatagtgaatttgtttccaaaagatatagtactatttcttgggaagtaaaagagataaattccaagttggaactgtggagagataccttagaatctaaagcatttagctagttggaacttgggattagtgggaggaggaacttttttatttggttgggtatactaagaaaatatattaaaagtgcttggaaaaggcatgcaaagtacacacaaagtatacaaaaaagcaccaaaaggcaagcaaagggaaaagagaaacaacaaaccacagcctgatacaaaaaccaagccctaaaaatctagaaagaaaaaaaaaacagagagttcccatacaatgttcttgcaggtaaaccaagtctgctttctgctatctaatcaaggccttcatgctgccctaaattcaagcatcgattacacacttcaacaatttccactctccctagccactacctaagacaaccagggattgaaaaatcgggaaatatcgccgatatttcagagaaatatcggatatcgggcggcaccgaaacgataatcgtcaccgattatcgatcgacggaaaaatcggcaaaattgcggatatatcggcgaaatatcggtgcagcaccgatttatcggagaaaaatcactagtggatctgacgcgcggagcaaccggaggagaatttaaaaaaatcgccgaaaatatcgctgatatttcggtatttttaccaatttttcggaaaatttcccgatatttcctaccagtccagcccgcgcataggatacaaaatctggctcaaaaatcgtggatttagggtttgtgaaatttaaatccaatggcacaacagcaaagagacccttaaaacagatccagaaaacacagggagcaaaagaaaagcaaattttttggttttctttgggggttttgaatggattttctcggaaatcaaacgaggatgaattttctcggaaatcgaatgggggatggattttcttgggaatcaaacgagttgcaaaaaaacataatatcaacatgattagattagtacctgcgaggattgagagtggcagaggaagataggtcctttttaggaactctctcggctggagggcaacttcagaaaaggggaattctctcggctggagggcaacttcaaaagtggtggcccttttaatttttagttttagtagaggtaaaaaaaaaaaccaaatcatgagaacaattttcctctatccatataaataattataaattatcaaaatttattttgattattaaataaattaatattaataaaaaaaattgttactatatatttttaataaaattttaaaaattaaatctcaaataaaatatttatataaattaatttaattttcatttaaaatataataaaacatgttttaataaaagtatttaaaaaaaatttaaataaatattatcttcaacaaattgggtcatcttcatctaacaatataatgaaatcacatcgatctcttccttagtataaggactattgtaatatcatatatattatatttatgtataaattgtttttattcaataaaatcaaatattttttaactcaattctaactctatatactttcaaaattcatatatattatttttaaaattcaaatatcgaatctatcaatatatctttgtttacgatatttttcttcttaattatatatatatgtcaattacacttataaaataactttaaaatatgtatttttacttattttatcatttttgaagttttttcaagcattcctattaattttaaataattttcactctatcgatatttgtgaaaaaatatccaccgatatttctccgatatttccgatatatccgtaaaatcgaagtaccgatatatccgtaaaaaccgatatttcaatccttgaagacaactaccttcggcccccttgtaaattacaaaacaatctagcttctttaaacccctttcaagtttggagatacaatattcttcctcttcctatcttcccagcctcttacctcatctctagcctggacactcagaaatcaatttccacccactcctcatctaaggtcagggagaaagaggactgtgcccatagaattgatagtgaaatctaatgactattggttatataggccagaggactgtacccatagaactagagcatgatggatgatttggagaagtgcttataggttgttgagtagttgacaaataacgtaaaattggtgggtagattttatgggtggaccatggaccagccgtgttttatggtctcagatgttaagcaatcaagaaacaggcttctataaatgaagcatagctgaattagaagttgcaatggacaattaataaaacaacaaacaatagaatgaggaaaaaaatgcatttgtgagaagatagagttagcactagctgatgttgagatgaggagtcatttaggattttgagattttacataatgaagacaaatgacagttccagaggggagggtggtcgtagatcagctgctggtggttttaactactccgtcccatccaacaaaaattcagtaatctgatactagttgaaagccttataaggaaaggaggaagggcaaaagaaatctttacttatgctgtgagcagcattttgatgcccagaagatatttactaaaaaatgtatggctctaattataaatgggttggaaaaaaaaaggcccttatatagggactctagttcgaacttgggacagggatttgttgaggtgactgcagcttgaaaacatggtattgtatcatgaattactgtttcattcttccagagaacaatttaataacattttcaactgcagggtggttgcttccaccaatcaatgttccaactacatgagttgattccatgtatgcagcttttatgtcacacagatttctgacttctgtatgctattcccctgtgacaataaattgcagctcagaagtacatatttttcaaccctcaggataagactaggcatgctatttagtccgagatgttaccctcagctatgctttgagaattttagaacaaaaacaccttcatatttaggaagaaaatgaaggtattctatgataaaatgaacagaaatcttttcagaatacgtcactattcttcggaattgagtctgctaggtcaaaaattgtcaatattctatcaaggctttacttgtttctggttgtttatagtgctttctgtgattatgttaatcaaccagacatggttttccaaaattcttattgagggcttcctctaggtattcttcttttcgatttgagtgctttaagaaatctgtttcatcatgaatcatttctatgctatgcaga

SEQ ID NO: 12905 - DNA, 6675 bp, Vitis vinifera
  Intron number 2 from transcript GSVIVT01029007001 (locus G SVIVG01029007001) derived from phytozome v7.0 (chr-ID chr5 ; pos 10618245 to 10624919 reverse strand)
atgttatcaaacattaaaatgaaaacaaatgatcattccaacattccatttataagtgcatccaaatacaagaattgaaattatcaaatttatttttattcaagattaaatagaatggaaacaaagtgtttattctcatctcaattcccacacgccaaacatagcctaaggtttcgtttgatacatgaaaataggaatgaggataggatgaatcctaatcccatgtaagataagataaaggaatcaaaatcctagtgataatggaatttggtttccacaacaatgattttttattcctattcttattctaaaaacaacccaagcacattaactcattcctatgctttattctatggtttcaagcaaggcctaaatagagatactttaaaagttacatgatttgtacaatagtgtactctttttaactatattatatttgtcatcaaatattaaagaaaatggggtgagattttttttttaaataatgaatattttcatataatttttgtacgcattaattttataaaatttttattattttatatatatatatatatatatatatatatatatatatatatatatatattggaataatttgaggatgcatgaggaggctttgaaataaatgtcaaatgaagtactagtagtagtaatgaagtagtatatattattgaatatatattattgaatgcatgataaaaataaataaatattacattactataaagaattagaataaatattacattattattaagaattagaatgcgtactagtagtaggcgtagtaatatactactaatagtagtaatagtagtatactaatagtaggagcagtagtaatagcattatactactaatagtaattatagtaggacgcttagtagtagtagtagtagtgtaaagaattagaatgtgtagttagtggtagtaaatattacattactataaagaattagaatgtatactactagtagtagaaatagtatagtagtagtaatagtagtatgctattagtagtagtagtagtgtatattattgattgtataagaatgagacaagatttgcttcttttaacttaagccaatgatagagaggaaacgtggtagtagttgtagtagtttatatattgaatgcatgacaacaacaaataaacattacatcaatataaaaattgagacaatgtttgctttttctacataaagccaactatagaaaggaaattttctttggtcttttgaattttggataatacccagcaatcatgtaactaaatagtgtgaaatgtcatcatgctaatttccttgatttattcaattttgtttttggcctatcttgatagaaattttctaccaggatccaaatttcgagaaatagtgtgaaatgtctttcattttccttggtttattaaactttagtagtagcatgccttgaaaccaatttcttagcacgatctaaatttcaagggattatgtgaaattcatgtagagtttcccgattctttgaactttggatgcttaggatggtagttttcatcaaagcttaagaaaaccactagaagcaataagattggctgtcgaatgtagagatgagaaaagcaataaaaaaaaaaagtgaaagataatcatcaaattcttgacttataaaatgaaaaaagcaaagagtgcttgaagtcatcccaccaatgttgaaaatacgctccgaatgtcagcatcacttttactttaaaaaagttctcctattgggctttatataaagccagcccatgagggcgcagtaatcgtgcaccacccaaactactactttggttatattacacgtctaaactatatataatacaaatatatagataaatatattataaattaaaaatcaattttaactatattagtatcttttgtataatatttaaataaaaaataaaattatcaatatttttaaataaaaatatttatacatatattatcatttattttatataatcaaactaaatatattataattttaataataatatgtttttaaattctatatactatcacaaaatatcacaaaaaatattatacgtattatatttttcaaagtatttttatcttgtcatattttgaagttttttcttaatatttttatactttcaaaagaataaatggggaaaatgagcaaaaaaatgtctttttagttgctattataatataacactaaactttaatgcttaaagaaatctttaagttacaaatattaatttgaatttcaatactgatacttatcttttccatgaactcaatttctttgagagatttcaatgtaccaagccaataaatttcgaatttcataattgtagtagaaaaggcattcatgaaactctaatttaactttgcaaaaataattaaaggataaatatttaatatcaaaaaagtaacttttttcttcattaatcatcaaatgaagcataattgcacttactttgtagtaatgacaaaaggataaatattaaagaaaaggagatgatattttttcttaaaaaatattatcatttaacataaattttacaaacatctatttcataaattcaatatcatcttttgaataatttgagaacaaataagaaggctttggaatgaatgtcaagttaacccattgttactaaattcaaataaaaaaaaacgttttaagaaaaaagagaaagtattataaatagcatagtattaaatgccaagggatgaaagtaaaattggaagataaaatatcacattacgataataataaagttaggaggcaatatttgctttttccatatgaagccaactatcattaagtgatatgtatatacacacatgtatatagattaccttcatacaaatttgacataaagatttataaaagttttcataagagtgcaaaagagctaccaaattagaaagtaagtacgtaaaagggaaaactattgtatacttttagtcatttttttattcatatccattgatcttttattgttatatttggcacctcaaactatataaatattttgaaaaaaaaaaacattattaaatggattttgtgggcttcgactagctcaaagttgtaactaaaatttaattaaattatcatatataatatgaacaacatgcataaaagaattttttttttaatgaagaaaatataataaaagggtataatcaaggttcctcaaatattattttggaaaaaataaaaataaaagaaatccttttaaaaattatattatgtgtatataactaatcaccaatgaatgccaaaaaagaagaggaacaaaagaaaaatgaaaaaaaaaaaagtattattcttttcatgttacctaaacatgagatatagtatggaagacattctattttctaaactttgatagtagcttccctttaaaccaatttcttaccaagatctaaatttgaagaaatgatataaaatattttcatgaaatttcctaggtttattgaacttttgatggtaatatgccttcaagcaaactctataaaaggctttgcacaattgtcatcaaagttcaagacaagtactaaaagagaagagtggttgttgtatgttaaaaggagaaaaacaaaaatcaaaatgccaaagatagtcatcaaaaacctttaatttgactcttttcgtgaatcctatatttttgttatgccacttgatatttttttaacctcaactacaaacacctttcaaatgggaaaagaaaaaagaagaaaagttttatgtcacacttttatccatctattttttttacctagacttcaatatcttgaggtgaagggattttgaaattcttattagtatcaaataaagcataattgcacttacttcaatcttatcattttgcgacaatgattaaagggtaaatattaaagaaaaagatataatattttttaagaataaaagtattataaattgaaattccttatataatatcatcatttgaataatttgatgacaaaaaaggaggctttggaatgaatgtcaaatgaacccattgttactaaatacaaataaaaaaagaaaaagaaagttaagcaaaaataaaaagttgtaaatatgagatgtgtataaatatatatatatatatatatatatatatatatagatagatagataatgccttaggggaaaacataaaaatagaaaagaaataaaaaatgtgaaaatgaaacttcacatgcaagtaagggtctccaacgggcgggccgggccaggccgggccgtaaataggaggcccgcggcccggcctatgagcccgcgggctagcgggctggcgggctgggcgggccgggccgacgggccgggccgcgggcttttttaaataaaggaaggaagagggggggattcgaacccctcacctcaagcttaaatttcaaggctctaaccaactgagctacatttattttgtgcttattaaatgaattagttatatatatataaaaatatagtatattatttttttaaaaaaaattaaaggcgggcctaagggcgggcctacgggccaagcctacgggccgggcctaaatttaggcccgcggcccggcccgcccataaacgggctcgggcccggcgggcttgggccgggctttagcccgtcgggccgggccgggcctaaagcgggccgcgggctttttggagacccctacatgcaaggcttgattgcttttttcgatgtaaatttcattatctatgccatacacatattataaaaacaaaaaataaaaataattacatggattattgttgccttgaagtggctcaaaggtgtatttaaaaagaattaaatagttggaaaagtaaggaaaacaagaaacaaaaaacttttcttgaatattttatatagaacaatatcatatatacataaatgaaagtatttcacaccaaaaggtgagtttttccccgaaatggaggaaatttttctaccaacacctgtgccaaagggattccaacccaagcaaaaggcttggatatgagcacagctaccactgggctaaatttatgttacttaatatatactcacaataaatatcttaaagtttattattaaaagaataaatcaattaattctaattattttatttaaatttttttaattaattaataaaagtaaaaaaaccatttctataattttcttaataatgataattaaatataaaaaatatgaatattaaaaaaatcatatatacatcaatatttattttacattattaaatttatttaaattaaataaattataattttaatattaaatatatcatcatttatttcattaattatattttaaaaaattattatcactttacttttaaattttatatatttatccttttaattctatttaattttaaataattttattttaaaatattagaagtataagtttattcaaaaattactaaaataaaaaataaaaaacaataaaattataatattttataaaataaattaatttaataacacaaataataaattattaatatcaatatattcttctttatcgatatttttcagtaaaattatacctacaccaaacgagggcgcggtaggtggatatctcggcaaagagataaattgcccttttggaagattttacgtgtacgtcggcccagccaaccacacgcattcaaacattgctacctgccaaagggtctatgagcaggtttttaagtgttgtggctgaccgatgtgggatcccacctcttacctttaaaaagggatttaaatcattgtggaaggatgggtttgagaaaccatgacctcaggcatagagtgagcaccacgccaccaagctaactttgttaatattataacgttatgtataacttatatatataatatttatttatgtacattacattaagattctcttttatatatatatatatatatatatatatataatgtttcatgtgcataaattaatatatatatttttatttataaataaaattattaatatttcaaaataaaaaatattaatatttttatcatcatgtcttttatgttattaaaaacattcaaattagatacatttatataaaatttacttttaaattctaaatattattattgaatgctataaattatatcatacttatattcatttctttaacaaaacaacatcaatgtatttattgtcacttcttatatgcattttttataattgttttaaatatttttataaattttgaataatttttgtcttattcatattttatttcagaatatccatcaatattttttgatatatctcaatatattcgtaaaattgattcattgatatatttataaaaattgatatttttcataaaaattaaaacaaaaaattattgaacaaaagatattctataaattcaagttataaaatatcaaaataaatattacatagaaaaggaactaatatagactaaataaggatcaagttgtacaactaagattctcttttatatatatattcatattatggaaaattctacagtgccgttggaggtaagtggtaaaaaaaaaaaaaaaaaaagattagaattccatccactagtcaacgagacctctgctacccaccgcctcttcttcaacccctgtctatcctgcacaccgtcttccccgccatcttctctacatcccttaactgcagtctccaacacaaaggga

SEQ ID NO: 12906 - DNA, 3468 bp, Vitis vinifera
  Intron number 10 from transcript GSVIVT01038690001 (locus GSVIVG01038690001) derived from phytozome v7.0 (chr-ID chr 16; pos 20964495 to 20967962 reverse strand)
aagaagagaagaaaggattgacaaccaaactacaggtaattgatgctcaaggaattgttctaaatttttcagttctagttgattattatgcacaaaatcgttttatgttttctttccatggcatattctagatgacatgggttcgagtcccaccgggcgtgtggcgccggttattgattttataggggaaaggaacagagcatgaagcagtaacccttacttatcaaaaatattctagatgacatggcttttgtaatttattaatttactttctttggtggaaaaaaccctatagatagtgttcagtttgtgccagaaatagtgggggaatatctatttttatttatttttggagaattaggtgccttcattttatctctgttgcttcctttatgagaaaactgttggctctttcacttttatgtcatttaattccttgttcatcacctttttttttcctttgcaattattttatggggatatgctttgttctctcttctcatataagtgttagtgttaaattttattttattattagtattattatttttgtgggaaatcatctatactaaaaagaaaacaaacacccacttttctctccttcccatccttaatgggtctatcacacttttttcattagtttaagatacttaaagtagctttcatagttttaactataagacaactacctaaaactctctcacaaatccattccccttcaaaatgtcttgctgaaacttcctgaaagtccacatgtctcataattctccagaactccatctatttctactctttcatttttttgaaaatttgtggatgcaaacacatagtctagctatgacctcccagtaatttttgaaagtatataaaaaggatgagaatggggtgaaattggaaggaaaaaaaaaatagagaagactcctgacattagttaactcaaaacttgtcaatgctaagtaataataacattgaattgaagagctcctacagtatagcttcacttgtagatagaaatttcacattcatgttgactgatctgagggactgacagaagtttccatcctctaatatctccaactgtaaaagtcacattgctaagttttccattctaagaactcataagagaatggtttgttcatacttaggtcaacaaaaaggctaacctacacatgttgaagtctgcccactgcaaggacaagggttgatgaatttgatcctctcactgcaatctttgattatatccctaatacttgaatatcttggatacaaggggtactcaatgtcaaagaaaacacttggttatgagtttcacatgtatggcatgtgtagttgaatcacacatgagggttacaattgctcagtaaagatttctagccagatgtgtctattttttctggcaatttatgagatggtttcttgtataccattttttatgcctgaatgattttgaggcccttgatcattttaatggatatactccttagtatgacatttgttcctatttctgttttttgttcttgttctgctatgtattagcaaaagggagagagaaagatgacataattaagattttctttttctcaactgagaccaggaaaattttaattatgctatcattgaaattctgtgcatttgagagagaaataaaagacggtaacagattgaggaggaatatgattgtaagtaaccttctagtgtcttggagtggctagatgacataaaatttatcagattgttgagcaaaggaagaacatttggtgccttattgatttattcctagacatggaggcatgttctagttctttcttataggaagcattttctgaggtcaacaaatagatatgctgaataattcacaaataactgtagatggtttgtgaatcatgagaactgtgatgttttttgtcagaggtatcacagagatatcgattttctagacattgtaaactatccagaatcaatctattctctgaaaagctatccaacttgtggaaaatgggtcaatgtgtttaggatgcttggagtagcaaagttcctcttggttgggtttccagatttttagagcattgcttgatttttctgcatttctctggatcacttgcctgacttatcctgtatttgtattgggtatagaatgcccctctttcacaagaaatctcctgggttgggggtggagtctttggtaagagtttaatctcctgggtttggggtggagtctttggttagagtttttggaatgattttactgactaaggtggtgcttgttttttttattttatttaattctaaatagaatttaagactaaataatgcttaatggtgttgagtattaagttgtttatttttttaatattgtatttctattaagtatcacgaagtaaaaaaaattaataggttcattgcagttatggtagttcacttttagcatttagaaagagccaaatattttaactttttctatttagtaaaaaaaatataagaaataagttaagaaaaagtgaaaaaacaactacctaaagtttaaaagcaaattacttttagcaaaaagttaaaaaaacaaataccttctaagcctagatgtctttatcatacaagcaatatatatatttttttttgtttgtggctaaatatcgcttatttatgccatcctctacccttggcttttatcatatacagtctgtacattgtgactagatattttgatgtgtactgaagaaacggatgagaatgtttccagctggccagctgttttataggtctggattttataggctttagtttgatttacatcagatgttgctggaagcttagtgaatattattgccagcttctgaaaaggcaatattattttttgtcagagtattttgtggtgagatattgttgtgagtgcatgaagttatgaatgtcatcctcaaatgcgaaagaagtaaagccatattatcactgtattttgtttggggtggggttgttatgttgtgcttggcttgtttcccccttgacaaaatttatttgtttgcttttttgtttttaatttcattctttattctatctcacattcaatcccaattcaaatatatacgagggatgatattttttttcctgcttcctaaatattcttctgttggatcgtctagtttctgacactctctctctttctctctttctgtgtgtctgtctgtctaattagaaatatccacatttctgagggatgatatttttttcctgcttactaagtattcttctgtttgatcatctagttatctctctctctctctctctctctctccctctctccctctcttgctcgctctcttgctgtgtgtgtgtatgtgtgtgtctgtctaatttgaaatatccacatttctgttccctgttatcttttctggagagcttcttgtttcaatggtatgtgttttggttgaatgacttccaggtggaagagaataaggtggagagtattaagaggga

SEQ ID NO: 12907 - DNA, 26315 bp, Vitis vinifera
  Intron number 4 from transcript GSVIVT01013493001 (locus G SVIVG01013493001) derived from phytozome v7.0 (chr-ID chr1 3_random; pos 1764141 to 1790455)
ttgattgtttacatctgggttgctaagcgctttgtgtacaaaaaaactggatatgatgatccgaaaggagaacagaaaaaagcagcagagcttgcataggtactttgatcatgagaagagattgactaaaatggaggtttatgcttgagaagcctttgcagatgtagaagtaataatttgagtctcacgttctcattctgtatgtgaatatataatatcactcaattcatggggacttgagtcatacccttaatgcaatcatgtattcctgttggtgatccaatcaaaatcttgatcaggtttgaaaatattatgtggacttggatacatgggccaggactatcaaagtgatctcactttaggcttttgttgagtaggtgcatctatggagcaaacctatcccaccatgactgcccatttgtagtatttattcatcttggtttttaggggaatttaattttgagtatgactaccattttcaccactcttaaggtgtacactatgtgagttcatttgacttggccatctcccaatcaatccaatctacctttttgatagcctttcacaatcaattttattaatcaagcgtgacgtccaacccaaacccaactttgaaataaaaatattttttgaggtgatagaaagtgatatgaaaagggaaaaaaatgaaaatggattttttttttgggttgttgaaggtttttctttccatcaatcaacaagatgataaaaaggaagaaagaaaaaaaaagaaatcaagtaaaatagatgagaaatatttttgttttatcttatcaaggcatcgatggtcttccaatcatgagatgtttttaaatcagtggcgaagccacaaagccacaaaaggcctatgggggcaatgccacccctcaaatttgggaataaaaatttttatttataaaaggtatgtacttgatttgtgttattttcttgaaataaattattattcttgcctctcctcaacttattttcctactcaaccaatgttttaaattatatgtaatatttaattattaggtatttaaaggttaaagaatcaaattaaaacaatttttatataaatagagtaggtaataattaaatagttttggagctcgggatgagtttgttctaagaacgatagaggaattttcatgtgatagaccatctcctattagattggtcacctcaaaacattgatgcaatcctataagaaacaactcttaagtgggttggcttgtagtccttggtgatcaaattagtcttaggaagttgaataatgctgagagaatactaattgattcatatgccttattttgttccaattgaacatataatacctctccaaattacttacggtgtttgcaaaaagggtaagggctatcatacaagccaagattgtcaactattagcgaatgtttcttgttagagtttatttctctctagaatttgtttttgtcatgaactttgttgccttattttatgtggttaaggtttgaatcccatttgtacaaggccctcccattatcctcccaaaggaacatgaggttaggcttcggtcaacgtatgttaggaatcatgactttttttaggaaagtttatgtcacaaggcggcttgactttctcattgggcatcctcttacgaggacacgtagctccccaaggccaaacgtccctttgttgcccttgtttttgccatccaagctagcctttgatagtctttgtaggaaatacattctttgatcgatctcaatctacatgtcatgtggagaaaattgatcatcaagcatggcaattatcatagatattgcccatcatagcattgctatagcattaagtgcaactcagtgtagatacatgttcatgttctcgtatcctacatcttcaatgttttctcttagaagcatcctcaagctcaaagacaacgttagttaccttttgtgttgttgcttcaatatgtttttagtttgaccctattattggtctcttattgcccattgagaagggttttttgggtttctagtttaatctctaagtcatttctccttcatttgggatttcatagtagatttaaaaatgttcaccattgtttttatgattttatagggttaaagtcttgaaaattacattctacagcaagtggatatgtttagatagagaggacatcagccagccagaagatgccatggatgacaaatgttgaggaatctaggtttaacgccatcattcactagggacaaattgatgtagtattaagattgagcagatgaaaatcctaccttgccatttacttatcaaaaggaggaagatgttagaagatgatggtaaaaaatgctcaagtacatagaacattattgtcgaacttccttcattctaaattatgtaggcattagatttatttttccttaggacacgatctcctttgatattgataaaatcttattttcctagtgttgcaataactaaatttccataattatggtgggattccctaattatctttttccttagatacgctattctcggaaaggcaaatggcctttatagattagcaagattgtaatggaggagagaatcatcataaaaatttcactagggaactccaaaactcttttttctcaagtttgcatcttttcattgggtcatttgaattgatattagagtataatcttagcaccaatcatggaagaagggttagaacacgacttgaagagactattaaatggttgaagaactcatcgaacaaacaagcaaccaccttgagaaaaaatggttgccactatgaatttgaatctcgaacacgtagcttcaagaatagaggattcaagtaatggtgactacacttcggtcaatcaaagtggaaggagctatagtccacaaggtataaatcctattcaaataaggttttccaaaattaatttttcgaatttgaaagttaaaattctagtgggtggatttataaatgcaatagatttttaaaattaaaggaattaaagatgaggagaagatgagattggcttctatccatttaaagagaagggcattagaatggttttaaggctataaggctagtatcaaggatatcaattaggggtagtttctacacatgttatttttagctttggcttaaaacttaccaagaatattttgaagcattgacaactagaacttgtggattgctggaggagttttttgtttaatacttcatttgtgacttgaaggagaagattaagaataaagtcacataaaaagtatgtttccatacaatcatataaagataatcataaaataggaaccttctaaaaataattcaagtttcatgcattcatcgatcaaaagtagtacttaagatggtcaaagtagtacttatatcattaaaaaaactacataaaataataataatttttaaataatagcttgaaatttgtattttataaacttgaattcttattttgtggttttttttttcatatgagtgtatgaaatcatactttacctttgataaaaaaattcataaaatgatacttatttttaaatagtagcttgaaatttgtattttataaacttggattcttattttgtggtttttttttcatatgagtgtatgaaatcttacttttccctaaagtcaccatgttctaaatagacatgctatcctaagccattgccttagccttgctacatgaagggacaatagagacaatactgaaggaggttaaaagctctaatagaagtgaggtgtgtataatgaattatataaaaattagaaaaaaccataatggttaattacaatctattaagagaatttcagctatgaaaatgtacgtatgagaggcattagaaaaaaaaaattgttattattgtgatgagaagtatgagcttgaccataaaaatctaaggaaacaaaattttccattggaaagtgatgacaatgaaagagagtcaaagaacaaagttgaaaaaaaatgccaatatggtatttagttcaacctcttattaaaccatgaagatctatcataatatcaagaaaaaacccatcatcgtataggtattacccataacttccttgatccaatactagcaaaaatgaaagaatgctctattaggatgcctttaaatcataggtgtgaatgcttctactatctagggactatatttaattgtagtggaagacaaaacaacataaacttttgacttagggcttagatggtcctaaatcaaattatgctcatagaaaattgtcccaatctcctataaattttcctccaatcacttgttttctaagtgattgatgtatgttttgtttgtcatatcaaaacctaatttagctacactaaagtaacttttgcccaatcaagaatgacttttgatgaaaattacaatagtataatggttttaaacaatgttttgaaaatcgaactggaccagtccgtccaactggattgaccgttgattagcggtcttttcggttaaatccaacgaattagactgttcaagggtttgattgcccttgaatcgcttgaaccaacgattggaccgttgaactggacgaactgtccgtttccatgcgaaccatccagtcccatgtgaactggttaacgattgtctgaccaaaagcacattgagcctcccacacctttggcccaagctccttccctataagcccacaatgcctttgcaacttttcaaggacatgctaggtatttatacaactcatgaagtctggttaccaaaataggcaaatgaccactttgactacacaactactttagtacataacattgtaaatatctttatatataattattttaagtttttataaaatatttaaacaaatataaatatttatatctacgtttatttttataataattattgattataaatataaaaataatataaattaattaatataattaatttttaaaaatttaaaatacaaaatgtatagatatgtaattaaattaaatattataattttcttttcatcttcatatttaaatattatacctattttatttaataaaatttaatatattaatacatttatatttatctttatcatttaatttgatatatcaaatataaaaagtaaaacattattaaaatttttaattatatatatatatatatatatatatattaatttcttgtaattaattttaatatcaataaaatataaattatatatttatgatgtcaatgacacggttcaaccatcagttcaaccaatgaattgtgaattagtaactttttcggttcaatactcgatttgattctaaaaacattggttttaagtgtcatccactaggatgacatattttcaataattaaggcttgaacaatatgaaaaaaaaaatgaatatgattaagtgaaaatggattcatacatcattcattataaaattaaataggtaatgagttgaaattggaaagaaaaaaaagtcaatctaaaacaatcaaatgatgaaagaaaataaatgtaaaaaaactctcaaagttaggatttttaaagaataatctttacaattaatagtcttgagatatattactcatcaagttagattacaaacataaattctcatctagatagatattatatgtttgcaagtctagatctaattttttctcaaattaggtgactttatgcaaagaatcaatttaaatcacataattaattcatctaaatcattttctaataattcatataatgaaactattcaaattcattaaatctagctttaaaaatttaatgaatctacctagtttgtattgtagtaatcatttaggataatttgaagagaaaaattctccaaaattcaatcaatcaatcaattgaatcaaaataccttgccaaatcaagcctcatttgcctcttggaaggtgattgggaagcgggccaaaggtaaggtacacttgggagtggtgcacaacttaagtgcactagacttaggtatttgatgcacaatttaagtgtgctagaaaggcacacaattttgggtgcccaatttgggggtagtagcaactttatttactttacaacactgtatttatatttacactgaaaacatttaagtaaatgtttggacatttgctttaagtttataatgtagataacaaaatactctccctcccccatttgaatccaaggtaaattaaaatttggttttctaattttagtataaattgacaatttttattgatttttttttaaaagtttgtccaagtaaaattaccaaatataaaaatctagaaaaattattttgagtattaccaacgtgaaataacaaaatctatcactttttatcataggttctgaaactttttaaaaatgtcatattttctatggtaaaatttttgcagtattaaggcaacatacaaggcatatatgctaactctctattggaacatgttatcttaactttaaaaaaaaaaatttaaacttagaaatcgtaaaatatttattatatatattataaaaaatttgtttaataaaaaaattctagttgttatttgtacatcaaaattaaaattttttaaaataaaaaaataaattattagcatactatataacaaatattacattattatcctttagttcatatttcaaattctagaattattgattaactttttgtattataattaaaccatagttttagaatttaggatgtggtagtttctattgaatttttgctatctaagacacaaataaacttaaaaaaaatgagctataaatgtttgaatccaatttcaaaccttgaacaagaagttcaagctcccgatattggctagctgaagtttccttgtcgtttgcattttgaagggctctcttacttcactttgaatggcactttccagtgaattttggatgaaagttataagaaaagtgccaaacaacttttataagagaaaactatctccacatgccttttggatgttttgcatagggctatgaattgtaatagaggtggcgccattgaagatgtcacatagcctatgtgcatacatgcaataaaagcctttggaaatggctttgaaaggtattgagaattattctttataaaagctatttgcaccgttgaacatgtctccatgtatgattgcaatatgtggatcacaagatgacaaaacttgcctcttgaaaatgtgagaactcaaacgtcatgtagttgctgaagtttgcaatttttcacatgacaaatgacttcaatataggttgccatatttccatgaattgtatatggcactacatgacaaactctacctcttgagaaggtctccatggttcatggcacagcgatgttgacatatgtaataagatttccatatcaccacaaatgtataattaatgatgaaaaatattggtaattatggatatatcaatcattagattagattttatggatacattgggaaataacgacggatattttgacaaaaaatttgatgagacgaaaattgatcaaaactcgtggaagtgtttgtaaaaatttcaaaaaatgataaagtaatgtcaaaaaaattgatatatatatatatatatatatatatatatatacacacatataatatactaatttaaaaacatattaatattgaaatgataatatgtttagtttgaatatattgagggataaaaaaatatttagataagtattttttttgttaaaaatattagtattttatttataaatttatacttgccttgtatttaattagtatacaaaattaataataagataattaaaattaattaatttataataattttaatttaattaattaattatatatatagacacacacacaaatattcaaaaccataatctatatatggttcaatgacactacctcgtcatgacaagcttatgcacctgggtttgagccttactattgtgagtttgtgacctatttgattggccatagttgtcaacgtgggcttgggcgtatttgggcttacggggcatatttgggcctatagggccaaaggccaaaaattagaaagcaaaaagttttggcccaaagtaaattggaaaaagtgcttacatggcatcgaaaaatctctaatattattggtatgtaggtgtattattgtgtcaagctcgatcgataccagaaatattgttgatatttcatggcatttcaaaccttgtgcacaacacctttgtaagctttagcgtttcatctttttgcataggcatgtgaaacaaactcgagccttgatatttatttttccaagagaactttaaaacaccttttcacatagattttgtcaatttcgcataaggatgcaaagtggacataagaatatttctctataactttattttcgcataacctcttctagttttgcatgggtgtgcaaaacaaactagagacatgagattttggcattcaaagttttcaaaaaaaattcctttaactttgcatgaagtgtgtaatttcgcatagctatgcgaattcttccataggctactctttttgcatcatttcttctccaaaatgccatttttaagcttttagaccctaaaaaattccttcttattttgtttctagagtgctacaagatcacaaaaacaaaggatatatgtacttagaaaacgagaaaaaaaattgaaacaaatgaaacaaagtgtaaaaaaaattagaaacaattagaataattaggctagttagtccttttaaaatgactaaccccctctaaattttttttctcaagccatgaaaggatcaatgaggaagagttcttccttctcttgcaccataggcttgaaacaagacttaagttggtgtccattgatcttaaagacattttcactttttggattgataatttcaataaccccatttgaatgcaccttatgaacaaaatatgggccattccatagggatttgtgcttcctcggaaagatgtgtagtttgaaatcacataggagccacttttgtccttcttgaaacttctttcttagggtaatttgatcatgccatctcttaagtttgtctttacaaaattttgaattcgtgtaagcttcatttatcaattattctctatcattcaagtgtataaatctcctcaaccctactctttgaaggtcaaaattcaatttcttggtaacccactatgttttgtattccacttcgatggacaaatgatatactttaccaaaaattagcctacatggtgacatcccaagaattgtcttaaagacattttagtaagctcaaaatgcataaaaaaaagtctcataacctaatctttgttgcaatttgtattcaccacttttatcaagatgttcttgatcatagttcatgaactccacttgctcgtttgttgtggatgataaggtgtggatactttgtgctttagtactccatatttaacaaaaagcttaatgaatggcttgttgtaacaatgactacctccatcactaataatgacttttggcattccaaaccttgtgaaaatattctccttgagaaatttgaccaccattttgtgatcattatgcttacaagttatttcttccacctattttggcacatcaaactattcttaccaagatataagaatatctaaaagaggatggaaatgaccccacaaaatcaattctcacacattaaacaattcaactaccagtatggggttgagtggcgtcatgtgtttctttgtcaacttcttaagcctttggtatttatcacaagatttgaaaatgccatgagcatatttgaatagagttggccaataaaaccctcattgacgaacctttaaacttgtcatttgaatggagaagtggccttcacatgtatgagcatggcattgcataaaaatcccttgttcttctcttccgctacacagttttgaatgatttgatgagcataatactaatataaaaatggctcatcccatagtatacattcaccttggacaataaaaatatattttcttgaattgtctacttcttaggtaattcttcggtgaccaagtaatttgtaatgtgggcatgttatgaattgacatccattttcaagagagtatcattagggaattccttattaatgagagatattttcggaatgtgttccctagaaatttgggagtgttggcaaactaccaaatcctttacaccatttttatctcttatttcatgattaaactcttgaagaagcgagatctactgaattaaccttgccttaaagtttgtctagttgactagatatttcaaagttgaatgattagtgaagatcattttgatagctccaacaagttatgcttgaaacttgttcaattgaaagacgactacaagtaaatcattttttagtggtagcgtagttattttgtgcaggattgtgagttctgcttgcatagtagatgacataaaattacccttcatctttttgcttaagaattacctctatagcttggtcacttatatcacacttgacttcaaaaggatgttcccaatttggtcccttcataataggtacacactagttaatagtttctttaaatcttcaaagcatttttggcaatcgtcactccatttgaatttagcatttttagcaagtaagacatacattgagcttgctagtttggaaaaatctttgatgaaccgtctacaaatgcccacatgactaagaaattatctaagttctttgacatttcttagtgttagtagattcataattagttgaatatttgctttatctctttctatgcctttcttagagataacaaggctcaggacaattgccctttccaccatatggtgacatttctcccaatacagcacaagattcttctttgtgcacctttgaagtatcctttccaaatttgagacacaatcattaaaatccataccgtagatggtaagatcatccataaaaacttctatgatctatgatctagatcattgaagatacttagcttgcatttttgaaaattggcggtaacattgcataaattgaatgacatcattctatatgcatgaggcaagtaaatattgtcttttcttgatcctttaaggtaatctcaatttggaactaaccgaagtagccattaagaaagtaataatgagggtgtcttgatatccttgatccatgaatgaaaggagaaaatgatcattccattaatgaaatttaccttttgatagttgattcacatgtaccttctaacctgtagtcaaccttgtgggaataacttttccattttcattttatatcatgatcataagtgttatatgaaattgattagataatcttagcttgtaataacttaagtaccttattttgattaacttcttgcatgtgaagtttcaattgcctttgaggttgaaaaattggtctgacatcttcctctaaataaatgtggtaagtgcataccaaaggacttaattatccctttgaggtaagaaattgtgcattcaataacttctttgcatcttcttagaacaaatacacacaaccgaatagatgattggtaaattgaaattcttttatgtaattcttttcctctcatttcaataccaaaaacctaaactaacccaaaccctttatttcaaataattatcaataattttaaattaaatatcatattcaaataagtgaaaaactatttccaatttcaaaacctctagaaaatgaaaaaaaaatagaatgaacaaacttctaaaacaaaagaagtttagagaatagatgaacctttcctccaacaaaagaggaaactaggctagttctatgcttttatctctaaaaaagttcaaaagagaaacctgtagaaaggacatgaagaaatggtaccttgactattgtttcaaagctagattcaatggtattttattttagtgaagaggatcattgaagtagaagtagtagatcgtgaaaagagggtttcaaaaagtgaaacaaaagagaatgtaagtatggaggcaaagattttatatcatgaattagagagatgatatttataggtccattatttttctaagccaattatttctatggtaaaaaaatcctcatccaaaacaagataatagtagtagaaaaaaaatccccacgatcaaggatgaaaatatcaattaacatagatatatcggtacttatattttacggatatattaagaaatattggtggatattttgacaaaaaaaataaaaatcaatgaaatggaaattgatcaaaactcatggaaatattagaaaaacttcaaaaaataatacaaaaacaataaaacaataatacttattaaagttgtttttttttgaagaaattgatatatatgcagtaataaacgaatttgaaaacacattaataaatttgcaatgtttttagaatcagaccaattattaaatcagaaaagtcatcggttaacggttcattggtcagacaagtgtttgaactgcggttgaactggtgatgtcataaatatataatttatataatattaaaattaaaaataattataaaaaataaaaataataatttatatattatttaaaaataaaaattttatttaaaatttataaaattatttgaaaataaaaaaatagtttcaaataagaaatttagatatttgaaaatcataattttaatttaaagttaacaaattttaattttttaaaatcatatctaaatttattttaaaattagaattttatttaaaatatgagtaacacaatattttcaaaaatttatttaaaattataatattttattaatttaaattaaaatcataataatggaaataaactaataaagtaaataaaaataaaaaatgtaaaaaaaatcgtaaaatgggagggaaagattgatttagccatcgacatggcgcccccagcgttggctggatgttggaagcgaggggttgggggtagcgataagagctggaaaaagggtatgataatggtagtggaaagacaacaaccatgaggaaagagggaaagaagatgaaagaaaagtgagggttgggggcaaaggtaggatctggaagggggagagatttcaacatgtcatcttcggtattgggtttgcaaaagagcttggatgggtggccgatagcaacaactgcgaaggagaatggtgcaggagtagatttgggaggaaaaagaaagaagaaaggtgtgtgtgggaaattgggtgggaggagggggagggagggaagagtttgaactgcttggttcataaaaaattggtcgggtcagttggttcaccgattcgaccattagttgcgatgatttgaggttggtttaaaagctggcctactcaaagcgttaaaccagactagaatgatgatcgagcaacgatgacacctgtcgaaccggtccagtttttaaaacactatgaatttgtaatattatgcaataataaatgaatttgaaagtacattaatattaaaatgataatatatttagtttgaatatattgaaggataaaaataaaagatgatatttaattaattattttttatttaaaaaagttgatacttttatttgttttatatttaattagtacataaaatacataataagataattaaaactagcttatttatacttttgttttaattaatttataatataatatgtattaataatttattaagtttcattttaaaattaacttaaaaaacatatatagacatagatgacttaatatacatatatatatagacatacatgaattaatacacacatgctcacgcgcgcacacacactcacacacattcaaggacctaggtttgagttctatatttgtggtcttgttgaagtaattttttttaaatgtaagtgttacaacaatcccacatcgaaactaggagagaaaaataatgtctttttaatagaggttgcctcttctattgacatgtgggaataactatttttgacattaaatccaaaattgaaaagaacacaagggtgtgatgtggcataaaaaatattattgataaaaccaaaaaataggtgtgatatcgccaatacattggcaaaaaacatagaaaaacttgaaattttggacgaatgagatatttgtgccccttttactagcatgtgaaggcgggccagatgggttagttaggctaattgtcaacaatgggccttgcatatgggaataactatttttgacattaaatctaaaattgaaaaatgtgtgacgtggcactgaaaatatcgttgataaaaccaaaaaatcggtgtgatattggtatatcgctgatatattagtgattttggatgaacaagatatttgtggtgattatagtgttggtgttgtctaatacccaaaatatcgatgatatttattaatgtgcaacctatattacaacctataaatgctctcaaattcatcccatatgtagcctgtaaatgagttgaattcaaccacaaaataaagccttaaaaaatttcatgttggtaatggcaacccaaggtggctcatgtgacttccaagaacacctcaaaaacccatgatactttcaatttccaacccaaaacacctaagttcaaccttaagcatgacccaaaaacacaatagatcgtggtttataagaacaccttaaacatcaacaaattttttggaaaagaaaaaaaaatgcaatagctaccaattttttttttatccatttttaaaaaggaataatccatcattttttttccgcattcatagtctccttaatgcttcatagatgatgctccgataaaatattaaatctttattaggattaatgaggaattatttgttaagataaaacccttaaaaacatgacatgatgtaacaaaatttggaatttatgatttaatgatatttcaatttaacttttatctatccttattccatacattatactttatgaacattcttgcttgcatcttttgcattatacgtgacttggatgcattaagagttgaatggaagatccatatcatgggttctttgcaaatagatgacttgttcacagttggtttatgggtttaggcaacccattagaggttgtagtgcaccaccttctaatttgaaggataattggtcttggctatcgagtgagtttcccattgtgagtgcaatagtgtgtatatttacatattagactggacctatggtgaatcatgacttaaggctatcaagtagtcataacctcacaaagttgcttcattatgttgtttttcaaccttgagagaatattgaacttgtgttaaagttactagtggctttggcctataggtgagatcgtaagctaatcatatattccatatggattgagtcactattgataaaagttggtagaaataagcattctcaatagagacaccatgatatcttataagattaaaatagagtgtccctttaggtaatcctaaggaagtatgttcatgtaaattatgactataatagtttcttaagtggaacttgacatagactttttgagagctaagacatgttagttgaacacataatatgaggatttgtaacttaagaatagtaaatgtggttttgaaagagtgataacttttaccttgttagactacagataccaattctgaattgggagactgaatgcaatgaatagcaagttacgaacccgaaaacatagtatctaattgttatttatataggatactgaagttcaattgaatctttataatgagatattgaatcaactttagaattggattttaaaggagtcaatattcctatgggtcttagtggtcaccgctttgagcttatatacgttgttggcatgggttatgagggtcggaaaaactctaggttcatttttgtgtataagggcattttagtaattatacaaggttgcacaagggtaagtgaacaaggtctttcgattgatctaattgattaattagttggctttgttgggttaattaatcaattaagacccaatttgggttagattaagtgacctaagcctatgtaggctcaagtcacttaagcttagttaggaaccttataaatatcctagaggacttagggtttccgtcgctttttgtcttccaccatctagagagaaaaagaaccaaagtttgcactattctttcattcccattggaagtgtgttaagaacaaggttgagtcatcagacgaaagatcgtaggtttacgagacttttaataattttaaagtcattttcagcacttggaatttaaggtttgaaaatatctaaacctaaaggttagtgctttaaccctaaagatcaatttttttaaaaaataggtattatttcgttgcatcaatctaagatgccaacatttatagttctgcaacttccctcacgaaacgtaacaaaattatatactagctatccaccctaagaataagagctatattagaatgaagcttacttcccaaaatatttaaggaaaaatgcaaagaaaagaaaatgaagagaggaaagtagaatgaaaaaaaaaagtgaaagaaaaataaaaataaatttaaagttaataaattatttttatatactactttcaactcatttaacttttaaatttttttaatataaaaatcaaataatttaaaagtatataagtttctaactaagtttaattatgtttaaattttttttttttttgcatttgttatcataaaccaaatatgagaaaatatttgttttaattaatactttcccaaaaatcttaattttcatagaaaaaaaatcatttctttgattaggaagcctttctaaaattctttaattttttaaaatttctaaaaatatgtcacctctccatatttccacgacaagccaaaacgaaggaagacataaaaagatcacattctctactcctagtttaggaatatagctaaaaggaactcgaaaaagacataaaattaccatttgctcaggagttcaattcttaaaatggaaatatgattcttttatttcctgtcaattacctaaccctcttttgtgaataggcctttcctagataggaacaatgccttttgacataattatttggtcctcatggattttagcaagttttgaagaatattatagggaaaggaaataaagtgaaaaaatatgaataaaacattaaaaaaaaccaatttaaattaataagctttttcctatgtaacaaagtttgtttctctttcttttttcctcctaaatctgtaaaattgaagatagtttaaataattttcattcaatttttattattattttttcataaattaaataagagatttttttttccgtaatttttttcctattacttaatatataataagtatttctaatgaaaattataaatatagaatttataatgagtaccatagatgaattttcatcattcatttttatttagactatgtttgtctcctagaaagtattaaggaaaaaaaatggtaagaaaaatgcttttcccaaatttggttttaccataattttttttaaggaaaattaaatagaattagaattagttagaaatttatacattttaaaattatttaatctttatgtaatgaagaaaaataagtgaaatgaatttaaagaaagatataaaataatttattgattttgaatctattttttattttcctttgttttttctttcttccatttttcttctatattttctttcccttacatttttttcctcaaaattttcaagaatcaaatatagccttaatatttcttgatgatcaaaattaatatgatttaacttagggttttttataaacctgagcatggaactgacttaatttaattggttttaactaagttgaaatccactagaacctaacgttagttcaatgttgtttggtttgattcattcaagttggccaaaattaggcttttatatattttttccacattaacatcattataacaatacttaaaattaaaaaaaaaaactttggagcactgcctttggaatctgctgctccaatgctactctcaatgaacccatctcaatctcaactggtagcattgcctccataccatacaccaaggagtagggtgtggcacccataaaggtgcgaaaagaagcccgataagcccacaatgcgaaatggagcttctctgatcaatcccaataagtctcaaccatcctccgcacgatcctcttaatattcttgttcccagcctttactgctccattagtttgtggcctgtacgcagacgatctatgatgctaaataccgtatctctgtaacaaagcgtcaacatctgctctaaaatgtacttctttgtcgaaaatcaactcatgagggactctataacgacaaataatgtgtgatatgatgaaactagcgatccaagatgatgtcaatctcgcatacgaagcagccttcacccacttggtgaagtaatcaatggcgactccactggggatgctagagggtcaagcttgaacttaagatgaggcaaatgtggcgtttgatgggtcgattagtgggtacttatctcttgattacacattgagagctcttgatatcattggatgcatgcttggttattatacttattcgggacattgacatgctgatcatgttgattttttatcttgtttgtcttagcataaaggctttgatattgccatgattgttctgttcacttcacatgtatagactcattgttgtatatctttcgacttgatgtgttgattcttttgcttgtatattatcttgatcatttttgagtatgttgtctttatcactatttgccttgattgtcatattcttgcttagcttgcgtgtggacatgtgtgatatatctgcgctccgcttgattgcctgttgcatgattgcccttctcttgcatgattgcatgttggttgtctgtttgggccgcagatctattcccttacctccaatcctccggttttcggtcatttctttcatctcggctctcacttttgcaagtgtgaggctttgtgtgtgcttgtttctctgactgagctagagtttaggagtagggtctggtgacaggctatataaatgtttgagagcattctggaggagatcgacacattgatgttgattgagtctaatcgttgaagacctgtatagcccaaagctaggtttcatgaatatttgtgcgaccaatgtggttcatcttctgttttagctccatagggttttcggatgtacccacaccgctcactgtgcactctagttgaccattaagtgttgagagttttgagagatttcaccataggaaaccccttgggatgtcgaggtagtcttgtgtatctgctcgggattgggtatcagtttgattacttctaggttacctttcggtatatttgatagacattcgttgtggagtttcccttaccccgtatcttatctagtatttccattgttgtaggggtattgatatgttcggtctaggtttgacttcttggatcagagttgggggcagattgatcagaacatcaaattagtcagaccagagatcagatcagagagagatggattaccagtttgctgcggccatggcttcgattcaggaaactatagttagcctcggccagaggatagataggcagtagacccagcatgcctcgcttcaagatgatgcccagtatgatcctacagtgccacaacctcctctacctagtcagttagcaccacaggctatacctttcactctagatagtcagaccgaggttgccacgcttcttgtaatcgagcttaccccaacctcggaggatccacatgctcgcatggataggcttgagcagaggttgaggcagttgaggacttcagatagagctgtcacttgggaggatttttatgaagcaccagtggctagtttaccagcaaagtttaggatgcccgagattgagagatacacgggtatcggttgttctcgcatccatttgaggctttatagtacaatcatgagggcccatggactggatgaggcccagatgattatgcttttccctatgtccctgagtggtgcgacacaacaatggtttgcttcattggatgtatcacgccgctggacttgggatgatttggcccaggagtttttgagacaattcgcatttaatactgtcattgacgcctagaggagagagttagaggcattgagacagaggccagaggagtcaatcacctcatttatctctcgctggagggagaagatttcgcaggttattgatagaccatctgagagggatcagatcaacatgattatgaggagcttgtagcctcgatttgctaggcacttgatgggatttcctcatatggattttggatttttggtataggccttgttgatatctcctcatggtgaccacattcctacatctgttcgtttggcattctcggatcgacatcctgccacgaacaatattgttgagtatgaggcttgcatcttgggattagagacaactcttgagctcgggattagatagatggaggtgtttggtgactccaatctggtattgagacagattcaggacgagttgaagactagagatgttaagcttaggccttatcatgcatacttggagctactagttgggagatgtgatgatttgagatacacacatctgcccagagtgcagaaccaatttgctgatgctttatctactctagcttccatgattgatattcccactgataccgttgttcaccctttactgattgagtcgatatcagttttcgcttattgttgcttgattgatgaagtcgagtttgatgatggcttaccttggtaccatgacatatactagtttctgagacttggcgcatatcctgaggctgccacgaccaaggataagagagcattaagacagttggctgcccgatttgtgattcgtggcgagacattatacaaacgatcagccgatgggatgttactattgtgtttggaccgcgcccccgccgatcaaatgatgagagaggttcatgtggaagtttgtggaccacatatgggagggcatatgttagcccataagatcatgaggactagctatttttggttgaccatggagacatactgttgccagttcgttcagagatgttctgagtgtcagatacatggagacttcattcacgtgccgccttcaaagctacatgcattgacttctccatgtccattttcagtatggggtatagacattattgggaagatttcaccgaagtcttccagtggtcatgagttcatcttggtcgccattgattacttcactaagtgggtggaggctgcttcgtatgtgagattgacatcatctagggtcgctagtttcattagatcacacattatttatcgctatggagtccctcatgagttgatttttgacaaaggagtacattgcaaagcagattttgacgctttgttacagagatacggtattcaacatcatagatcgtctgcatacaggtcgtagactaacggagcagtagaggctacaaacaagaatattaagaggatcgtgcgaaggatggttgagacttatcgggattgatcagagaagctccctttcgcattgtgggcttatcggacttcttttcacttctcttcaagtgccacactctacttcttggtgtatggtatggaggcagtgctaccagttgagattgagatgggttcattgagagtagcattggagccgcagattctagaggcagattgggcttaggctcgattagaccaactcaatctcctagacgagaggagattgagggcaacagactatattcgtgcctactagaggaagatggcccgtgcttttaagaagcgggttaagcctcgaccactacggataggtgacttggttctgaaggtcatcaggggattgatcagagatcctagagggaagttcaggcccaattggagcggaccttacttcatcaaggagttgacctcaaagggcattgcatggttgatggatctagatggaaaccaattcttagagccgaccaacgtggattagttaaaaatgtactatgtttgagaccatggttgtaggatgggtggccatcattttggttagtcatctaccttttcacttttttgatatatagactgttgctagcccattgagcctcacatgtgcgttataacctttctttcttatcgccttgctcatattttcgcaccgggataggggcccttttggtgtatgcatgcattgtttgggagtctcatgagtcttggacctataagtgcatatttttctcattttttctttcctaccatcactttattgcattccatcgtatctcattgcttatgttcttcatttcttcttctttattctatttactgcttgtgttgctttatattctctccatcctgagtggtgatactcctcaattcattacatggaggatagccatatcattttcactatctatcacacggacattgattcagatatccttagtttgagaaggtcatctcgtcagagagagtttttgttaccttagcacttgagagtgtgtctatccattattgatatcatcttggggtttatttgtttatgtttagggtatgtgtatttgtatataaaaaaaaaaaaggaaaaaaagaatgaaaggaaaagaaaaataagcacatgtgtgtatgtgcatagcattctccatcattgagtgtgtatattgatatctaagggttattttattgagtatgtttgttggtgagagttcgtatgtgagctttctgagatcctctttttctttgtattcactttgtcgtgtattttgaaagtgagatgagtgacctcttaggtactttaggtcattgtctcttccatcattacattcattgctgatgtgacttcacttcatgttggatttgagcggatcatcactcctctttgtgttcttcgcttcaccatcattctcgtttttgcttttgattcatcatcctcatctcaccccttgtcattttcttacagtgacccttattcccaatttgacacttcctgtgcatcatccttacacatctcgttatcagatcatttttcttcattgcctcgttattgatattatattcacattgggcacattcaggtccatggatcatgagcttttctatacatgctgcattttatacatgagggcataggtttttgatcattgggtatttgggcctagtttcccttcatttctattaccttatcaccctggcttacgttacatcccgtgtcttaagaccatcctgaggccatgggatcagatgtcatcctcgacaacccctacttggacaggtgtttgagatttggttgatatttggatgtcatcatgctttttcttctaggggacgcttcattgatatttaggtttgtttcagtagtgggtttggatgaccaagattgcatatttgatttattgattgctatacatgattgacttattccactctatgacatgcatgcgattattttgtgtttgtttactagcctttgttttccatgaagtaaaccggctcatcactcaggtacactccttgcctctcttgttcattcggttattttgttttgattgatattcacttggtatccatgtttgattaatcaattgccatacttgcttcattttattagtagagacccatttttaacggcttagaggggtgctatgactcaccaccgtaccttctcaatgagtaacctgaccttcaaacccagactcggtttttcacaggcttgtttttcctttaggagtcacacttagggtttttctttcttattttgtttttcccttaaaaaataaaacgaaaataagtggcgaccaagtctttttctaaaaatcaaaattttcactaaacaaataaaaaaacgagtttcgccatcgagtgggaacgcattgtgcaaaatgcggggtccacaaggggactaataagttataaattattaggctagggccctggttagtgatattgatattattagttagctcaagaatttgtataatccactcaatttttatcaattttagttttttttctcacattaatatagtaaaataaaaaaatgaaaacctataatttttgtttgagactcataatcttaaattgagaacaaaatgaacaaaatcctctcttttttgtttttcattcaatgtgatctaatccattatcaatgatcaatcttaaacttgattggttattccttttttttggtatatgaaatataggatttcactaagttaactgtaaaaaaaaaaaaaaaagcatggttgcaaaataatgaaaagagaaaagagagagtaataaaaataaaatgaagtaaaaaaaaaaggaatacaattaataggaaacttaagaaataaagggtgtgctgtagattatgagaggacaactaaataaagttataagtaaatagaaaaattaatgatgagtttcatgtacttttttttttttaaaaaataaaataaaaaatttaaatttaaatttaaaattcttatataaaaattattgacttatattatgttgttaagaattatttttaaaaattatattttaattcgtttttaaaaaccaatatatattttgtaaaacttattattattattttttgtttttaaagatagaaaatagcatcaatattaaattaaataatttcatatcaaataaaaatatataattgtggatcccgcatttcggctcaatgggtttcccactcgatggcaagctcgatttttatttgaaaaatgatttttatttatttattagaaaatgatttggagtcgccacttatttttgttttatttttaaaagggtaaacaaaataagaaagaaaaaccctaagtgtgactccttatttggaaaaggtgatctacgaaaaaccggatcgggttcgggggtcaggttacttatcgggaaggtacggtaaagaccgtagcacccctctaagtccctaaagtcgggtctctactaataaaatgaagttgacacggcaaccgatgagaaagtcaatgaatacacaaatcgatcatgcacatatgagaattaaaacatgtataaagaaagagcaaaatatgaatagatgcatacctgtgcggcaatcacgaatgcgctatcatgaaacatggttagtgaacaacgaacagatataattaagcgcatatcaaggaatagagtaaataaatcatgcacggcaaataaatcaaccaaacagtcaatcaatcattcaatcaatcataaagtctcatatgtagagctcccaccaaagcctattttattcttgtatgaatcaattccataaattccatcacttggaattacggaatttaattcttacttattttaaaaacatttttaaaaacaaagaaatgcaaaagtggcttgcccgaaagaaaggggcaaccaaattttattgaagatgggatttcggcaactaaaagaactctaaggatggaaaatttgatgattcaaaatcgtttaaaaaaagaaaaaacaaagtttggaaagctacttgaaaattggagtttggagaaatcatttttaagatccaagagagaaggaacggagcaatgacacatgatcatatattgcatgccaaaggtggccatgcaaattggaattacatagaggcggaccccgggaaaagggatatgctggtaggaatgaggatgactcacatctgggtagtatgctgaaactgcttcatagaatcgcccttggcaagaaatcttcattgtttaaccaagattttgttgcaagcagttccaaagttttcccttcgtgaacactgaactgatcatctttatggcaaatccccaagcaacaacatcagtggcaaccaagattgggcccttttcactgtggaactgattcagagccctgtctagatccgattaagactcgcctctatgaattacaaaagccccaaagttacgtccaatgctacgcgtaagctggtggcacaacctctttgtggaacagaggatgatgaccttaaaatcccctttttgggatctgtgcatctattccaagcgactgctgatggattgacactcaaccatagcactagagggaccccacatgatgtaaagcattccacttccaatctgtcgcacttctgaattatggagttccgcaaattcagcttgtaaattcagctagcttagtctcctcaaattctgggttgacttgtgaagcctcttcaacttcttcatgtgtttcagtgactagattaccttgctctttcattcgaacagttccaacctctagctccttcataagccactgcaaattttgttgactttccttcaccagttatgcaccgcccacaatatccacttgtgaatctgtgaagttaccaaatgcgaaagtccccattcatttgattctcaaaacccataagacataccgggttgcaatttcaccttgctc

SEQ ID NO: 12908 - DNA, 3320 bp, Vitis vinifera
  Intron number 3 from transcript GSVIVT01018827001 (locus G SVIVG01018827001) derived from phytozome v7.0 (chr-ID chr4 ; pos 19535303 to 19538622 reverse strand)
agcgagggaacaaggaagtatgcttaattctgtattttggaatgtcatactcacgcatatgcacacttattgctttttgtatgtttgaatgggacttatgtcctttattatgacctctcttagcctagagaactcccgaatttgttttgctctcagccttgttccagtgtttaatcctggtcatattctcatggctgtgtccttgattttgggaacatgtgtttcattagttgattcattaataaaggcattggatggtgggtgataaaattgttggaaccatctacttgtattggttgtgtgttttaaaaaatcctaaggttgaagaggctgaggcataattttgaaaaggtgcaaaggtcttttatggcttaggggcaaggtgcgacccaaggtgtgtgcacaagcaaactgaaatgcaacttagggcataggtataatcttataaaatattgtagatttggacgtttaatatccatacaatatcactaactctattcaaaattcctattcatgtaacaaaaaaataaagttttctagcatttgctcaaagcgtccaacaaaaaactaatgcggtagtatataatttaattatacaatgagaaattttagaaataaatgtatggaaaaaaattcatttttttgactattcaaacattgatcacaacttcacttggagtcaaaatgccatgaatcagttttgatgaaaatggttggaaaacaaaaaatcatctctgcatatttctgcacatgaattaaaaaaatgcatcaatccatgattaggagcaagaaattaaaatgactcatttttgaacaattattgacttgttattgatcatatttctttttattattttaaaattttattattataaataaaaaataattcttatatagaaagctacaattccgtatgttttgatatatcaattatcaagaattgttgttggatgtaaaaatggctattgtaatagtttaaaagttttcaattcttaatatattacaaaccaatttgggcttgtgcttttacacctatctaaataatgtactatgtgatacatgttttttcattagtttgttgcaatcatctaattgaaattatatttctagagaatttttgtttttttttaaattttttttatgggttttaattagtatattttgcttatcacctgataccagctgtagatgttgagattgatgccttttgaatcaactatcaatattgggaatttaaattgtgttagaaagttcggagccacaggaaaggatattttggcaagggatatcatccaatggagggagtagattgaggagttccaaattgaaagaaaggataagtgtagcgggcctttgcttttgtcttctagtgcgggtttgtctctggttttaccagagactctgtgactgcggacttggttgggtgcggtgaagatgtgggtgggaaggatgtggagtcagaggagaactttgtcgattcttacaagaactttgtctcctttagcaagtacttaggtttgcctatggaaggctttgataaagaagttgactcccttttgagaaagttggaagctcgaaagggtcagagagtggtgggattgacaggtaagaggaggccttcccatgcttcttggtttgaaagggaacttcgaaagttggattgctctgttaattacaacctctcaagcagcaaatgaagacgaagtaggaagtatgggttggatttggtttctgagtgcctacgatggggctttgggtggggggatgggaggtggagaggaaaaggtggttttcagtctcttcttggtgcgctaggctttcacagtgggtggattcctcgtttttcttggaattgtggggttgggagccagacagtgacttggttttgttagtcttgtactccttagcttgttagggtttggttttgttgtttgggagccctttggcttgggttgtggtttgttgttttcttcttttgcttgtgtgtacttggtgtgcctttctctgcacttttaatctatttgcttatttacctatccaaaaaaaacaaaggttaggaaccataggaaaacataagatgttattgggtgctaacattttttagcataatgtcataggacaaccattattccgtaagttttttctaatataaatagtgctttggcccctttaatttagaaaacaaggtcatgacaatgtagttttcccatgaattcaaaaaaagaaacaaaaatgagacatgctttttcaacaagaggcaatccttaacaagtgaggcgctacgattagtgcaccttaggcctgggtgcacttttaacacctatagacacgagataagaaaaggaaagaagaagataaattaattaaaatcaatcaaaagcaaagatatccttaatgaaatcccccctctcctcttttattcttattttttctttttcatctttaaatgtttttataaaagtttgcttttcagcaagctttctctctcttcaatataactatgctaagaaagtcaaaaatagaaaaaaaaaatcaattaaaatcaagcaatcatatctgcactaaataaagtaactaacaaggatcctagacacacacacccatattaggctgtgttgacacaggtatgtgtggtaaagttgaagattttgtgtattatagattataacgaaagtgtgggtgatggactcatatttctaagttgcactagattattttaccttgaccaatgtcttttttggctaaacaatgcattatttggtaagagatgactttcgcatcatttataattaggtctcatttgacattgtatttgattgtgtaaaagctctttctaactattaaatttctttataacatgtttgattaaaatttaaagtgatttcaagtaaaaatgacttgagacttaaaagctatttgtagtaaggattggagaatatttttgcatgagtacttacaagggagggttatatacatatatatatgtctatctatcttaaagaacaatttcctttttaactagaaggtatagctgcatctaaatgggtccaaaatggtaaataatagattattttattactagagaattcagttgggaaaactaaccatgatgatttattttatggtaattttgaaacactatctttgtaggtcctattttgatgcttgggcaatatcatagaggtgtttggttatgtctttttagcttgctaggaaactcttgtaccttgaccagtttgcagtttgttggctactccatgctgccagttttatttttgtccttttttccatgtgacttgtgcaggctcaagtagattttg

SEQ ID NO: 12909 - DNA, 3704 bp, Vitis vinifera
  Intron number 11 from transcript GSVIVT01008780001 (locus GSVIVG01008780001) derived from phytozome v7.0 (chr-ID chr 18; pos 1957295 to 1960998 reverse strand)
ggttaatattgaactgaatccagaagaaactgagtgtttgctcggggaacactccgatgcccataataatggtggtagtctcaacatagtaagtacatttgatgttacaaccagccaaataattgtaccattagataatgggaggtgataggtgtttttttcttttctttttttttttttttcttttttgcataaatgatgatgtgtgccatctaatttgaaaatatggtttagtagtgtattttttgaaagtaattaactaataagcatcatgtttgcttttttttttttcttcttggtatccaatctatattgtaaacataccatttgacttttgatatgttattttcctcctctagttatgatgactctaattttggacttcagttcaatgttaactaattatctaattattataatttttgtgttaattaattaaagtcattggctcatgtcaccattgtgttttttaattatgccgaccattatatctatttctaatacaggtcacaccattatttatacttaattttatctttttaatcctctcttttagtacttgtaaaacttatgtggttacaaaaataaggctgaatgtgaagtgtgatgatggcagctaccatcaaatctagtttcataatacagatgaactcatactaaaaaaataattgtccaatcacaatgaagcgccagacgcaggctaggttggaaatgttgaattgatcatcactatatgtttattcaaattggtccatttgattgtgccactagttgagagaagaacacgttgcaaccacttattagaatattctttttaagattattatagaaattgtaatttttagagagttcctcttgtttgataattgttttcgcaaatgacattttgcgttctagaagaaaataataagaaaatacatacaataatccaaaaacaaaaaatgattttttttcctaaaaattaaaaaattagttgcatgttttcataaacacatttattcaattatttttatttgttttctaagtattattttaaaaactaattattaacaatgcttaaaaataaaattgtaaaaattatttttaaaacatatttaaaaatatagtcaaattctcaaataggcttttgttttataaaatattagagaataatttttaaaaatatatttgattgtattttagagtaatacttttaacatgtttttgaaaagaaaaaagttacatgttaagtgaaatttaataaacacttttaaattttgtaattgttgaaaaatcacttatatttttttgaaaaaaatgatatatttggcagtaattttaaaaagtgtttttaatatttttaatatttaaaaataaaaattttcaagtgttaaaaggatcaaaaacatttctaaataaaatcttaaaatccatttgattgtattttataataagaactcatttggtagtgattttaagaaacgcttttaatatttttaatatttaaaaaaatttatcatttaagtgttaaaaatattataaatattttataaaatcactctaatatttttagcctgtttttaaaaagaaaaaaactagatgttaagtcaaatttaataaacactttaaaattttgaaaatttgtaattattgaaaaattatttatatttttttgaaaaaatacttagagtactgacggtgaaaagtgtaatgccggcaactaccatcaaatttagttagatgaactcacgaggggcgacttagcgtagggtaggttggaaatgttgaattggtcatcactatatgttctttcaaattggtccatttgattgtgccactagttgagagaagaacaagacacttgtttccgaatagacgttgcaaccacttattagaatattctttttaagattattatagaaattgtagttgcgaccacttattagaatattctttttaagattattatagaaattataatttacacacggaatgagagtatcccttgtttgataattgttttccccaatgatattttgctttctccaagaaaagaagaagaagaggaaaatatatacaataatctgaaaagaaaaaaaaaattgaaaaatgaaaaattagttgttttcataaaacattttcccaattgttttggtttgtgttgtaagtattattttaaaaactaattattaagaatgattaaaaataaaacactatatataaaaattatttttaaaacatatttaaaaatataatcaaattctcaaatagatttttattttacaaaatattaaagaataattttaaaaaattatttctcaaaactattttaaaaaacacttttcaaataaagtcataaaatatatttgattgtattttagaataatacttttaacccattctttaaaagaaaaaagttagatattaagtgaaatttaacaaatacttttaaaattttgaaaatttgtaatggttaaaaaatcactaatattttttttggaaaaacatttaaagcatatttgacaatgattttgagaaacatttttagcatttctaatacttgaaaaagaaaaaatttcaagtgttagaaataccaaaaatatttcctagaattactctcgaacacactctaacatttaatctttctaacgtttgatagtgactctgaaaagtgtttttcatctttgtaacacttgaaaatttttatttttgaagaattagaaatattagaaatatttcttaaaatcactatcaaatggactcttataatgttataaaaaaacacttgaaaagtaattgattcaatcaaaaccacttttaaaaaaaacatatctaataaaaatatttcaaatataaacgaatatacttttaaccggattattccaaattacaatttcaccttgtttatattgtttatatgtatatcaatgttgtggaatccaaattcatttaccaagtccggaaacaatttagaaactcaccaattttcaactttcaagcaccttcgtcttaagttttaattggaatgaagaaattcagttttggttcataagcattatgctacacgttctggaagagagcctttgttcaacaatactttctatttatatatatatacgtgaagtagttgtttctcttacaattacataaacccccagccaagtccattggtagagtctaaagacgcccccatgcccattacttcccaggcccactcccaagccctacctaacatgaaagaagaaaacaaagacccattacttccccagaaacaagcccactagtggggacagcccaaatactaagtgggccctaaggagattttgaaaaaacagtcttgacccaaccaatccacacggttggcaggtccaaccggtggaatcacttgttggttcaacttaaaaacggtcagaaaaatccaattagatcgaaaaagggctctgatccatgattcaacaggttgagccatccagcctgcaccaattttaaaattaaatattggatttaataccatgatcactttccaagtaaaaggataagatgaaacaggcaaaatttttaatgcgttagagcttgagaaggccactaataaccataatgaaaacaaaatcatcgatccacaagaacacgaaataactttataagggaatttaaagtgaagtcccatgtgtggtcaattgctctaattagactgttgcttggagactaaagtccgtttaccagtt

SEQ ID NO: 12910 - DNA, 17017 bp, Vitis vinifera
  Intron number 7 from transcript GSVIVT01022631001 (locus G SVIVG01022631001) derived from phytozome v7.0 (chr-ID chr2 ; pos 13804006 to 13821022 reverse strand)
tgaggtaaatagagtgagtcctcttacttgggtcaaccatccagtattttagtattctaaactgtggtccagtaggcattttctcaggaattttaattgaagaaatttaataaccttcaaaagaattgatggtgagatgttgccttaaagtggatgttattttatattgcaaggaattgaaatcaaacttctcttgtaattgatgactggaaaagatggcttttggggcgaagtggataaggtggatagagtggtgcgtgtctactgccagtttttcagttttggtcaatggcatccccttgggcttttttcaaagctctaggggtctaaggcagggggaccctctttcgccttatctgtttgtgatagcaatggaaacacttagctgtctcttaaagagagttgtaagtggaggccttttgtcagcctgccaggtgcagggtagagggggatgaaggggttaagatctcccacttgctattcactgatgatacactattttttgtgaggccaacgaggaccaagtgacttttttatgttggttacttatgtggtttgaggctatctcaagtttgaaagttaacatggataaaagtgagttgatcctggtgggaagtgtggagaatgtggaggatttggcttctgagcttggttgtaaggtgggaagcttaccttccacttacttagggatgctgttgggtgctcctttcaagtttgtggtaacttgggatggagttgaggagagatttcataagagattggctatttggaagcgtcgatacatctttaagggtgggagaatcaccttgattcgaagcacattgtctaacttgcccatttactttatgtttattctccattgaccaagggtggttagattgaggttagagcagattcaaagggattttctgtgaggaggtggggctctagagtggagacctcatttagtaagatgattagcaatttgtcttgataaaagaaaggggggtttgggggttaacaacctttctacgcttaaaaaggctctcctttgcaaatggagctggcgctttgcgaatgagagagaggccttatggaatcaagtaataagggggaagtatggggaggaatggggtggttggtgttctcgggatgtaagagaggggtatggtgtagggttgtggaaagcagctttggcacatcattagtagtagattttcctttgtggtggggtaatggttgagggtaagtttttggaaggataagtggtgtgggtcaacacttttgtgtgtttctttcccctctttatttgccttagttgatcccaaagaggcttaggtgaaggatgttagatttggtttagaaggtggggggagttggagtcctcgcttcacgaggccttttaatgattgggagatggatgaggtggagggccttcttttacgcttgtgtgggaagagagtgatcttggaggaggaggatagggtatggtggatggaaacaaagaatggaaatttttcggtaaagtctctttacaaagccttagagttggacttatcaccttttttcccaatgaagatcctttggaactcttttgtgcaaccaaaagtaagtttctttgcatgggtggcaatgtggggcaaaactttaactttggactaaattcagaagaggggatgggctttggcaaatagatataatttttgtcaagcagatgaggaacccataaaccgtctacttctccattgtgaaaagacaagggctatgtgggagatgttcttcactctttttggagtgtctcgggtgtttccttctttagttaaggaaaccctcttgggttggaatgggttcattgtgggtaaaaagtgcaagatagtttggagagcggaccctttatgcatttttgaacagtttggaaggcaagaaataaaattgcctttgaagatgatgtgctgtccatccaagggctgaaagcttcttttatttacttactatggtcggagactaaaatgtttataaaagaatgtccttcgaccttaattgatttcattgattgggtgggatcccattgagggaggggttgttttttgtgtatccttttggacagtcttttgttataattattagggggtgagtgtttccttttctttcctgtacatcttaggtccctattttagcgcctcttcgtaatacaatactttccttatcaaaaaaaaaaaaaaattatagactggtctaactctgtgcctgtcttgtgttggaaccccatcttattttgtctatgcatttgtgatgtaaaaaggattgaatattgcacaatgttggggttgtaatgtagttttgaaaaattcaatcgtctttgtttgccttctccttgtcatcttgttgcctcaagaagacaagaagacacttagttccatgttgaataaaaggtaaaacttttgaggtcttattgtgaatctaacctaagctacagtggaattatgggagaattctccttctatgatcttgtagtttcttggtgttttatattgctcgaactcttagcttctgcaaaagtgtcaactctttaagtagatttgcctgcaataattagtagtcttccttctctatcaaatagatttgaacttcctagagatatgttgttgctttgtagaactcaagagcaaggaagaattggctaattttctgtcgtgtgatagtatgtaggcaatttgaatccaaactcaaagtctaagctcctactttctttctgacacttactatgttgaggaactaatatgacttgcaaaactatgatgatgaagaggttctcttgggaaggtaagtggtgtgaggttgagtgtcttctcaaatgtatatattttggctatgttacatgggtttgggtatgagtgttaggtgcgagtacgtgtttagttgtcgaatcctttgcatcccaaaatcttaagacatgggggttcgactgaaaaagatctcaatcatgggtgtgggtacctgatacaacactcattatcatatatttttattttaatttaatgtttaaacattcttgaaaattttctatttatctctaaatttttaatatattaattttgatatttatttttgatttgttattaattatcatattttttgttttaattgaatgctaaaattattaaaaattttctttaattgtaagtgtgaaattattttaataggatgttaagagaagttttaggaaattaaatagggatatttattattatatataattgattttgagtgaacctctattagttgagaactttcaaaatttatatttttaattatttaaactaaagctaatttattttcaaattttatatttttaattatttaaactaaagctaatttattttcaaattttatattaattcatttttattattttaatattgatataattcaacttaactataatttctatgtaaatatattttttaagtggataaaattagtttgaatttaatatattatttaaaaataaaattgataattcttatgatttattataatttaaaaagaaattaggaaagagataagagtcaaataacttatgttggcattatttaaaaaaaattaaagaaatttaaaaaaaattaaagacattttaaaaaagaaaaagataaacctatatccaatgtaatctaaatgtgtcaaacatggatctcatgcttgcacccatgtcatattttgtcaacatgagcattttggttgaaattgaagtatcagagtattttggcttgaaaaacaatttgtagttggagtatgggcgattgaacaaatgatatatcatttcacgtttgattgatttattggtcctaaaggataatcaatcgattagttggcagtgtcctttcacctagcttaggacaatcaactgatccttggcttgattgattagccatcaagcttttaatttaagagtggttttttctattggtccaagattgaaattgtttggagaatttgactcaaataggattttgttgtttcttttaatataaattctcaattagaaaaacctcaatgagagaaagagaaagggatagagagagagagagagagagagagagagagagagagccattcttagagaaagagatcttttgctctttgtttgtttgttttgttcttagaaacaaaagatgcgttaattatgaaaatagtacatgagaaggatgagaggtcctccacacaaaatataagaaattgatcaaagtatgtctaaactcctccactataatatttgggtggataaggtcctaaccaaagtggctttttttgcgtgggaggctacttgggaaaaaatcctcacgttggataggctgcaaatgcgtgggtggcagcttccaaattgttgttttttgtgtggttgtgaagaggaaaatgtaaatcacattcttttagactgtacagtggttaggaccctttgggatatcacctttgccttatttggggttcagtgggtgtttccagagaaggtcaaagaggcgttgttctgttggtggggcccttttgtgggtaaaaaaaggaagaagatatggaagaccattccgttatgtattttttggacagtgtggaaagaaagaaataggttagcttttagagggggtcttttggctattcagactcttaagaattcttttgtatgtagtctgtggagttgggctaagttgtataggggagaggagtcctcttcacttctaggcttcttggaatggttagcggtcccctaagggctggtgaggtgttcctgtttctgtttttttggccttgtggctgctttgtatacctcctgtatgcgatgcggcctttcggccttctttaatatattttctgctctcgcttatcaaaaaaaaactcctccactatacaagaagaactatatgcacggtttagtccacttaaggatatacataggtgacatctcctcaattttggacttagctcctctcattgttatccaaccttttttatttacaaaccgaatgccaactaaattaaataacatggagtggaatgcctttaaagacgttggaacaagaggccccaaaggaggaatagaagtgaggtagatctcacaacatctattctgttttggacttttccttaaagattctagcattctctcttgccacacaatctaagacatagtaatgtaagcaattgctaaagggtcttgcctttgatggaactccttaaatctttatatgaaatggtcatcatgtcacagatattcttgggcgaaacttaattcatcctggctagattgaatagcttgtgtgaaagccctaacgttaatgggcaatgtagaaagatatggttgattgattcttcgctccttgtgtagaagatgcaccaatcaggattaaggaatttgtaagatcttctcaactgtggtctgtcattaatgtttaccttcttgtgtacccctaataaagcaaagaccttgaccttagatgagcctttttattttcataacaatttagttggaatgaaagaaactggatctgattaattatacaatgccaaaagagtgattttattgagaataaatttgaaaaggataaaggccaagctcttgtatttctggtggatggagacaattgtacaagagtgagtgaggacataagtcttgtaaggttctcaattttcaaatcagtggggttgtgacaaaagtcaagctttcaaaaaattgaagaaaagttaccaatgacatctaatatggtgagatttttcactttattaactctataaagacttgaaaattgtgatcacaatggttgatttccttcgcacaaagtgacagagatttttcagtgtgataactctttttctctttgtttttggaatcaagttttaaggattgcatcttgcctttcttaacacccaatctttcatgaatttattatgcccacctttcatgaaaaaggtaagtccttcaagggttcgagggagctagtaggttgcatgaaggaggcttgaagtcgatcttcctaaaaagtgagtgaggatgattatgtaaaggatgtaaaaaaggatacgagtgaaaaaaagagtaagtgcttaaggagcattgaacatcgtgggttgggtgaaactttataaatttatttaaattagtgaatagatctaaaggctttgccacaaattagtttttcctatttatctttattatttattgtacaaggcatttttttttttttggtgattctcctttgttctcaaggttttatgtttgtatttccttttgggttaagggaatattttattttttacgagactcttttatcttctttttttgaattaagagaaccctatatatatagttgtgttacttgtgtacaagtttcaatataaacaatgaaaatcagttctttcttctaacaataatgttaaattacctatttgatttaaaagcttaagttataagttgagctaaggatgtacatgaggctaatagcctccctcacatgtgacctaatctgcacatggaaaggcaaaccacagattatggatcacagataagcagctgaaagaataagcagatgtaaaagtttgaaatcaagtcttatagtaaaatggagctaacaattaaacctaaatatttaagctattaattaatgaatcaacaatgtataagaggccaacaaataacaaatttctagtcacccttcactaagagattggatcccgaccttaatagccaaaccctctccagtaggcttggaaaagactcttaaaattgtactactaaggtctatgatcactccacccatttgaatgaggctaggatttggatctagttggcctattaaagcctccctagtgaacactttcggacgatccccaatccccatttggcctatattccacaataaatatctaacaaaatttaatttaatatcctatagattgggttttccaactgcaccaaccttaacctaagtccagctactaactctaccaccaaatacctctttgcaatccaatataatcaaaccaagaataagaactctatagaacttaaccccctaacaaagtaaagtagtaaagcctcctagaaggattctagtggtgtccacttggccttgatagaagttttacccaagttcatttttaaaatgttaaatgtcaaacttgagtttccaacatagcacgtttagtctagcattggaaccagatctaatgttatcaatttaaacataagtcgaaccatacttttgattaaagaaggctagtaaaaatttgttgtagctttctgtcaccagctttctaaatgttgcatcaataccaaaatattgccatatcttctctattacttggataaaatagcaaggagatcccccaaaagattaacactagattacaaataaactttagttgatgaagaaaaagaaaataaagatctgcacattgatctacataaaataaatctatgattttgttaattattatttttcttcattttgatgttgtaattactacttttgcaccaataatttccatggtactctttaaattcaaggtaatttttggtttcctagatctatccccacttgagggtccttctagcatggcatgaacctaaggcaagcatttatcttacaaataattgatcgttaaagtatatggagaaccacactaatgattttttattcaatttccagaagagcaaagcaatatatatcttaaaaaacaattcaatataaaactattagattgacacttctccaaatttacaattgtggaaaataatatacaactgttattctaaatattagttatttaagattacatggaatatacacaatctatataggaaaccagaaacgaaaaagcaaaaaaaggggagagcctatttccatagttgttaacttgtataacatatcatgtatcatttttctctgttttatcatgtatcatatcatgtgaaagtttgtaaatcttgcttatggaatacctagcggggatgaataggtgtttagaacttttggcacaaaaaattaattactttttaatcctgtaataaccacttttcaatctaggaaagcctaacaccattcaacacaagacaaagaggattttttatgtggaaaactacccacacaacatgtgggtgtagaaatgacgaggtcagagacctcgaatcaacaatccactatatgagaaagtagtatgcaaaattacttggcaaatgctacgcaaaattacttggcagatgctacccttagacttgctctccaaaacttatgctacaaccaatgtctgcaatgcagcacctcgtgtactctaatgtatcttgcctcagcgcttgagaggatgtagatctccttcccaacccaacaaatggaaaaccaaacatattttagagttttgggttaagtgtaaaaaataatgacttaaaagtttaggtgcattttctctagagagaactctcccaataggcatatataaaagaaaacctagtagacttggaatcaatttagaaatcatattttaccaaaataataatttagaaacttaagaattttaagaagatttggaaatattttatattttaaatttaaaaatatttggaaagatttccttttaaaattcttaatttaaattgttttctaaatctcctttccaaattccttaaaagatttggaaagattctctttttaaaattctcaatttaaaattcattcttcaaattaattttattatttggaaagatttttttttcttttttttaatacttaagttaaaattcattccaaattaattttatttctaattttcatatgtccactctatatcttttatgtcattatttataaaataactcatacatacttacctgtttcatctagacttgattttgcaccaaccttgaatcttcaaaggagtgtaaatcataggaaagtacacaaaattataaactaggataaatggaacaaaattgccaacttattctaaataacctaatatgctaacatcatgcattataagttttttatatgtgaaaaattaaatagaaaaaatatgcatacatgtacattcatattggaagcataaaatatagaattatatataaccaatttcatgaaagatggatttaaaaattttaaactacatcataccacatgagaacattgaatattagagttttgaaattctaactgaacaaaacatgagtttaatttataagttcatcaccaaattcataaaactaaacttaaatttttagtcttaaattttattaggcatatgtactttatatgtgttgttgatatatgtctttatatgtcatctacaaggctccaactttttatatttgcaagaataatatattaagtaaagtctttattcatcaattactattgtttttaatatcaaaattcaaatcattcaaatggaaattctcccatattcattgtaagaataaatttacataagttccaacatgacctttgacaactagaatgtaacttttcatataggatttttttttctctcttttataatttattgaacaaccaattttcctaaaagtttaagtttgtaggattttggcccacaatatatatcatacacttttaacactttccctcatgggtagcccaatacccacacatggagagacacataagccatagacaaacaaccacaatcagcctcttttgagattacttaataattagggatataaatagtgtattgtaggtttttaacaactatgcctttttttagcctagaaaaactcttcaaaaacaaaagaaaaaaaaaatagttaaataaactaagatggaaaaaaatcaatttacaactattagctggaaaatccttatacaagttgtgcgtacatttcaacactctccatcaagttggtaaataagtgttctttattcccaacttgcttatgatctcttgagatgaatgggatgcaattcctttagtcaatatattgtctatggttttatctagaaatgtaaggggtgcaagctagcttactatccatttttatttatttatttttatttttatttttattacatttgttgagcaataggaaagacaatgaggcaagtttcttgtgggacttaccctaacctgcaattattaggatgagttttaaaagaggtaagggagaaaggggcaagtttgggtatttttaaagaaccagctttgaccgcaatattttgctgtcctggcccccaacccagtccatagaaatagtaaatttactatatactttatttaaattactaatgtgccttcataagaagttcccccaaacattacaactgtaatccttcttcattctctcttcattgtcctcccttactggcattttttttaatctctatctcttgcttcacaaatgtgatgccatctccatagtccaccttatgcttcaaaaagtgaaagccatctcttttctatttgacatttctcaaatagaatatttatactttttcacaaatctctcctttttgttgatggaaaacatgggaaaagaaaatattagcaccaattatagagacctctttggtgcttgttcacatcctttgcattgtctcacatttgtaattggagactaggttggatactttttttattctttcttttcattttttttttacttgtttgagactaaggttttgggtttacacaagttgaagagatttttcattaatttttttttcttttatcttgtttcatggttgtaaaaatgaaacaaatagatctctttttttttttttttttttttttgaattagcattgaatggattgattttttattttttatttttatccaaaaacaaataaggttggtattaattattatttttctatttacccaacttcctaagccatgggaaatcaatagaatcccctgattttagggcctgatcaactctaaaggacctatatattgtatatattagttgttaatattagctagtagaattagttgatcaatgtacaagttaggataattgtaacagtcaactattgactaggataactgtaaattagtgattagaacaattgtaaattgggtgtttgcctcttagacactactatatatgtgtacttttctttaatcaagtatcagagttggttttcaaccaatatgatatcagagccactttagttccttaggctcaatttttttctggcgacttagccttacctttcttccttattttttcttgttgtctctgtccttccttctctcaattttggtgtttgcttcttctttcgccctttctaaaacttttttctccatttttcagttctcctcatgcctgaacaaacctccaatcagacttccataggccctaaagtctccaatcaacttgataatcctactctccaaatcaccacccaaaaactcaatgatcataatttcctcgagtggtctcagtcagccaaactctttctattaagttgagggaagatggggtatctacgtgggacaataacaaagccagaaacttcagatcgtaactttgaattgtgggaagctgaaactctttaataatgtcctgattgctgaattcaatgcaaccagaaatagctaagcctttcttatttctctctaaggagatgctgctaaagtgtttgaattgatgaacaagattcctatgatcaaacaaggagaattgacattcacaacatactataatacattgaaggtattatggcatgatgttgacatttaccaatacattgaaatggaatcaccaaagaatgttgcaaagcttgctgacttattggaaagacgaaggatctttgaattccttgctggcttgaatctggagctagatcaggtaaggagtcgaatccttggaaaagttccccttccttcattgaatgaagtgtgtttcccttgtgcgtagtgaagaatccagaattcgtgttatgatgaaatcaccatatcatgataattctgctctcaatgtgattgtggagaacaatccaaacacaaacaaaggaggagaaaaaagatacaagatggtgtgattattgcaaaagtcctaaacacacaagagagacatgttggagactgaatggaaggccacaataagggaacaagaattgaaaattttccaagcctagtaagagtttccaagttgaaacagcatcagacctcaccactactactaatgaatctgtattagctaatgagaatctgccttttacaaaggaacaacttgatctttttttgtataagatcatgggaaagttagaggttattcccacctccgattcttgtgcttttgcacaatcaggtacactcctccataaagctcttacaaccactgttgtatctaattctactcttggatcattgattcaggcgttagtgatcatatgaccaaagaacccaattttttcttgtcatatatatcctgttttggccaggataaggtgcaggttgctgatggaacttttactccacttagtggtaaaggaaatgtgtctttttcaccaaagattacccttacttctgtattgcatgctccaaaaatgtcttgtaaccttctgtcaatcagcaaacttacaaaaaccgacaactgttcaggaacttttttcccaaattattgtgttttcaaggaccttactttggggaagatgattggcagtgctaaggagagaaatggcctatactacctagacactgaggaaggagaaaaagttcaggcttatcaaataaagaggactgctgaatgattttctgaaatacagggggctgctgaaggactttttgaaagctattggctaatgcatgagagattaggacatccaagtttctcttacctacaacagttgtatcctaaactttgtatcaacctaaataactctaagctcaggtgtgaagtttgtgaatgcaaaacaccatcgggttctctaccctataagtaataagagaagtgaagttaatttctctattatacatacagatgtgtggggaccttcacaggtaacttgtctttctggggctaggtggtttattagttttattgacgattgcaacaggactacttgggcacatctattagaggggaaatatgaaactatgctcatcttgcaaaacttctgcaaaattatacaaacacaatttggcgtccaaatatgagtgattagatctgataatggaattgagtacttcaatgaaagtctaagtacgttcttcactcaaaatggtattattgaccaatctacatgtgtggatacccctcaacaaaatggggtggctgaacgaaagaatagacctctccttgaagtagctcgagcacttacgttaaggaatgttccaatgactttttggggggatgctatccttatagcaacctaatgaatcatatgccttcaaaagcccttgacttcaaaattcccattaaaaccttgaaaaattatttttcccatatatcatggtttgggactctctccaaaaggatttggatgccctatttttgttcatatcccaagtaagggcaaatctaaacttgaccctagagctactaaatgtatcttcttgggctactctcccactaaaaaatgctaccatcctccttctcgaaagaaatttgttacaatggatattaaattctttgaggaccaaccttattatcaaaagactaatcttttggaggagaacttggaagtggaagatcagccccacgattggtccctacctttgccaatgcctacttgggaggatgagagaaatggaattcaaggggagcctaaaaaatcagagctacaaaatcaagggaagcctcaggatttagagttgtttgtttacttaagaagacctcgagaaactaggttggaacaaggtcaaaatcctccaaagcacaatcgatcattgaccctaggagaaggtatctctcctaatctttctgattctacaattttaaatcctcccaatgttgtccaagtggttgatactaatttggacattcctatagccatcaaaaaaggcgttaggaattgtaccgaacatcctttgtcgaatttcttgtcatatcacaagatgaacaacaaccataagacctttgctacaaacttgagttcaaatttagtcccaaaaaatattcaagaagcacttgttgaccgtaagtggaaggaggcaatagatgaagaaatgaaggctctgtacaagaatgatacatgggatatagttgatctgcctaaaggaaatcatctggttggatctaagtgggtgtttaccaccaagtacaaagctaatggctttgtagagagatataaagcaagattggtctctaaggggtacacccaaacatacgagattgactactaagagacctttgcacctattgcaaagatgaactcaatcagaatcctactatctcttgctacaaattgcgattggtcacttcaataatttgatgtaaaaaatgcttttcttcatgggaacttggaagaagaagtcttcatgggtgtacctcatggattcgaggggtagtttaagaatgagaagttgtgtaagttgaacaagtctttattcgacttgaaatagtccccgagggcttgatttgaatgatttgctcaatcccttgtggggttcaaatattagcaaagccaaggaaactacacattgtttgtcaaatgttcaccaaggaaagaggtaactatttttattgtctatgtgaatgacattatagtcactagagatgatcatgaggagatacagaacttgaaagataaattagctaaggaattcgaaattaaagacttgggaagtcttagatatttccttggcattgaaattgcatgatcaaaagaaggaatatatgtctcagagaaagtaaattcttgatcttctggaacaaatcggaatgttcgggtgtaagcctttggatacacctatagatcataatcataagttggggataaacttagacggagtattggttgataaaagaagatattgaagacttgttggcaatttgatatgcctttctcatactaggccagacattgcatatgttgttgttgttgtgagtcaattcatgcatgctcccttagaagatcagttggaagttgtaatgaggatattaagatatttgaaggctactccagacatgagtttgttattctctaaaaatggtcacatgtaagtagaggcttacactgatgctaattatgttggatctataaccaacaggagattgatcatctcttcttacattatccgattactttgggattgtggcacaaatttttttcataggctgggatggagtgggttcagcctagcagtatttgtgatatgttggtaatctccttcaagtgttttgagaattctattagaggcaagactctttggaaaattgcgtctctctctctctcttatggattgtgtggagagagagaaatgctaggattttcaaggacatttggaagacaccagagatgatgtgggatcaacttcatttttatgttactttttgggcttattgtacagacatttttaaaccctatcctttgagtgtaatccaacttagttggctcccgttatgtacaccgtaggtttgggtttagagggttaggattcttttacttgtataggcattttgttccttttgtatagccctccttgggttagaggtttacttagttctttcgatcacacggccttttgtacctcttgtatagccttccttggttagtggaggtttacctagttcttttgattaggtttgtacttcatggggaggatttctcatccttttcatgtcccttttctctattaatacatatattttgtttctaataaaaaaataaaaataaaaataatcgacaggagatcacttcagggtattgcccctttgtaaggggcaacatggtgacttggaggagtaaaaaacaaccaatagctgctagatcaagtgttgaggctgaataccaagctatgacccaaggtatttgtaaactcatgtggatcaaaactctactaaaagaattacaagtagacattgaagaacctatgaggctatattgcgacaataaggcagccataagcatcacacataacccagtttaacacgattgcactaaacatgttgaagtggatagacacttcatcaaagaaaagaattgatgatagtcttatttgcacttcttttgtttcatataaaatgcacttggctgatatattcactaaaggagtgtctaatccaagcttcaactcagtgacatgcaagctaggaatgaagaatatcttcaaaccagcttgaggggagtgtgggaaatcaatagaatcccttcattttagggcctgatcagctctaaaggacctaaatatattagctgttaatattagcttgtagaattagtcaatcaatgtacaaattaggattattgtaacagtcaactattgattaggatagctgtaagttagtgattagaacagctgttaattgggtgtttgcctcttagacactactatatgtgtactattctttaatcaaatatcagagttgtttttcaaccaatataaaccgacctggccgatcctggaatgggattcatggtcctaccttgtgttggttttgagcttggaccagggttgatgatttatatcaataggaaggggtttggtgggggtgcactccaacttgaacctgcccctttgcgatccctaattgtatggtcttgtataggctcttggtatcctagtaggtgtatattttggtaccctttttcactttaaattatgtcttcttgcctttctggcctgtttgaaattcagcaagggacaacaaattcagaatcttatcattttttaaccaggtgaaaaagaagggaaaacagaatccttcagatgtgtatttctttttcttttttttttttttggcttatagaacttgaacaatgcttgatgcttttggaacctaatgctatcatatcatatattagtgagcatggcattttttaacttgctcttgtttattattttctttgctttttgtttttaggagaacta

SEQ ID NO: 12911 - DNA, 9627 bp, Vitis vinifera
  Intron number 5 from transcript GSVIVT01036936001 (locus G SVIVG01036936001) derived from phytozome v7.0 (chr-ID chr2 ; pos 17343618 to 17353244)
tcagaattgggaaattgcacagagttgcaagcattgtaagtacaactatgtgtcatttagtaacgcctacatgctagtattaatctgaatatatttttcttatttcctgaaaatgaagataatgttaaatttgtggaaattttcattactattttctaaatatttcctaattttgtgtcaattcaagtgctgtatagctgaacatatgatataatatacagataacagagatacattttggttttttgccaataaaaaaaatgatgtatgtagaactaagcacacatctgtgtgagaaatttttttttcaactcttaaatttgctgttttatactaaacaaatggaataaaagttgtttcaatgactaatataggattctgtattctttccaagatagattatgctggtgcttaaacatgcattttggtttgtgcagtctaaatataaaaaaaaaagtctacaaaaggtacctcattagaggacagttcttaaatttcataattaggaactccaaatggagtcctatctcatcagatatcatgtatatgttgttctgtggaaaaggtctattctagaaggaggaacaaaatctcttctgctgtccctaggcctcttaagattctggtttctttggtgcgtattgggctttcttgtaattatgaaaatcatcagttggaatattagaggtcttggttccagaaagaaaagaagggtggtgaaggattttttgtttcatgaaaatctggatgttgttttgttgcaggaaataaaaagggagtcatgtgataggaggtttgtgggtactgcatggaaggttagaaacaaaagaatgggctgttctcctagctatcggggctttgggaatggtagcaatcttttgggatgctttgaagtttaagtgcttagaggttgtcctagggtttttctcagtgacagtcaagttggaatcagaggaagaaggttttttctagctcactttggtttatagtcctagtacttcccaccttagaaaggatttttgggcaaagcttcaagatctttctggtttaacttttctgaaatggtgtgttggtggggattttaatgttctaagataagaagattttcagaaaagttaggaggttccaggttaatcctaagcatgagagattttgatgattttataagagaaaatgagttaattgatcctcttagaaatgcttctttcacttggtcaaatttgcaaaaaaaccccgtttgcaagaggttggatagatttttgtattcaagtgagtgggtgcaaggattccctcaaagtatccaagaagcactccctagattgacatcagatcattgtccgattgttttagacaccaatccttttaattggggcccaaccttttagatatgaaaacgcatggttgctttattcagatttcaaggaaaatttcaattgttggtgaaatgagtgtcggtttgaaggatgggaaggtcacaagttcataaaaaagctatagtttgtcaagtcaaaattaaaagagtggaatagggtgtcttttggtgacttaaaggagaaaaagaaaactattctcacagacattgttggtttggatgcgaaggtataggaagggattctgactcttgaacttgctgcaagaaggaccttaaggaaagggtaattagaacaggtattgttaaaggaagtggtgttttggagacaaaaaacaagggtcaaatagataaaagaagggattgtaattctaaattttttcacaaggtgatcaatggtaggtggaataggaagttcattaagtccttggtgttagaagatgggatagttttagataacattgaaagcattgaaagcatttaagaggagatcaaactcattccgggaagttattctcaaagccttaaagtgactcatggaggatagaaggcatggattggttttccttttcaacagagaatgctctttggttggatcatcctttttcggaagaggagattcacaatgttgtgttgcatttaaacaaggcaaagggccccgaccaaaggtttaaaatatccggatatattctcgatatatctctaatatatccaatatctgtggatcccaatacaaaatttgggaagatatatccatcaaccaatatttttgaatattttatcgatattttttcaattttttgatttttcaattattaaataaattaattctaattattttatttttccatttgatttaatttattatataaaaacgtaattttcttaataggtcttttttatataatctatatatttattgtctataaaaaaaaatgatctatatatttattaaatataaaaatataaatatttaaaaaattatgcatatattattatttatttgatatcattgaatgcatttaaattaaattggatcataattttaatatttaaaatattttaaaattagacatgttattatattattgtaaaataatatgtaatgcaacttaataataaatatacacttataaaatttatatttttttatcaatgtagaggatattattattaaatatgataaattatatatatcaagttttttaaataactttaaaatgtctatttttacttcttatataatgttttagagtttttcttaatatttttagaattttcattaatttttatgtcatcaatattttgtattaaaatatctgtcgatatatctccgatataattaatatatctgtaaaatcaaagtaccaatatatccgttattattgatattttcattcttgctatggcccagatgactttaccattgcgctataccaggagtgttgggagatgattaagggcggtcttttaagggtgttcccaaagtttcataaaaatgagataattaatcaaaacactaatgtgaccttcgttgctctggtgccaaaaacgagtcaaactagcaaaatctcatattttagacctatcaatttggttaccgatttgtacaagatcatagctaaggtacttttagggtggttgcgtaaggttttgctggataccattttcatgtctcaaggtgtttttgttgaggagaggcaaattttggatgttgttttgattactaatgcgttggtggatgagaaaaggaggtcaagagaggtatgggtagtctttaaaattgatttggaaaagatctatgatcatgttgattggggttttttggaccatgtacttgaaagaacagggtttggttcaagatggaggtcctggatgaggggatttacaattttgtagtcttagtgaatggaattgccacaggttggattaaggcacatagaggcttaagacaaggagatcgtctttccccttttcttttcaccattgtggctgatattttaagtaggttgatggtgagagtggaggagagaggcctttttgaggggtttctagcgggtagaaataggattagagtgtctcatttacaatttgttgatgacactatctttttttctagagcctccttagaagagctgcattctctcaagctattttttttggtttttgggcgactttcggggctaaggatcaatctaaataagagcattctttttggaatcaacattagttgagagaaaactaccaggatcacttcaatgcttgatcgtgtagtctctgattgacctttaacttatttcttcctttaggggggaatccaaaatcaatctcattttgggatctagtgattgaatagagtctctaggaggttggatgggagctttttggtccctgggaggtagaattacgctaatccaatcttgtttaatgcacatcctgatttttttcttatcccttttcaaaattcctgcatcaatagcttcaaggattgaaaagatgaaaaaagattttttatggttgggttttggggtggataaaaaggatcatctggtcagttgagatctagtgtgtaggcctaaggagtttgttgggttagggtttgggaaaattgctttgaggaatcaaggttaagtagggaagtgactaaagaggtatcttaaggagagttcctactctttggcatcaagtcatcttaagtatctatgggacaccaataatatagttagatggtcagaccgttgctcctagaagaccattgcacttattctctaggttttttttacacacactcgctttgtggtgggtgatgggaccataattcaattttaggaaggttttgtggtgaagggatcaacctttgcattcacaatttcctaggcttttcagagttaccacgtctagaaacccatccatctcaactatcttgggtaatgacacctctttgtcttgggatctttatttctgtcggaacctaattgatgtggagattgaagatatcgaaagactaatgaccttattctctcgtgtacatttgtctccttttattttagatgcgaaaacttgggtaattttttcttctgaagtatttttagtaaaatcttttttcttaactttgtcaaaattttcagattcagttcctttttacctaacaattttatttttatttattttatttatttttatttttattttctgtgaaaattaagagtcccttctaagatcaggacctttgcttggttagtgacacataagaaggtaaataccaatgatatgttatagtgtaaaaggccatccaaagcccgtagtcttgattggtgcaccctttgtaggagtggagagacggttggttatctctttctacattgtttgattacgtttgggttatagcacaggatattctcataggctaggatggtgtgggttcacccatacaatattcgtgatatgatgattatttctttcaagtgttttggtaactctaccagaggcaaaactcttcggaagattgtttgtctcactttgttgtggattgtgtgaagagagaggaatgttaagatttttaaggatacttggaagatgcctgagatgatgtgagacttgcttcatttacatgtttctttttgggtctattgtactaacatttttaaacaatttcctttgagtgtgatttagcttatcctttgagtgtaattcaacttaattggctttcagtatgtccaccctaagggtgggtttactaggtgaggtccttagttgagcttcaggagttgttatacttgtatagtcttttttggttccttttgtatagtcctccttgtatagtggaggtttctttgggccttttgatcaagtttgtatttcatggggaggatttttcatccttctcctgtttttattcactttaattaatacatattttctttctgatgaaaaaaaaaaaaatgttgtcctcatctgatcattacaaaaaatgcaaattaatttaaaacatttttgatggaaaattaagataagtctcaagggcttgatgcttttgatggcgttttaatatttccactgaaatattgacaaattagttgagtgctgaatgtatcattgcttttttgtcacctttgtatactttctatgtcttttggtgtgcctctttttgattaggtactgttaataatattcttatttgcctatcaaaaagaaaacagaaagtgctgaatgtggtttttggctcttaataagaaaaatgacgagacgcttaaggagtccactaagttgtctttgccttctcgagggagaaattgtggtggttctagaaaagaggggagtgccaattatatagatcaaggtaaaaccagttgaaagaaatgctctatctacttggtcaaatttgcaggatttacctgtttgcaagagattatatagatttctattttcacatgcgtgggagcacatcttccccattgtctccaagaagccttacctaggttcacatctgactattgattgattgtctttgataacaacctattcaagtgaggttcaactccttgtagatttgaaaacatgtggttgttgcacctagatttcaaggctagcctttagttcatggtggaaagagtttcgagtgggatggttagagattcatgaaaaggctacaatatgtcaaatcaaaattgaaggaatggaacaatgtatcatttggtgtcttaaaggaaaagaaaaagaatattcttaaagacctaaaaagcattgatgcttgtgagtagaaagggagtatgactccaaagcttttagctctaaggaccttaaggaaaggggggatggagaaattattgttaaggcaagaagtgctttggaggcaaaaggctagggttagatgggttaaagaaggggactgcaattcaaagttcttccataggatggctaacaagaagctcaccagtctttagagaatgaagaaggggaaactttatataacatggaaaacatcttagaggagataaagaatttttttgagaaattatatgctaagccccttggaatttcgtggagattagtgaggttagactggtctctaattttagaagtgagtgcaaattggttggaacgtccttttctgaagaggaaatccataaagttgtctttctattaggcaaggaaaaggctcttggtcagatggattctccttaaccgtgtttcaggaatgttgggaagtgataactgagggtttattaaactttcttacatagttccataacaacggggtaatcaaccaaagtactaatgcttactttatcacacttgtgccaaaaaccaattaggcctttaagatattagactttggatcaatcaatttggtcacaagtctgtataagatcatagccaaagtgctaccatgtcgtctttagggagtccttcatgaaaccatccatatttcctagggagcttttgttaaggggagataaattttggacacggtattgatagccaatgaaatggtggatgggaaaagaagttcagagaaggaagttgtggtcttcaaaattgattttgaaaagacctatggtcatatagatttggcatgtcttgaccatgcattggaaggaaggggtttattactagatggagattatagattacaggatttttatattcaatgaattttgatgtattagtgaatggaaatgccaaagggtgatttaaagcaactagaagtctaaggcaagaagatcctcttttccccttccttttcatcattgtaatagatgtcttaagtaggatgcctagaagagcaaagtggtattcttgaagggattcaagtagggaggagtaggagtaaggtgtcacatttggtatttactgatgacactatcttcttctctagtgtcagtgaggtgaagttgcaaaatctaaagctaatcttgttgatttttgggcacatttcagggctcaagatcaatttagacaaaaacactctattaggaatcaatactagtcaaagataagatctctaaactggcttcattgctagaatgtaaaaacttatgagtggtccttatcctatcatagtctctttcttaggggaaaccctaagactaacgtctattgggactcggttattgacaaaatctcaaggagattggatggattgaagaacccatttttgtccttaggtgaaagaataaacttaatccaatcttgtttctctcatatccctagttacttcctttctttgtacaaaatcccttcattagtggtgaataggattaacaaaatacaaagggattttctttggccaagttttggggagggatcaccctataagttggaaccaagtttgaaagtctaaggaggaaggagagttggggttaaggagaatttctttgagggccccccccattagggaagtggctttggaggtttcttaggaaaagtttagccctttagcataaggttatattgagcatctatgggatacttcccaaaggttggatgctaacatttcattcaggtgatcatattgttgcccttgaaggccattgcttaggtcttttaggatatctccattcatatccagtttttggtcggcaatgggcaaagatttgcttataggaagatttgtggtgggggaacgtcctttgatttatcaatttcttaatctatataaaattgtgttggagataagtttaaaaatctgttaaatgcacatgttttcaagataattattttgaatgtaatatttataaatagttatgcttaaattactttcattaattttcgtagtctttgatatatagcatagataaataatcttttaaaaaattattagcacacatgagttttctctactattgaagattagtttgaaaagttattaaatacatgtattttaaattacttgcaataattttcatagtttttgatatgtagcatagataaataatagttttatgttttaccatgctatagcctaacaatgaaaaatgatgtaagataaaataaaattatttataagagtaatttatttttggtttgagtcagatttttcataatttacttttaatttagttttctaatatggttaattaaataaataaattatttgtaacattagagctattttataaatgtaatttattatgttttttaactattgaactgtagtctattgtgttttcaagtattcaaattcaataaaataaaatttttattttcaaagtcatattccttatcaatgcatgttgtattattgactaatgtcacaaattttatcatgcatatggtattttcttaaaaaaaacctaatttaatttgtgcatcacttttacttttattacattcctcattttttttttcaaaattttcttatttttggtcaactttcattttttttttcaatcctttagcagtattttaattgatttcgttattgttgtaaaattgaaccatcgatattttgttgatattgacattttcatcattgattagtcatgatagatgcattattagtgggaagtgtgtgaaccacttgtttcatcattctcttggctcataagacttatgacaactattttctctttcatgagcattctctaggtggtcttaaaaagactctagacacattaactattttgtttcaagggttcatcgaaggtgataggagtggagtcctttaggaatgttggatgtttggggattgtcaaagacatttaactaagttgacagataagattttatcttggagttctctttatgtctcagtggttctattcaaccagggtttgattgtttatcctaatttaggggcaacctttctagtgctagttacttttagtcaacttcatggaatgttttgattgaaaaatggaccttccaaaaacctttcatatcaataaatagtttatttctgattaaaaaaagtggatgttgcttttgcctttgattgtgtcctttttttgttttctcctatgtgtacgtgaatgtgtgataagattcatgttttgtcaaatcatttattcctaaattttaatgcattttatatgttaaaatgtatttgtagtgtattgcaataatttgtttaacttattttcttttatgtaaggagtatttcatttatcagtcttcttttgcagatatttgcaggccaatatttgtagtgtattgaaataatttgtttatcttattttcttttatgttaagagtatttcatttatcaatcttcttttgcagatatttgcagggcaactacttaagtggattaattc

SEQ ID NO: 12912 - DNA, 15776 bp, Vitis vinifera
  Intron number 1 from transcript GSVIVT01031962001 (locus G SVIVG01031962001) derived from phytozome v7.0 (chr-ID chr3 ; pos 5744165 to 5759940 reverse strand)
acttgcgatcttttctcatccattagaacagaattgtgcgctaatggtcatagaagatgaggatatccactttaaaatcattattttattttagacgataaggtctataccttggacttcatcccaatataaaattctgaaaacaggtgttacatgattacatcacatccttaatgggccagtattcagtgttcataattttttagaaatggctgacagcaattgggctggcagcacatcaatgcggattcaagactttatgggccttcaacccaaattcacttgattgggcttgggccaaacttttaaataaaaagtgttgggctaacaaactaactcacgacattgatttttaaagacatggcatttctaatgggcccgtcaagaaaatttcactcaaaaagaaaaaaaaaaaaaaaagcttgacattttagaatatttcacgtgaatatcaaacccaatataaagttatttactaataaaaaacaattcttaaactattcaaaagttcttgatgaaattttcacttaggcaatgcttaattgttagaaaattgagggaaaaaaataataaaattaaaatttaaacttaagccccgttggtcctgttttctaaaattaatttttaaaaattaatttttttttctttaacataaaaatagtttttaaaaacaagattaagaaaacatggtcaagcgaacccatattttccttttatttttaaaaactcataaaaacaactcttatttttaaaaaattgttatttatttcactttgttttaaaaattatttttagataataataccaaataatattttaaaaaaatatttttaaatcacgtatccaaagatgcaattttatttttttatttttaaataaaattaataatattttttatataaaatacaagaattttaggacgactacaataaaaactctttttttttttaaaatgtgccaaaaaaaatttcctagtttaaattcaaaaaaatttaaaagtaacttttaaaattataagaattttttttcttttcgacaaaagattctatttttatatcaaattagttattattttatgattttaaacaagtaaaataataaatgtatctaaatagacacttaataaattatttttgcatttatttttatattatttttttatttatttgtaaaaaataaataatttaaaaatatataattttaaattaatttttattctatcaacgtatcattagtagaattaaagttaattttaaataattatattgtcgaaaagaaaaactaatattattgagaaggcaatagtaaagccaatgggccaagttccaaaagaaaaactctcaagtaaagttaaatttggatcctcattggaagaggtaaacgtacggaatatttctttggatggtggagactggagaggatggcaaccatgatataaagcggcaggggcttctttttttttgccttcctttgagacaataaaaatgaaaagaagggaaaatctgtccttttgaatggagtggaacacccgtgattatgtgaggaaccaaaaacagtggcatgattcgaggatgaaatcttggaggcccttacagttggcatggagtcttcgagaagcttctgtactaaactcacatctttttagggttaattttattgaacattcaattctcgggtttgcctaaaaccaatttaataacttaaagtaatttaataacttaatttaagttattaaaaaaattatgtataattggtaaaacaacttaataacagacttaaattaaaaaacaactttaaataataaataaaaataatcaagttatcaggttcatatttttattttaccattttatcctcatttacatttattatatttacaatttcttttgctacttcacgatttgtattgttactcgactttttttacttcgattataatttatgaatataaatatatcaatttaatgatttgtaataaaatttaagttaatttttcaaacaacctttaagaattaagtaataagttttaaatttaaaatcattttatctcttacccttctcatttgatatttttcattcgtctcccctctaattcaaaataaggggaatatttgatgaattttcaaatcaactatactagttgtatttagttaaaacctcaagggaaatgagtgaaattatcttttgtaattaaatataaataacattctaattcgattaaaacattagatggacaatcctaaaacaaaatttgattttaatcaaaaaaaaatttaaaaatattttttataaaaatattttaaatttataaagtgaaaattgacatttgtactttatttcttttacatttgaaaaatagaaatcaagagctgccccaacaaatggacccaatactttgatggatgaagcagaatcattggatgatgctaattatctctaaatagctaaaatgtaaattttacaactattaagatatggtatctgaaaatgagtgtcatttccataattagggttttaagtattgcaaattttgagtcaaaccaaatgaaaatcaagccaaatgggctgagtcaaccttcttatcatacagctagctcaatcattttatgtttttaaagattattgattgagaatttgaaagaaaacgaagaggcaaaatataaggggaaaaatgacatcaaattagtattttctcaaatttttttttaaggaaaatggaaaagaattttttttatatacaaaaaaagggtgataaaatatgagtacttatatcttttctcagaattgagaaattctattaattgaatctttaatactctcttatttattataaggaaaataattaatttaaatttatttttttataatatgattacttataatatttattatttctagtgatcattagataacaaattaaaaggtcggaccaactgagttacccctcaagatttatagttttagaatacaaaaaaattatcactataaataaataaataaaatatggacaagtgtcgaaaaaagaataccttaaaaaaatatttttctagtctcttttattgaaacatgaaactgtcaaaaaaaatggatggagtgttagaaaaatgatatattttatgctttgtctccgtacaatcctgaaaaacattaaagaatgttatttttaaaaacaaaagttatctctcgacattttttctcttgttttctcatagaaaacaagagtcggtagtttcattgacaattaaaaaatttatttgtaaaacaaccaatgaaatttctcgaacattttagaaggtaacccgaaaaccttaatttttggtcaaattggtgcataaaaaaatacatttctatatctacttttgtcatcacgtgccatttccttttggaccaaactcctcgttcaattggtacttaagtcgcttatctaaaatcaatatatatattaagaaatgataaacagtatttccagggacccatgattaagaaaaagagtgtcgagtagcctggatcctcaaggcagtgggtgggatgacaatgctggacagagaggagcagtggagaaaagcaaagagcagaagcaatggagtagggtgtggtcccattgggatcatcttgggtccccatttccaaatagtactactagtcatactcaagaaaacttaaaaaccctatcaatgtctcgataatttccaggaagcccaccagagagtgacatttcaaacatgaatttggttttgggcgttctttccatgcctcaagcttgtctctgcacccttccaagtcgtgcactggtgaggcatgaattaaataagacgctagcatttgtccaaaggagcacggaagaaaatgaaagcgcgtttgggagtgtttttatgtaaaatattttccttataatcattttttgaaaaaatatatttatctaatatttttcaattagtaaaagatgatatttatttttttaattaaatgtaaatataaatgaattcaacttaattttaaatataacttaataataataagtattaatttatttatttttattattattttatttttttaattattaagtattaataaagtgaggatcatattgagattgtattttaattatttcaaaaagttatttttaacatttaaaaaagaagttatatttttagttttttttatttaaccgacaaaatttaaaaataaataaaaaaattaaaaacaaatcatcttaaattaaaaaaaaaaaactcctaacttaaaaaaaaaattatttatttttttgtctcaaacatttttatgcaaagaagtggtaaaagaattgtccaaccggagggaaatagatttgacttttatattattgaatttttaaattttatatactctaaaaaacaatccaagaaaagtatttttattctttattttaatatttgtattttaaaataatttttatcataattttcatcataaagttaaataagatattttgaattctattatttttttttcctttattccaaaaagaattaaaaataataataattatgtattaattttattttattaatcacatagttgtttattttgacatttagcgtgatttctaattatctcatgacttgaaataatttaaattcatataaaaattgatacctatattttatctaacgtgtgatattttctcaaaactattttttaagctcaaaacactttgtaaaaattaaaatcaagttgtcaaagttttttaaaaattaaaaataaaattaagtataaaagtttttaaaaatttagaccatcaataaagtgtttcctagagaattatttgatgtgtggttaatttaaaattaatttttttattatataatattattttctaaaattatcatgaaagtaattatttaatttatattagtatatatatattaagtatactttatttttgccatttatgaaaaaaaaagtcttttaactttctttaggtattttttttagataaaaaaaaaatctggaatttagttgtcaatggactaccacacataataattgaaagcaacattttagagaataattagatgactcattaaaatatattttttaaattattttttgagttttttttatatcttaaatttttaaaaattatttaaaaaaaaattctaaatgacaccttaatattgtctttaaaaacatttataagaaaattactattgaaaaaaaatatcacaagtaaaaattatttaattagaattattccgatgtaatttattatttaattttttaaaaatatttagtcaccgaaatccattaaaattagccaaaatgactttcaaacagaaacatattttttaaaatttttaaataaaatattacagtaaattaagaggagccattacacgtggacataacaaaaagtcatgccttggaaacacaaaaattcggggcaacgggtgagactaaagactcataacagaccgccgaagatattgcttcatgcgtgacgctccttctataaatataaaactatatttaatgagtttttaatactttcagcaacacaaactcaaactcacgtaaattttaaatctgtcgttaatgtctccaagggcccaggcagtggccgttggtcactgatcactggtcatggcatcttctgaatagagtatataaaaatggcctcatttttgcgcttaatttacaaaaagccctcgcaaccaacccctcaccaacttgctgttccaaggtgaccaatttgacctactgcccttcaatggaggtccaccccggtttttttttttttttttttttccttttaccaacttctctttaattctttacccacttccatcagtaataattggcagttgaaatgatatttttttttaaaaaaaaaaaaaatcccaaatttataaatctaactattatcgtgtttttactttaaaaataataatttttgacaaataccctttaccatttcaaaattaaataaaatatgttttaatatatccatttactaaaattgttgaattactgaatagcaataggaactaaaatttaaaacccgttattgattagctctcatttgaaattattgaaagcattgtcaaatttagacatcttgcatttttttgttgaaccctcgatgatcttaattaaataaacttaaaattaaagtacttttacaagactcgatttggagaacagggattaaaatggaaaaaaatattgtcattattattgaacaaaaaatttaagattgtatgcaataatattttttcaaagcaattataaaaaaaatggttttcaaaaatagctttgaattgcttttgaaaacaaaattttattagatgactcaaaggtaaaaaacaattttattgacttattatttataaaggtattaaatatttatatattatataaattatttgaatgtactttctatattttcaattaatattcaaaatatttttttaaaataacaaaaaaaaatgtaaatttattctaaaaacacttcaaattgatgaagtgtggtttttcattcatactttcattcgtttacgtacagagtatatatagatggtatacatgattcaatatcctatatagttatacaatcatatctgttaattatgttgaccacctataatcaagcactataatcaagcgtaatcacctaagaatgggaaagactgattacaaagatttgtacaactaatatcctaatatctcaacacttcccctcaagttggtgcatagatgtcacacatgcgcaaattgtctaaaatttttgagaacactctacttgagactacaactttggtgaggatttcggttaattgatcttctaatcgaatcttaggcaattccacaatcttatcatccaacttctttttaatgaagaatatgtccacatcgacatgctttgtacgatcatgttgtattggattatgagcaatgtcacatgcggctttattgtcacaaaacaatcgggttggttacatagataggtaacttagatcctgtaagaggagtcttagccataatgcctcacaaagtcctagagtcatacccctaaattccgcttctgcacttgaacgagcgacgacattctgcttcttacttttccatgtcacaagattaccacctacaaaggtaaagtaaccagatgtagatcgcctatcatccactacactggtctaattagcttcagtatatacttctatactttgatgatcaacatttttaacaaaaaaaattcccttcccagagcattcttcaaatacctcaaaatgcgcatgattgcattcatatgttgctctccgggattatgcatgtattgactcactacactaaatgtataagcaagatctggtcttgtatgagctaagtacattaatctccccacaagtctctagtatcttcccttatcgattgatacttgattaggctcaatgcacaatttcataccttcttctattggtgtatcaacaagttgacatccctacattccagtctcttgtaaaatatctaaggcatactttatttgagatagaaaaattccttcacttgatcgagaaacttcaatcccaaaaaagtatttcaaatgacctaaatcttttatttcgaatcctctatacagataattgtacagagcttttcttttttcgggatcatttcttgtaattaccatgtcgtccacacatacgatgagtgtcgtaattttaccatgttgtttttttaggaacaaagtgtgatctgaattactttgatgatagccaaaaactctcattgactttctgaacctttcaaaccgcatctcggggattacttcaacccatacaatgacttcttcaatttgcacaccttctaacattgcttttctgacaccatgtatcctagtggaagatccatatatacttcttcttataacttgccatggagaaagaatttttcacatcaaattgttgtaatagccaatccaggtttgcatctaaagacaataatactcaaactgtgttgatcttagctacaggtgcaaatgtctttgtgtagtcaattccacaagtttgagtgtatcattttgctaccagtcttgctttaaatctttcaatactattatttaccttgtacttcatagtatagatccaacgacacccaactggcttctttcctagtggacattctacgagttcccatgtttcattattctacaatgatttcatctcttcattcatgactgttttccatcttggatcagttaaggcttcctgcacactattaggaataattaaagtagataattaatttacaaataacttatttgattcagataaacgatggttagacacatagttgctcatgggatatttgactttggtagacaatttaggttcatatgtgggtttaggaatacctctattatgacagtgtggtaaccgtttcacgaatggatcaggttccaaattaagcacaccctcaatagacggcgattggtttggtattcaatgaaggcatcttcggacccaaattgttcagatggtggtgatggttcaattgtattgtctcttcctttttctatcacttctttagcttctgggtggtcattactacttggttccaaagttgtaccactcatatctaattcacccacttcttggttcactaattcagattatccagattcatcatccttagagatatgataatcataatcaagagtctgaatttccttatgatactccccctaaagttcagaatcaaatgaaaaatacatcgaatcttcataaaacaccacatccattgcaataaacatttgtcgagttggaggatggtaacatctgagaaaacaaaggctatgcttaattaagaaaaacacccaaatgggaggggggaggggtgaattgggttttaaaaatcttttcaatcacaacaaattcaaatacaatataaacaaaataaagagatagagttagaaaactcaaactcgggttttatagtggtttgacacttccttgcctacgtccactctcttcaatctcctaaccgagtgagggttccactaacttgaaacttcaaccaagcttccaatcttcttacacttggattccggctccaatgggttcttacacaatctcttcaagattcgaacatcttgaaggctttaacactcaaatttttacaagaaagaatccttcaacctagcttaaggatagctcaaatacaagacaaagttaggatgacacacaagagtgcactaaaggatatgcaagtgatgtttaatgcactatgaaagaaatgagagctttttgatcaagaacaggtaggtagactattgaatgcaagtgttctatttttaataaatgaagtggagctctcaatttataggtttctaagctcgggagtcaaaaatagtaaaaggtaacctcgttcgatcgagttagggatcaaccggttcactagccattaaagcatttaatgtttgacaggttacccttgcctcgaccgggaagagaatcacctcaaccgggaagagaatcacctcaaccaggaagagaaggccactaggaaagagagaaagtttttgtcatctctcgaccggttgaccggttcctcaaccagttgagccagttggccataacctcgaccagttgagtctttttggccatgaaaacctatttttttaattcatttattttctaacacttaggcaaggtctttaggtgaattattaatccaattataaaacattttgcctaaggtacaatagttaaaaactcaagttttaatgaaatcgaaattttaaagaataaaccgagttttctaagttgcatgaaacgtgtgaaaatcctaagtgcactcatgcatttttcttacattagtttcctattatcacaagtcttccaagcgtctcgatcttgtatccatttggtcttttaatgaattttcgagtttatgtctgagattcttaatcattaaaccaattagtcacttaaccatagtttgttatcatcaaaacccgattaggagaacccttaggctaacaacatcgatatcctttttggtgcaatgcatatccaacaaacacacattgcaatgcacgggaagttaacttggtgcgttgatgtttgggtagatgcccaaatgacatgcaaccaaaaacatgaggaggtagatttgggacagttggggcaactacgacattagtaagagcttggagaggtgtgtggaagtcaattccacaatcttatcatccaacttctccttaatgaacgtggcaacatattttacaataaattcttaaaaatctctcttttatcaaaagtttttcatacacatttttaaaattaaatttttaatatgcaaataggtctaagttgtatcttgattagtatcatttcttaagagggcatgattgggttttcattattttattattgttaccttttaggtgtttaaatcactaaaaatcctcacttaggcttgccacaaatcaaaatatatcaacttaccatagccacgtgtaaaaattttaacttttggtagtctaaactcaaaatcttaatacttgtaaccctaaaaatgattgagaaaaaaagaagaagatttacttactatttttttaaaaaaaaaatattaaaaaagtaaccactgaatttgttgaattatttgggaatttgagtcaaaataacctccttgcaaaaccattatcatatgttttagatatcatcataaatttatatttatagtagtcatttcattgtcatctaagaaaccaaaattttaaaatataattttaataccgtgatattccatgttagataggataaaaagtttataacgttatataagtataaattattcttaattttgtatacacgttttaaaatcgtaaggttccttagaagctaagggtatgagggtttctttgacactatatattgctaacatcagaaaatgtaataatcaggaattccaagtaattggccaagctgccgaagtagctaaagtagtaattaatactgtcagtaaaataggttcaagagagagtccatctattcccaattataaattttatttgcaagtaagttgtaaatgcttctctaatgagtaagaatgaaaagaacctaaatttgaagtagttatttcaagctagggaatgaatgattttctcataaaagcttttccacactcggtttctccacctaataactaattacatgaaaatcatgcattacggctttaagggagaattttttttataggggtgtttgtcggtttgacttggtaatcttgtgaaacataattgttgagaccccacgtccctggtaatccacgtagttgccaaatggatggacgcacgatctcaaccaatagaggttcctggttcagttgttcctgtaaaaggcgttcggacagggtgtccggacgcactctccgatggttttgtcaaccatggtcagagagataaatcagttgacatttttctagatatagcaagcttaccttcctctttgtgtgaaggtccatatatatcgtatcagaaactctgtctccctctttaatgatagggagatattttggcttgtcatgatgcctctaagtggtgatagggtcatcatcactcgtagggcggctgacagagatcgtgggaggcgtcgcagctatcagaaatcataggaagtgacttgccatcattcctgtcctttcactctgcaggcgacgaaacgtgggccgtgataagctgttggaatgacgtagtaagacttgcttactttagtcaacgatccggacaaacatatccggatgggatatgtcggtcgtccggatgtgacgtttgcgagtgtcgtgtgcctctccctgaggaagtccggataggaaaagcgcgccacgtgtctcctttaggggaaatccggatgaagttaatccggatagaaatgcgtgtcacgtgtcatcagggggagaggtccctacaataatggatacatttaaaaaaatatatgatttaaaaaaaataaaaaatttgaaaaaatatcctatacctaatcacataaaaaccatgcattgagactttaagggataattttttttatatgggtgtttatcggtttgacttggtaattctgtggaacataatggatacatttttttaaatataagatttaaaagaataaaaaaaattgaaaaaatatcctataactgatattattgaaaaaaaaaaaggaaagaaaaaagaaggtgattttagcttaaaattcatgaattggaggatgtatgtgtagctaccaaatccttttttttttctccaagtaaaagatgaggggaagacgaaattgaaaatggattaggtggtgggtaaaccgtaaacattagatattcacggggaactggccatgaaaaatcagaatgtggggttggtcgttgaagtctaagacgggttttcagaaagattgtgttctacgtgaagggaaggactttttggggcatgttgcttgtggcgtgcaagccaacccaaatggcaaaggccctcctcccccgccgccctgcacagcttagcgcttatagtaagaatcttaataagtagcttaatgacaaaaacataatgatattttatttaatttctaaattctcatcatttttatacgtcgggtttggtagctataggtctatatgtattcattattcgtattataaagtgattaaactaatcaaagccacgtaggctatgatttggattcttattataccttaattctctaagatgccttccattgacatggcgtcaaaggacataggtatttttccttgaagaatctttcgaggtaggatatgtttggtttataaaaattttaaggaaaatacaaaaaattattttaaaaatataaattaaataattttaaaatatatacaattttaactaattttaattatatttgattttttttaatattttttagtaaaataaaatataaaaaaaaatctagaacaaacatagcaatagtatcattattaaaaaaacatatagttttaaattttaattaaattttggatgatttagttattatttatcgtgtaagttaagttttattttaaatttttttatttgaattaaaaaaacaataaaatttaattatttcttaaaatctaaaatataaataagattttttattttattttttttattttagggctcattaaataatcataacaatgcacatatcatatgaataaataaatatgtgtatgtatataaataaatgtgaaagcaaaatttgtactcattcagctgtgatccacatatagtgataacattgctggcgcatatacaacatggcatgggtgatcgatgagttcggtagtccagatatggctacccactcgaaaacaacacttgaaaggctattatttgaaaaggccaatgaggaatgttgttcacagatggactatggtgattgctgacagctagcttgctttctcgttggacatcttaatcattcaaccatcccaccattctttaaaacaatgcccctttcttgttacaaatatgcatatattgggatatagactaaaattaacaatttagttttcatactaatggatttttttttaattcccattttaaaaattaatctaaagacacctacaaataatgaaattgattttttgattaaaggggtttttgaaaattcaaaatccaaaatttgaccttctatttttttttttcgtttggacaaaaatgtcttcagtattttcttataaaaataataatttattttaaaacctctttgtaaaaacggtaaaagacatttatgtaaaaaatgagttattattattattattttttaaatatgaaaaaagttaaattcacaatttacgaattaattaatctttttttaactaaatatttcaattttaaaatatcatatcccatgtaagcaaatttgaattggagtttataaaaaatatattgatattttttggtattttgattcgaatattaagtatgaaattgggtaaaaccaactttaaattaacatatttgaaataaaatttcttaaatgcattttagatatggtatctatcaatttttattttttattttaaagagatgttcgtatgaatatttgtaatttttgcatgcatctatgaagtgtggcgagtttaaatttgaataataaatgtttttctttatatttcagtcatttttttctgtattttatttattcactttttaaatttaatccaatattttaaataaaaatacttccaaattacaatagaattgtaaaccattgaaacgaaaagaaaaaataaaagtaaaaataaaagaataaagaataagcaagctttataaaccaccagctacaaagcggagtcaagaggggaagtttgtttagtaacttccactttcttactgtttgaattgaaaataaaaggaagggagtcaacatatatatatatattttactatgactaaaatgtaaataaattgttttgtaaataaaataaataaaaaaatcataaaattaaataagttaagattattatttttaatatatattattgtgtttatcgtttttttttattttttaagttacaagtaataacttaaattccatttatcaatgttttttttttaaatatttctaatataacaaaaattcaaagaagaacaatttcaaagagttttcaaacaataatttttctttaaaaactaatggtatcgtagaatggttgtttagaacggttttatgttctcttgaacaaaagacatagaaaatacgttttacaataaaaaatttgttttttattttttatttttaagaatagaaaatatggtatttaaaaaaaaaatattttaatgattgttttaagagataattataaatatgaaaaatattttaaaataaaataataaatataaaaattatttttaaaaatatgataaaaatattttaggtttttaaatagatttgtattctataaaataagagaataatttttaaaaattattctcaaaaagtattttttaaaattgtttttaaaaacagttatctaataaatccaaattttttatactaaaaatgttttttaaaagtattgtgaactttttatacattgaatacttaaaataattttcaaaagcattgttaacttttatacgttgagttatgatttatatttaaataaggataaaagtaacatataacggatatctttttggctgtatcatggggtttcattatttcggtatcaatcataatctcctttatatttttagattagtgagaaatatcgctctttttaaagcaatctggtttctttaacaaaactgtcacgacacgtatcaaaatttgactgaacggagagatcagaaatcagaatccctaggttagttcacctgctggtcagacaaaaatccacacgtgtcggtaaaagttccacgttgcgagtctctccatggccacttcggtaatttcagcgtcttgaacggctccaccttgcgttatccacgttcagtggtattcccgtaataatgagaaaggtcgaacccaaatggtaacaagtcatcactcaccctttttttcttctctcctctcgctttttcttttgtatccgttgaaaagcgctctctctctctctccctctctgtcgcaggtgcttgctttgatgtcaaaaaccttccaatgctgaacttttttcaatatcccgagactttagaattttcccatcaaacaaacacagtctcaacgtctctctgagccaacgttttctctggaaatttagtgttcgttttg

SEQ ID NO: 12913 - DNA, 1370 bp, Vitis vinifera
  Intron number 3 from transcript GSVIVT01027381001 (locus G SVIVG01027381001) derived from phytozome v7.0 (chr-ID chr1 3; pos 15494992 to 15496361 reverse strand)
tcagtgattattggaagttttgtcttctgttacatgtaagtaccacaatgtgtgccattctatgcattttaattcaattttttgattcaccatgtaatgcatcattccacctttgtttattttctgacccagaggctatactagaacaaattcaggtttatttctctaaatatttactcttgtaaacaaagaaatgataaagttttcttctaaaagaaattaataaaggatgaaatacctcaagtgttatggtttttaaaattttgtttataattatttttgatcctcagtcctttctatctaatataattggattttttcccctcgttttagcatagaaaacttcatttggttgtgaattagatgacactaggtttcattggtttattcctaatgcagtttttacctttgaagttgaacaaatatgaaattttgtcaaattatttttgatagcaaaagtcagcaactgtcctgcatcttctcatatggggaacatagaatgcttttcaatttagcggttccaaacttttaaattactgaaaccgtatctttttctttgcatttacattttgtcaaaaggaagggttcaaggtgccagattaatgaaaccatattttcattttggtgggtttggaggtcgtcaaaagtacttgttcaaggtggcagtggagttactattttttttctcttattatgctgaatgaagggaattggtgttgcatattggagactcccaagtcatagatttgttacatttacccttctaaagtaggccaatgttttagactgtgaacaggggaggggatagacagtagcatagcctgagtgtgatttgttacatttttatatatttattccttttccgatttctaatgtctattttctgaaatcttctatcctaaccacttgtggcatgtttttcatgaacttgctgcaaagtggcctttggcaactacgattgccccttgatacaataccaggtctctatttctttaataaacatgaacctcttttggtgttgctcgtctttaatgaacatcccttgatccacctttccccctttccattgtaaggattagttggtatgatctttgcaggtcaggagtgataagcataaggaatttataaatgtcatttcttcgtgtttagatgacttcattatgtatatatgctagatgacatcaatgtttcccacattctcatgtcaatcttttacattcaatgcatcacgacacttcacttgaatccctaatatacagtagtgtccatgcctcaaatgcttactacacagccttggcaatttgggtatattgtatgcaagttggtgtgacaatcttgtgttgtttttccaggaagagggcttcccattg

SEQ ID NO: 12914 - DNA, 8969 bp, Vitis vinifera
  Intron number 2 from transcript GSVIVT01015997001 (locus G SVIVG01015997001) derived from phytozome v7.0 (chr-ID chr9 ; pos 17107019 to 17115987)
aagaaggtcaagcgcatcgaatcacctcttgtaaggtaaatggatgtgtccattagagtacataccatagttgtgcaataatgtatagcatgttgctacttgaaaatttaatatccatgttgatcatttctgcaaaatattgcactagtccactttaatcaatatttaaaaaatgtgtattaaaggaaagcttcctgcataggttgtgtgcttcatattgtgttgttagtgggattttgtgttgttcttgtggttattagacaaaatgtttcatttgatgttctttaattagtgaaaaaacattttgaagtatttgttttgagaattctactgtaagtgatatcccatttggagctttagttggtacttgtcatggaaatggaataagacaaaacttaggttaagtaagagtgactttttcttctcttttccttctttttataaattcaaatttattttccgaggagaaatattaaatatgaaaataccaaatgcataaaaactaaaacagtccatattctgtgatattgggcttttgttagaacctactttgattaggtttttctcaatcgtaatacttttttggagttatatttaccctactacctggagaaaaattttctaataggagtttttctgtaaacgtttgctgtttgactcagtctacttcaagatatcatattaacaaagaacatctcagtttctatgatacttgattgattggaaagctagtaaagatttttgtgttttgagccaaaaccccaaaacaatgttatgtaattgtaaaacttaaattaatgaaatgtttctgcataacccagtcttgacaatgactgttctgccatattagcatttggatgtcagaaaaaaaggggaaaccaattcctttttaattgaattttttactgttgcatttggaaacctactatggggcattaaataaatttcaacagtggtttcgatatcaatcaaccaatagtttagaacatctgaaatcccagtatgtggcactttaactgtgtttggaatgaagggatttggatggaaaaagaaaagaattgatttcaaatcctcaaatttggtgtttggaatagagagaattcataggaggagaggattgcaaaggatttgatggtagaatttgttagttttcaattccttgaaaaagggtggaatttcgcaggatttggatttggttaaagcaaatgctaagtcacaacttcctcttttctagtgttgcttctatttctcttctctttttgtctataaattgatatgtatattcttctctctttgactctcttctctagtctattccattgatgtcatccttttatttttattttactttaataattttttaatggtagaatcttctcaaagacattgcttcaagtaggtgtggggattttttttttctttttctaatagatttttatatagaataaaagaaaaaattgctataataatgaatttatttttattggaacaaattattatttctaattgagtgaattttcaattttaatctcagttgtatcattttagttatatctctatttttaaaccattatgttattgtggacagacatgtgtaaggatttgaatgaaaaaaacatttgtttatgctaattaataatattttatttttaactattataagcaggtttctattttaagtgaattaaaaagtggaatctaagataatttgagccattagaggagtgatttattattttagttttgtgtggagatttcaaataattaataaaagttctcatttattatttttaaatattttgtcataatgaatttatttatttttatcattaaatttagaattagtttgatttgggttatgaaaattagtacttaaaatgattgaagcacggtctaaatagtataaacaactagtctatcatcctcaagtttgatgctcttgtgactcctttaaatatgaaagttgcgactaaatgttgggcaagttcaaagcttagtaagatttatacccatcatgacactaccatccaactttccaaaagagacagttattgacacaaaatgataataactaaatgaagtgcactacaatcatatgaagcaaaactcaccttttgtgcgtatagtcaaatgtaaaattcaatcttatgaatgggaccatgaaacctatggactttggagaatctccacaagtttgaaaaagagggggaaaaaaaaaatcttcaacctagtctagaccataacactcgatagaataatcttcccttatccttgatttttttctctttccaaaaaaatactcaatttcaagattgttctaaaaaatctcgatcttggcacttcaattttcaagattttggatgttgtcttgattgctaatgagttggtggatgagaaatggaggtcaaaagaggaatcttcaaaattgattttgatgaggggatgtttatcttcgacgacttttgcaattttagtgaatagaaacgcgaagggttgggttaagggatacagaggcctaagatgaggagctcctcttttcccttttcccttcaccattgcagctaacgttttaagtagattggttgtgagagtggaggagagaggtttattcgaggggtttccaatgggcaaatataggactagggtgtctcatttacaatttggggacaacaccgtcttttttttagagcatccttgaaagagttgcaatctcttaagctaattttgttggtgtttgggcgttttttagggctaaggattaatctaaataagagcactctctggaatcaacattagtcaagaccaaactaccaggttggcttcactgcttgattgtgtagtctctaaatggcctttaacgtattaggggggaacccaaaattgattttcttttgggatccagtactaaatagagtctctaggatattggatggatggaaaaaagccttattgtccttaggaggtagaatcaccttaatttagtattgtttgttgcacatcccaagctactttctatctcttttcaagattccagtttcaatagctttgaggatggagaaaatacgaagagattctctatggtcgggttatggggagggtaaaagagatcatttggtcatttgggaattagtttgtaggcctaaggagtctggtgggttagggtttagggaaatttctttgaggaaccaagctttattagggaagtggctttggaggtatctaaagaaagttctgccctttgacattaggttatcttgagtatctatgagacaaatcctgatagatgggacgccaacaatataatcagatggtcacatcgttgcccttggaaggcaattgcacatattcttcaagttttttctacatgcactcactttgtggtgggtgatgggaccaagattcgtttttggaaagatttgtggtggggaaactaacctctttgtttacaatttcctagataactaaaaacctttctatttcagctatcttgggtaataacgcttctttgtcttaggatcttgtcttataatgcaatctaactgatgtggagattgtggatcttgaaagactaatgtccttactttcccatgttcatttgattctttctattctagatgcaaaagcttgggtaccgtcctcttcaagagttttcttagtaaaattgtttttttcaaccttctccaatgtctcagattttgctcctttttacccaactgattttttgtagaaattaaaagtcccttctaaggtcaaggcttttgcatggttagtgacacataaaaaggtaaataccaatgacatgctatagttgagaagacctttcaaaagcccttagctttgattggtacatcctatgtaagaggaggtaaagagacgattgatcatctcttattgcatcattcgattactttgggattgtggcataggatattttcataggctaggatgacattggtttagccagacagtatttgcgatatgatagtgatttcctttaagtgttttgagaattctattaaaggcaagactctttggaggattgcgtctctctttgttgtggattgtgtggggagagagaaatgctagaattttcgaggacacttggaagatgccggagatgatgtgggatttgcttcatttctatgtttctttttgggcttactatatgacatttttaaaccttatcatttcagtgtaattcaacttagttgacttttgatatgtgcaccctagggttgagtttatagggtcagaagttgttatacttgtgtaggccttttgtaccttttgtatatcatggggaggatttctcatccttctcatgtttctattctcaattaatatatatgattgtttctgataatttttttttttcaataaaaaccttaatgactgggaaaacatagattcggtgttggcacccaggatgtagcttggggtagtgcccttttggtaatgaactagatggcttgagtttgagcctgaccactattgaagtggtgtagggtgaagggcttgagtaagagcctctctcgaggtttgtttcattgagtaagagcctcccttgagtttgatgtcacacctatctttctatgatgtagtcgagtccctcaccttggcaatagatgttaatccttggattggatgggtccttcctcttcaaaatccttctttttttccttttgtttagggtggataagtcggtttatcttctgctagtaggacaaatttggagattcaaagtttcccttgaattgaaagactttatacagttagtggcttatagtaaagagaatataagctatcctcttgaggttagaagaccctacaaagttattgactgtgatgattgtgtttcaagtaggaagagtagagaaaatagattactcagtgttggatatactttctactttttgttcttgaaataaaaaaaatcagtagtaaattttatataagatgcaagaactcttaaaagtttgcatgaaaaaagtaatggttctgaaagctatttaaaaaaattgaggtattagaaagtttttagtacctcaaattttaaaatttctaaaaatgatttttaaagagataaggtgaatctattctttttgtataagatgttttacttttttatagaagtttctgattttaaaaacaaaaaataggaagtgtatcaaaatagacatttagtttcccattgcttgtttcttgtgatctttggttgtgtatcttttctatggtgggtatttagtgttcttttaaggatttgttagggataatagaagcaaagttagttgatgcctttcaaatcgagggaaaggccaggatatttgaataatagataaaggtatggtgtatacttcttgttgccccctttgggttttcattattagggagttcactatcattttgtttattttgaatttgggtccagagcaacatatgttactcccttaaatgagtgttcttatttttaagctccataccttttgggttttacctggagccttatcaggatgtgatatttttgttcatgtcattcttcctacatgtgactttcatttcaattctctattagagttgtttgttttgtatgaaaaatactaatgatttttatggtgaaaaaacatcctctgcctgcccactattatcaaaggtaagccttggtggtaaatagtgcaaaccatgggtgaagtggtttgctttagacaaggtgtctctgatcatagctatgtatgttgtgaaaaacacaatttgtgtgtaaagatgaatgaatggtgcagtgagtgttttccttttttctggagtaatccacattaactatctctccttttaatagaaataaccaaagattagcctttaaataggtcatctatgatagccatcgaatgatgcataaacaccaatagctattctaggttttacttctccttttttccccactattgaaaccctaagcaccattatgcttagggatttcctttggggaggtgggaatctggggcgaaaacctcatttagtaagatgggaattggcgtgcttaagtaaaaagaaagggggtttgggggtcaagtgcctttccacattcaataaggctcttctttgcaaatggaattggcgatttgcgaatgaaagaagggttttgtggaatcaagtgattagagggaagtatggggaagaaagaggggggtggtgctttcgggaaatgagagaggcgtatgatgttgggttatggaaagggataaagatggaatgagatattgtgagaactaggatttccttctcaataggtaatgggcataggtgagattttggagggataagtggtgtggggattctcctttgtctgtgtcatttctgtccttgtttgctttagctgttgatgagaaggcatgggtcgtggatatttgggacttctcaactgaggggggtagggggggatggaacccttgcttctctagatcctttaatgattgtgaggtggaggaggcggaaagcttcttgatgcggctgcatgggaagagagtgtgtggtgatgtgtaagacacggtgttttggaacgaaacaaagagtggaaagttcttggtcaaatccctctactatgctctagagctggatagctcttcttcatttcccccaagttgcatttggaatgtgtgggtgtagcccaagattagcttctttgcttgggaggctacatgggccaaagctttaactttggatttaattcaaaaaggaggatgggccttagcaaatagatgttttttgtgccatgagagggaagagactatagaccaccttctttttcattgtactaaaacaagggtcttgtgggaattgttcttttctttggttggggtgtcatgggtgcttccttcttcaattaaagagatcctccttagttggcatggtttgtttgtgggcaaaaagcgtatgaaggtgtggagtgcaactcctctatatatttttttggacggtttggaaggtgagaaatagattagccttcgatctagagactcaaatactattttgttttttccctttggttagaggcaaagttgtttatagttgatcaccctctaactttagttagttttgttgattggttgagctctagttaaagtcatttttttgacttgcttgagcgtttgttttctttttcttttttggctggtttggcgatgggtgtataggtgttgtataccttgagttgctcttttgacgtctcttttttaatagatctttttctttacctatcaaaaaaaaaataaaataaaattatgctttatctcatgatgtaattgaatgcatatgaagaaaaagtgtaattctatccaaacaaagaatttaagcactctctcctttcaacacacaagaggcgatataccaccaaacaacgtttgtcaggggttaaaatatgtagggaaagatgttacctaatggataaaagaatgcttaccaagcaaaaagacctacaaggagcaaatgaattgcacaaggttaattgggatgtatttaaaggtgaagaagatggagagatatatttaaagctcaaagatgtgtttctgcagtcttgcttcgagtggtctttgcatgcatttgcgcaataaggatgtctctttttgattttgtagatagttctggtttgatgcaagtggtttttgtaagtgttgagttcgggttttctatttatttattttatttatttatttatttattatttatttttataaccactatgtcttggtggtcctatgtataatgtactaggtttggcctctttgtggctcttagatttgcatatcttattatctatcaaaaaaaaaaaaaaaaaaaaggcaattaaagagagaggagattgatggatgtgatagaataatttgagttctagttaaagcagccacaagaaattttaaaaaaatcattttcttgtttgcttttctttttctctttgttttcatctctttcttgatctctttccttctgtcagaaacaacaatttatatgcatagcatgttggctgtctctgactctctgtgttcaggggagaagttgttcacaaacttagacaagcacctcccctcttagccaactcatcaactctctaggtagtcaaccaagctttccaaggcaacccatgcttctagaatggtcaacaaatcggtgaatttagaaagcatatctcaatactccctcctatccagaagagatttctaattcagagcaagtacaccactttcaaagttggggtgaggataagattttttttcccctcaatgtgcaaatcaatactgggtggcttatatgaaaacgtcctaacaggcctatttttgtgtttcctgagcaatttcccagaccaatttgcaatggagtaccatcaaagtggatcttaggctatcaataggagaagaggggatggggacgaatttctcaaagacctcataattgccctcctcctatgagaatggcatatcgctcaccagtacacaaaataaaaccgatggaagtaggtagaaaattatttaggaagaaccactcagagtatctgaaaataagttgatgctgaaacttgtcatattttcatatgcctttcaaagatggatccctttagttagtcaataattgatactggttaatttcaagtatgcttaactgttattcctaattctttgtgatgaatcaatcctcactggtgaaatgattatgtatctgaagtttgagacaacaacacattagcatcaataaattcttggatgtatgatggagttgtgagttttcacaatggcctactgcttcatctattatataatggtttttctttcccttggttaaatgtttgtgtgattatttttggcttattggttggtcaatcaaatattgaacccttttaagttggttcctacatctaaaactaaattgttcatgaagtttctgattgcctcatcctgtcttttccatttatgcatgtaggtaca

SEQ ID NO: 12915 - DNA, 4504 bp, Vitis vinifera
  Intron number 1 from transcript GSVIVT01024958001 (locus G SVIVG01024958001) derived from phytozome v7.0 (chr-ID chr6 ; pos 5667799 to 5672302 reverse strand)
gcccatgtctagtatgatggatttggacgagatacaaacaaaataagggtggaatgggtcagttttgaggcttataatagcttaaaattatttataaataaaaataaatattaactttacttatctttcctaaaactttactcatactattactcaaattagtaggtttcacattgaagattttatgtaatgaatgtagcataatagggctaaaacctcgatagaattctattgcttttttacggtttttaaggctacattaaggtttctcagaagttgctatctctagatatggttcttcagcaagtaaaggtgtgcaaacacaaataccaggaaaactattgataaagggaaaatgaaggatgtatttagaatattttaactattcctcatcgacataatatccccctaaaactatacattgtcatacacatacatacaaatatatatatccctaataggatctatgatagtagtggagggatcagaccgattcaccatatatgtcgtcatatcatgaattttttaggttagatcaaataaaattcaaatcaccaaactttaacaaataactttaattatatttaaaattttattaaatattttctctttctttcttatttgttaattttacttactcctttaatttaaaataagattaatatttgatgaatttcaaaggtgattggaattacttatgaaaataaaataaaacgaaattttatttttttcctttttttttgtattcttttttaataaatgagaaatgaaatgcaaatcaacatttttttttgataaaatatataatttatatattaaaaaaaattaactttttagtataaggatatgtaacacatgaaggatgatggtatactcagatggaagataatacaattttgtgccacgcccgtatcatagctcatgccactattccacgtccaatcccatgatgcaggatgcacgtcatggttcatgtgatgatttgtaacgtagaacaaggatacatttagaccaaaggggatgaaccatcccacacgtgtgccaatgagaacatgtagagaaaaaaccttattgtttttttttaaaaaaaaagttaagatatttgaaattgtaacgtaggacaaggatacatttagaccaaaggggttgaaccatcccacacgtgtgccaatgaaaacatgtagagaaaaaatcttattggtttttttttataaaaaaagttaagatatttgaaattgtttttagaaatagtttctttatttttaaaactagaatataattttataactcaggaaatatgtttcataaatttttgacaaaatatagtattttgagaatcttttttcaaaataagttactttctacaacaaatttaagatattttaattattttttaaaatattttaaataataattaaaaatatgaagaatattttaagaatttttacattatacatcaatatactataacttaatgaaaaataaatcgagaaaactattttatatatttaaattttcgaacagaattttgtttccaaaaacaatgaaaaattattttaaaaaacattactataacaatcattaaaaaatagcattttcttttaattatttcttttttataactaaagatggctatcccttggataggaagatgagaaccatagcctcagttgcataaatatcaaggtaggtgttgtatttaggaaaattttctttccaataaaaatataaataacttatagaaattacgtaacacacatgaaaaggccagcaatgataccgaatgcaaagtatatacaatcccatgccctcacaaatccaaaaaataaaaaataaaaacaggaaaaccctaatcaagatttggtacagtatctttaacacgaagacggcatatggggcagacccttttcttcatcagccataagcctacacatgctttatggaagacatggctgcattcaggaagaaccctacatatctctccatctttaatgtcttccaagcatatcacacattcatcgttacccttcattccaccttcctcagccctacttttatcaaacacaaagcttggcgctacttccatccacttctcctctacagatctttgactaatatcatcatgtgttcttggactaaaatcatgagaaggggggcgatgatcatgataaagatttgtagctccgatttcgatatccggctctggagtttgatgatcatctctccttctgaagaaacgcttgagccaaccgcagagggtgaggacaaccaaaaagatgaacagtggggcagtgaatatagaaaagaagccaatgagtactgaagcaacaacatcagcattaggaagagggggaggggtaggaggaaggggtgggggtgggggtgatggtagttgtggaagaggatgagaagctagggggaggtccatgtattttgagatatagattaaaagatagggctgatggtatggaatacaaatcgcttatattttcctaatcattggagcgcacaccaagctgcatttccattatcctaattagataaggaatgagcaagagaatttgagatgcccatcttgtgttgtgtccttttaccaccctacttactatttttatgttgtaagaacaactttaaaaaataaaaaattctactctaaaataataataatatcaaagatttttaagcaaatataatgcatttagtaaataaaaaaaaaatctataacttgaaaattattatgagaatagatttactttgtgcatttattttgaataaatatttttgcaaaatcatatgttaaaacaaaattaaataagtaatttcccggtataatattaataatttggagaaaaaagcaagaaaattaaaatccatttttaatcataaatggcattctttgaatgttgtcttctcaaacacaactcataaaaaaaaggatgagtttttgggtgcaaagaaaaattcttttgtggattacgtattgaaactagttgatcataactctgatttcttgtgtaactattattataccaagtatagcaagatagatatacatgtggttggaagtttgaattaagaagttgggtttttaatgacttaaaattccaaagcaaaatgtatttttatttcttttgtttttgaaaaataaagaaaaaattcttttttggaatattgtttctcacctgatattaaatatagtaatcctctgtaattcagtttaatcttatggacataaccataattttctgagataaagagaaaaaaataaaagaaaaacataaattgaattttgaaataacgaggagataaaaataaaaataaaaataaaaaaggaagaaaaatatttaaaaaatccagtattatatactaacaaaatttcaaacatctaattagatacaaaagaacacatacaatgacttatggactgatgattgtatttaaatgaaaactagagccaatccagaaattcataatccaagcctgatcaatatctgtcaagaggagagagtcacacaggcagccttcggacaaagacggcagtgaaggcacggcagatagggcaggaattgctctgcatcagccatgagactacgcattctttatggaagacatggtggcattcgggaagagccctacatacgtctccatctttgaagtcttccaagcagatgacacatccagtattaatactgctggacttttctccactttcacagcctttaatgcccttagtttgatcatacacaaaaccatctgatgcttccatcaccagctcttttattccttgcataagctcgcgtaatctttcagagtgatgggaacggagctgaaaaagaagatcacgatagtgatcagtatctggagcatctgcagcagtttcatgatcattgtatccaattctgaatattctggtgatgcaagcacagatgaggaccaggaagacgatgagtgggatagcggacatattcaagatgcgaaaaaccatcgaatgatcggtgggaagaaaaggagggaaagggtgagggagagatgggagtgatggaaagggttgagaagccgggacatccatgggtctctgtatccgatggacatggatcaatgaaatatatatatatagtctaaagagttcctatattatgagacttgcattcctctcataatcctaactgtactatgaatcaaattatggaaactttcctttaattaccacagtttttattattttaggatatggaatccatgttttattattttattcctaatataaaattatgaaaattaattttatttgtaatactatttaaatatataaaaataaataataaaaacaatttatgatttatttttattttttttggtcacgttatcgctgtagacctttataatctggagaggcttccattccaaacgtccgtcttctggaattctctgattctctcctcctcctcctccactctctctctctgaagaaaccaagaccttatccaatccctctttctgaaat

SEQ ID NO: 12916 - DNA, 3706 bp, Vitis vinifera
  Intron number 3 from transcript GSVIVT01020217001 (locus G SVIVG01020217001) derived from phytozome v7.0 (chr-ID chr1 ; pos 8940716 to 8944421)
gagaaagagcatcacaaatgtaagatttgttttacttttatcattctgcaacttgatcttcggatatttctagaatgatttctcataagttgacaccatcaagatagttgcgcagattatgctcaaacagttccagttcttggtttggtgtgtccgtatatttttgtgaatttttctcagtaatttctaaatttaggtgaacatatctcctgacctgaattcatttgagacctgaatttgtagattttggtacactgtcaagctgggttttgtttactgggtccaagattttcaacataggcctgatttcccaaaatttttacgcctagaatgttgttgccatccccaaactgcagaaaatattagttttcttcccaaacaaaatcttgaaccacatcgatgctgtcagaatctaccttcaagttgatttagaaacccatagtattcaaagttactgcaagggcgtgttttcagctcatctggcagtttgctgcaagggattttaaattcatattatactactgacagcctccagaaaacctctagaaattcatacaaatgaatagtactatttgcctgtttgggaaggaggaacacttagattctttagttatgcatcatggcaggtttagctgtaagtaaatgcaaaacttcttgttcatagaattgcaaatttgctcaagtacaaatcaagagtgatgtcttatcaaaaggagagaataagattcaagcttgatgcaggctgatgcataatcaacctttctttagatttgatgcagtgaatctttttttcgacctattagatcctctggtttattgggttgacttaaggttccctaccaatgttctggaaaacttatgatgcttacctctgtccttctctcccttagatgacaaatgaaattcccaaactgttgtagtttaaataaagaggattcatgcatcggaggcaacagaatcaatagggatttgaatcagcaagaacttttatggtggatgttgatgccttagagtactgttcttcaactgaaccttgtttgagaatgctctcccctttgcttgtattcttacacatattgtgcttgctgcaatgtgaagttgttgtgtggaaatgttatacggaactgaaatcaattgaaataagcagaggaaacaaatgaccgtagaattcaagcaatatatgtagtttttcaggttagtaattattgagaggaagacaccatagtagctccaactctactgaatcccactactgaattttctccatgatgatagccactgaataatcacttctccatgatgatagaagctcaataatcaccatggttgcagtagctgaattatcatcgtgactgtagctgtgtgcatcctgtgtttatgccatcaattatggcctgtaatttttttctctcattcttccaatgtatattgtatagatgaagatgatgcaactgtaaatatgatgagattccttcacactcaatttacagtctttatggtatcagagcacacattgctctagcgagttcatatcttcctccatgctaatctagtgtgtcaaacaacccatcatcatttatcataatggctgataaaacattatgagcaagttcccaaagccaggttgttgtaaacacaggatgcacacagctatagtcacagagataattcagctgctgcaattatggtgattattcaggtactatcatcttggacaagtgattattcagctcctatcatcatggagaaaattcagtgatgagatttggttaaatcagagcaactgatgatgtcatcctttcaattatgtccataggcaaatgtgaccagatatggcttagattatgcagtacagagcatatggaatgtctctgtaactgaactcttatgaataatacaaggtccatttaatttggaacatgggaagaagttgtaggattgaataaggagtagatcataggggaagcattcaaatctgggatttatattttcctgaattgtgatgaactagacaactaagtgacatccaaaaactgtcataaatcacatgagacagagcccaacttcagtgaagagtgccttgtctgagccattatagaagccactgccccacgttcactgtagcatgtgatatttacttatgcatgtttggcaaaattggctgataagtccctgacaagaagtgtgaacttgaccatgttacttataataaatttaagaagccatcccaacgtccagaaaggaaatttgtagattcagtgaagtttaaattggtaaatttgtaccaattattaagtaaaacaacactaaggagtttgcaaagatgatgggagtccatgcattggtgatttgttaatcttctatgcttacaagctgtaaaatagtaaaagtaacatagatcctgcatccttcccagttaaaaatgttgtcaatcttttgatagttaatttagtttaatgataatttcaggccctctgatgaaacagtgaccatgaaattaaatgttcaaaaaacttgggaagggcttagctggtatttgaacaaatggtcaccatgtaaagagtgctgtgctagtgtgaacttccacctgtacatattcatcctcttttacatctttggtcctctcccctattacgtttcttcgtagcctggttcaaatggtaattacctctctttagagtgtcaacactagcttcaatctgcaatcactcagctacccctcaaagagtgtttttgcaactgttcctaggtgggtaagactttgtttacctcagtcataactgcatttttataccatttagccattgccttcttgcattggtctgatctgatcatcataacacctgcaacatttgtataactaaaatgttttcaaggattccatcacctggactcattgtaggcgtcttcgatccgctttctcccatctcttgttgattaagtaccatctagcaagggcagtcatcgcaatactctccacttgtctgacattccagagtgataacgaataaaatttaacgtacatagaggatccgaagatagagatggacggtaaccactagaatctagtcagtgtggaatggaaaataggtgcccaagggaacctcaaactctagaaattagttcttgcaagccaatattttttaaaaggagtcttttgtttattttgttgaagagccttacttgttacccaatgaagaccagtgaaggcctgaatataatcatggttcgcagcaatctcaagaaactatttggacatgcagattcttttagttcttttgcctaatcctgaactgacatgctgtcctattgaaattttatagaatttcagcttgttgaaatatcacctgacctttctttagtttgtagtggcaacccaacgcctgtgacaaatgctgaagtttggtctaatatcttactgtcatcagcagggaaaaagaaatccttgtgatgaattgtgaggttgggtcctaatatcatggcaaccgtggtgtatttgatcatatgcttaagttgctataatattcaagaaaaaaaatttaaatcttcttttacatattagtgaatattaatgtcaataatataggaattttgataatagaaatacttgtgattgatgatttatagaggattaacagcaagttcaattttttacactatcatatgcctgtagtttaatactcctaacatcttgataattttgcag

SEQ ID NO: 12917 - DNA, 9832 bp, Vitis vinifera
  Intron number 3 from transcript GSVIVT01035277001 (locus G SVIVG01035277001) derived from phytozome v7.0 (chr-ID chr4 ; pos 11867348 to 11877179 reverse strand)
ctggttcagataaacggattctatttttgtgtggggtaagttttgacttcctatgataactttgagctggaaaaaccataccttgtttataatggaacctttgttctttttttcattgcatttttctgtgacctatatgtaactagttcaatattggtagtgcaccaaaggcataaacaaaggaaagggaaaaacaaatgcttgtcctctaatgatcacttcccgtgtgcatcatcaaagcacacaggcatagatttgaatttatgaatttggtgctttaattagtgtaagagtcacaagacttaagactgcaacttcactggttgtgtcctttggatgaggaatgagaaaccttcaactaaagttgactgaaaatccttactaattagtatctttcacccttcctacaaaatggagttagttttcaattgtttttggcatgaatgttagctttcatagaatgctaagtctttgatgatgatacttgttgagctaccaatttgatccaaaaggaaatgttgttagataatgtttggccaacaaaatatttaacaccctatgtgatatcctgcattggtcaagaagaaaagttcctattatagatgtgattttcttttaaatatttagatttgttttaaagttgtacaaattttagtcccaaaacggatattatccacatgggagggaataggtctttataattggtatcataatcgatccttgacctgatgtgatagtttgtttatttgattttacaaggtgtgtctatccatttgatcccataatccccataggcaagacaaggatgttttgcctgcgaggtgaatgtaatatcccacatcagtgtgttggaaaagttcctagtattatatatgtaatgagttcattcattttaactatgtagattgttttaaagttgtgcaagctttgatctaaaacccatccaccttgtaatgtccatcgaacatgatgaagatgttttgtttgcagggtgattgtggtatttcacattggctagaaagaaaagttactaacactatatatgtagtgagtttctcttaattgtgtatatatgttttaaagccatgagagctttagtccacaatgggcaatattctttttgaaaaattctggagagaggcaaaggcttatccagttggataagatatagggaatttagtttgttgtgtttgctagaaggagtggagttttgttgccaaaaataagggaagcggtttagcaagatatgaaaggaatgacaaagggggtaaagttggagcaacacaaaaattgggcaaaagattcgtcaaatgcttagctttgttgaggcgtagaagtttgttttggttttcctaaaaggcagaggtgtcctttagggatgggctattcttgcaaggaaacttcttgtcttagagtggtttctttctttcaagatactaggagtgttgcttttatcaaaggacctatagtagaaaggagcaagatagtgtctttgttaatagtcttccagggacaaggtgaagaatgtttagggtgcaataggagatgcggttgggatttagtaagggagcaaggaggttttaaggaagatgactctagaattgtagactttgaacaggtgggttggtcataattggtagctgaaaggtgggatgaatttatccttgctagggggagctctcattttgttcgagtttgatgaaggtgcaaatgtggagatggtgcttcactatgatgtaaggaggtataaagataaaagagttattcttggatagataggtgcttgaggtacctatcagaaaaaaaaaaaaaaaaaaagtaggtgagtgcttgaggtggggtgcttttggaacaacatccacataaaggaagtgtgggtgatagtaatgggacttccattgcacttgtatgatagtatgttgtttaaaaaattaagggattggtatggaggattcgttggagtcgatggaggcataactgtcacaccctagattttagacttattaatactcaaatacaaaattagtgctcccaaaaccggggagacaaaatttaaatgttgagtttctggttgattttgtgctaaatgaagacatggaaacctgttataaaaaagtatacatcctatgataaactttgtaaccatttattaacaaaccgtttcacaaaagaaaacctgtaccatcttactttttacataccaaaacacaatgattcactaagggtagcctatactacaggtgtaaaaacaagtatacattttatcattccttcaaaaatgatttagtctttgaatgatacaaaggcaaaagcctccaaacactttcaacacgaacaaaacaacatccaatcaatacaaaagcaatactcaagcattaaccccaactgatgtcttctgacttgtatctaaagggggaaggaatagggtgagttcataactcagtaggaaagcttataaccatcctgtgcgtattcttaaaaaccttgaattaaacatataatagcatgcatgataaacaatttataaccattagcaaatatgcaataatgccaaacatgcatgcatgttattgatggttttatttctgtttagcctcatccatcatctcacacctgataagctactaacccccattaatgtacatatcaaatatcaatgctccaaaagttattcggtcataataatgactattctggggactatcgtccaagggtaagtcataccccatgtcttctgggactcatacccaatggcaggaccaaccccatgccttttgggactacaacccaagggcaggaccaaccctatatactcacattggagtgtcttcctcgagggctttagggactttcacccaaggacccacgatcctacgtaaacaatatatccaaagatagtgcttatagcttcacataaacacttcccacatatcaatctattttctggatattatctgccattattccatattgtttttgcaatgcaaccatatcatgaaccattttctcaatattgaacccatggatcctcataccaatacatatccaaatatcattgcaacattttaaacaataaactgagaacaccatgacacattaaagtacttcatgaaatcatagtaatgacatgaaaattccaataaatgcttcaagaaattacaccaagatatacaatggaatggtatgaacttccctaccttacgccaacttctcttttgcaatccttctatgtggacacccttagctattacaaggaactgaaatgaaacaatatagtttaggttttctagccataaaaatttcataattaaagcttacgacattcttcccttattgcgaatttttacaatttgatgttgatgacttaactttccatattccctaatcatcatgcctgcaggtttaaaatctaatttaaggtggattgaacaatctttgctatgcatactgatgtctgccaattaattagtatacactacttactttgattttgctccaagtattcaaataaacctaattaatcacaggattcattaatttatttttttcaattaaagcaaactaaacaaacaagcatgctgaatcttccatcaagagaaatcaaaatatttaaaaccctaattaaccttgatttataattaaaaaatgtttatacctaattaaactcagcttttaaacaaactttatcgttaatttgcttcaaaagatcatttggaacctaaatctaccaaaatcactaaatttattttcttctttaccttgattcttcactttctctatctagattctctctctaaacccaccagcttgttgcagagacaaggctggaaatgagggttggtagcccttataaaggggtcctgaagctggcatgcatgagatggcaagccctaaggctgccactaacctcaagtttcctatatttccgattaagtccctctagttataagtttttatgtctatagctgcacattagtcccttaagttttcataattctaattaacccctaagaacctaataagcatacttaagtcgttaactaaccatacttaaccttaatcaaagtttaattcacaattaaacaagattagcgttaaactagtcttagcctctaattaagcacgtttaaagttaagtactaagataatcattattactaggtattacaataactatgttccaaaaccttcaatgggcaagaatccttgtgatgttagatgggaggaaggtaatctaggtctcctcaagtggtggtgggttcaaggtgtttcgtgatttagctgtgttgggtagttcctccatggttgtctttggtggtccctaaggaggatttcaaggactaagagatttgggaggaagatagggacaattcatgtgctagagaaagagtgatcaataataatgaggatggtatgaaaggtgtaggagatgtgtcattctttggtttaaagagggctagaaatggtggtaaacgagtggagatttaaatacaaggatggttaataggttaaaggatgaagtcttggaaggtgacaatgggctctatgttgaaaacaagcttggatgtttgcgtattgtgggtttgagagcataggattgtttctaggctacatcaagcctaggattgctaggttaggtttagtctatttaagggttggttttagagcattccattatggtatggataggtgttagtgggcttaggtgggtctggtgcccgtggaagagatgaagaggggatgttgtctaagagggtgtggcttgatttttcaaaatcaataaagagtagtatctcttcggtcaaaaagggaggacactcctactttcgaagggttaaggatgatgcatgaggatctagtggttggttccatttgtactcaaatggcctcccttgtttcgaccgctttgatgttgtcagaccataatacctcatgatttgatgtggtgcttttaaaggaagcttctaggtttacaagcaatcctttatactttgtgaactcggttgggggtagggcttcgagttctctttctatctctaaggggcttaacattaagtggaggattgtgagcctaaaggggtgcaaagatggttttgagcgtaaggacaagatgcctttgagaatattttggcaaatggaagcctggtggagttttcatttgttagggagaaggtagatggcaatttgaagggtgtgaggacaacggacaaggatgtggtagtacaagaggggtttgagcatggtggctttcaacaatttctctgtcttgttgagagaggggcttgaattggagattttgagtctcgttaaagagatgaaaaagagaggaattaaaagcccagattggtgagaagaggaggaagaaaaactgttcttcctcatttgaagggggactaaggaggttggaatgttctatgaatcatataggaaaacttaaagggagtgagaatggaaaggatggctaggagcttgctaaagtttgccaatgaagttaagaattcgttcatggaatgttagaagggaaaatgacaagcagagaaggaaggttgtaaagtccctaattcaatcattgacgatagacttggtgtgtttacaagaaataaaaatttagaatatgtcggtggagatagttaggagcttaggaatgggacgatttttagattggggagttatgggagctaggggtgcagttggaggagtgatagtcttttgggacaagagagtgctatagcttgattgcatgggagggaggagtttccaattttatgttgttttaggtgaatcaaagatggcttcatttacgttactttgaggtttacaaaaccaactttaggggaattaaagggtttgtggactgagttaggggctataaaagggttgtgggaagatccctgtgtgtgtcgaaagagatttcaacatagctaggttccattcagtttttggtgtttgaagagtgagaaattcattatagagaggtggtgcagtgtactttactaaggcctgtatcatatcattcttcaattcttttagatggtaaagggggtaggtagtattccattcagtttgaatatatgcagttgaagatagagggtttctaagactttctttaggagtggcagatggtatataatttcaaaggttcatacaacttcattttggctttctaattgaaagtgctggaaatagaatgggtggaaggtttttggtaatgtgttagagggtgtttggtaaatcaacttaatgacttaaagtgactaaataacttaatttaagttattaagcaagttaagtatgtttgataaaataacttaatatcacaacttaaagttaacaatgactgtaagtattaagtcaaaatagtcaatttagtcttaatccctttttttttctttgttttatttgcccacaactaacaaaaatatatttaacaactatagcttcagattcattactcatcttttatgaaaataaatattaattaaaagttttaataataaacattaattacaactaatgaggacaagtatgtcaatttaataacttaaaataaattttaagttaactataccaataaccttaatacttaaagtaaaaaataagtaataagttttaagttaacaatttaagagcaattttacttaaaatcaacttaagttattaagtaatatgtattaagttttactaaacacccacttagtcaagaaggagatgatttttagtcaagtgtgctagtgggattctaaggaaaaggaaggagctttttctcttaaggaagccaaagctagaagtgtagcaagggaagaggattgcatgtggatgtttttggaagaagtctcatacagacttaaatcaagagagatttggctaaaggagggtgacaaaaacacaattttttttatttttttatttttattttattttttattttatttttataaaatggataatgcacataagagaaggatttttttttgccaaaatcaaaattattgggacttagccatatgaggactaggaggtaaaggaagtagtttaggctttgcaattgtttgatttaggggagtggagacctagcactatgggatgtttttcaaagccttaaacgatcagagattgaaggattagaggtgcctttcactaaggaggaggtgttcaaggttttgtcaggcttgaatggggataagactttaggcttgggtggttttcctatgctttctagcaatttagtagagactttatgaaagacaaagtgttggggctttttagggagttctaagacttaggaaagtttgagaaaaaatggttgaatgctgtgttaatttttttttttctttttttaaaaattgtgttaatgatctaatagacttttagaccaattagcttggtggattgtttgtacagctcctagctaaggtgttggcaaataagttgaaggtggtgggaaaggtggtttttgatttccaaaatgttgttgtagagagaaggtagattcttgatgcaacacttaccgttaatgaggtaattgatcctatgatgaagagtggctccaatagtatagtttgtaagcttgacattgagaaggcatacgaccatgttaattgaggtttgttgctaactattcttggaaaaatggggtttgatcagaaatggactgaatgattaaatgatacatctcgacaataaagttttccttgttggtcaatgatgctcctttgggtttttttgaaagctttagacgcttgagacaaggggaccttctctcttcttatgtatttgttttggtgatgaagacgctcagttgtctattggggagggctagggagggtggtttttttgttggcttttaagcttgtgagggaagggaagtgagggggtggaagtgtctgatctgttgtttgccaacaccaccttagttttttgcgaggctatgcaaattcaaatgatacacttaagttgcttgttcatgtggtttaaaggtatctcaaggctgaaaattatccttgagaaaagtgaactgatcctaatatagagggtggctaatgtggaggatttggctttataattgggatacagtgttaaggagcttccaactacttacttggagcttcctttaagggctccattcatagcaaagtcagtttaggacaatgtgaaagaaagatttcacagaagattattgtttcaaagtactttgtgcagtttgtctatttattttatgtccttgtttaacatgcttagaaaggtcagattgagggttgagaaaatttagaaggtactttctttggtgaggtgggacttaagagagaaagatgcattagtgaaatgaccaattgtttgcagagagagaagaaatagagctttggaagagaggatgtcattggcaaatagaagtctcctttgttaaggcaaagaggaatcaatagatcgcattcttctacaccatgccaaagtaagggaattgttgcaaattttattctctttgttaggcatcgcataggtccttccttctatggccaaggagattcttttgagttgccatgattcttttgttggaaaaaaacgcaagaagcaagaaggtttagaaagttagtgtgctattcattttttcgacatatggaaggaaagaaattgaagagtgttcaaaagtggagagcagccagttcaagcactaaagtgctcctttccttagaactctagtgctatgggtttgcatgtacctggaagaagtctcattgcctttaattgattttatagatagtgggggatgtaattgtggggagggggtagttatttttatgcgctctctttttctggcaatgtcttttggtacctattgtatactccatgtgtagcttggtgtatagcttcttttttatatttatgatatttgcttgcagacttatctagaaaatggaattattatatataaaaaatggaaatataagaacaaagatagctcagagaatcctattgtgtctctgttttttattttcttattgttttataatgacgaaacaatagaactctacccttgcattcggattacaaaatttaatcaaattacttacagttgccaatcaccttgaattattaaaattatctggttcatgtatctcacttaacatttaccaacctattaaataatatgcttgcaaaaaattgaaaaaatgtaaaggtgaaattgtttgctaaatatccctatgcctcctgccaatcttattgttgaagaactgcatgtctccattgcaatgctagatcactgcttcgttcacctcataacttcaaaatcaattgattacagtaggcttcccagcaaaagaaacttgtaaaatcttactttggaagatagttaaatccaaacacaaaataagttctctcttatattttggcattcattaacaaattttgtacgccaactctatcaattagattaccagctggtatggacagctgattagttggtttttcacccagcagctcttgtttaggtggattgaatacaaggtttgtattattttttcttaaagcatggaagacacaattgagtgcctttaatttagtacctgggatattctttcttgattattaaatccaaaacttgcaaggactttatttgggaactcccaataaattattcagtcagtgggttggcaatgggtggtttggatccaaattttcttgaaacaccccaaaacatagaatgcttctagtctgcagctacctctcaatcgaatttgtgaaccttccctctgaaaaatttatattggtttgaaagtgcccttacagttaactaggcatcattgcttttgctcttctgtttttttaggattac

SEQ ID NO: 12918 - DNA, 29275 bp, Vitis vinifera
  Intron number 4 from transcript GSVIVT01032309001 (locus G SVIVG01032309001) derived from phytozome v7.0 (chr-ID chr1 1; pos 14888328 to 14917602)
ttctattgtttgtggtggggcttacaaaacctaaggtatgatttcattaagatgctctatttcattggattggaatcataactgcttttttgattcacatgttccttaagttctagttatggacagtgatggctataaaattagtcccatacattctttctagttaattgttctttgtattcaccaagaatgtggtagagaaagtgtctaagctatagaatgggtggagaatagcatgcatattttaggtggcatagttgctttcattcacttattctatgtatggatcgtgactttggttctttgttagattttgtctaccattcatgaagagttcaaggtagtgtgcagtttttccccaggccttgcgctctaagcgtactttctctatatttggatgtgtcctacttttgttaggaactttctaataagtttattgttttcccataaagaaacaaacacaaatctagggttgtgtcttagttcgggttgattcttatgtctcctccaccattctaactcacattagggtcagccatttttctaaccaagaatcagttcattgtgtgtaagaaccaaaccagatgtaaaggtcaggttaatctagattggttcaagttagtaaaggttttcttagcaatgaaaaagggagaatgctgccaaacgagatgtaaggggcaggattgtctagattggttctagttaggaaggcttttcttaacaatgaagaaagggtttgttaacaagcgttagttttgggtatgaaataaaacaatttgttaatgtaaaaacaaaaatgatataagggatcccttaagccaagtagttagataaccagttttcctaaaaacttaagcttgtaagatttggacccataatgtatatcatgcactctaacaccctccctcacatgtagcatcctttgatcgtacacgtgggcttaataaattggagaaataaaaatagccctttttaggcttaatgaattgaagaaataaacatgtggtgaggttcaaaaacatgacctcttaccaaacaaagttttgatactatgttaaacaatcaattttcctaaaaggttaaacttgtagggtgtgggcctacattgtatatcatgtactctaacaaaagtcaaaagaaggagatacaatttaaggaacaagaaaaagatgtgaaaagcaacaaacacttgaacaagaagatgatgtaccctaaagtttttccctacaatcaaataaaggtgggcttcactatcttaggatttaaggaggacaatgaagaattaagattatgatggtgcagaaaaaaaattaaaactagaaaaaggaaagaaaagatatagaaaggagtgacaaaataaaattttagggtgtcgctaaggcctttatgagtcttatccagaagtgccactaatgtattctgacctttaaaggatgcaaaaaggaaaaactagcattattcactcaacgttccttggtttccatcaagtacccttatttttctgctttagaggaaaaaaaaaaaacataccatgaagtaaactcaacctatgcattaatccattcaaattaattttgaaatcaaagaggaaaaatgcaactctctactctattttattgagaatgcaagccttaaatatataggtaatctatttaagaagataattatgaaaaataaattattcctaagaactaggaacctaagaaacataaagctaaaaactaggggattatatctttagttgaaaattaaaaaataaataaatactctagtaaaataattggataattatctccaactaccaacactccccctccccctcaagctggggaatatatgtccagtagtcccagcttgcttgtgagctcatcaaaattccgacgaggcaatccctatgttaggatgtttgctatttgtttccttgtaggtacatacttcatgttaagcatccctcctttttttttttttttttttgataaataagaacagaatgtattaacaagaggcaaaaaagccacaaagcatacagggagtatacaaggcaactaaggcctcgcaaccaaaagaagaagaaacaaaaaactcaccaacccttaattggaagctaaccactccaaaaagcctataagggtgagcgactcctctccaatatacaatttagcccaaccccataaattacaaataaaagaatttttaagcttctgaattgctaacaccccccccccccccaaaagctagtctatttctctccttccaaaccgtccaaaaaatgtacaatggaatggatttccaaatctttttcctttttttccccacaaaagagcccctccagctaaataaaacctcctttacagtttctagaaaaacccactgagcgccaaacaaaccaagaacaatatcccacaacactctggccactgtatagtgtattagaatatgatttacaatttcctcttcgcaaccacacaagaaacaacaattaggaagctgccacccttttttctggagtctattaagagtaagcaccttcctccaagcggcttcccacgtgcaaaacacaattttggttggaactctatccacccaaatgttactttttgggaaaaggcggcaatggggcttaccaacaagctgtacgctttcttgactctaaactacctgtttctttcttccttccaaaaaaccaagtcttcctccaaagtaatcctgtgacccctcaaaacaagaagcaaattgcctacaatatccaattcccaatcattaaagtccctaagaaaccttaaattccagccgccttgatcttctcttttatgaaatgacgatccacctcctcctgttttgttttatcatggtgaactggattgtgtgctatgcttatggttgctttattgtcactatataacaccattggattagttgtagtcacacatagttatcctagaagcctttttaattaaatcaatttgcaaatccctagagctatcactctaaactcaacttcaacactacttctagctaccactgattgcttcttacttttccatgttacaatatttccccaaacaaaggtgaagtaacctgaagttgatcacctattttctattgatcctgcctaactgcgttagtaaaggcttctaatgttctctcttatgatttccttaagaaaagtccctttctaggtgttattttgagatatctcaggatttgaaacaccgcttctagatgttcttcacaagaggcgtgcatgtattgacctaccatacttattgcaaagtcaatatctagtcgagtgggtgagagataaataagcttacctactagtctttgatatccgcctttatccacaggagttccggttttatttttcttattttgatctattggtgtatcaacaggtttgcaaccgagcattcttgtttccttaaataaatcaagagtatactttttttgagagaccacaataccctttctagtccttgccacttccatgccaagaaagtaccttaagggttcgagatccttaatttcaaattctctagccatgacgccttggagcctttccatttcctcaagatcattccctgtgagaattatatcatcaacatacgctataaggatgctaatcttaccatttgacgagtgcctaaacaatagggtatgatcaatttgcccttgtgtaaaatcgtgaccttttacagttctagtgaatcttttgaaccataccctgggagattgtttcagaccatagagggaccgtttcaacttacaaacaagattatttctttcattgtcttcaaatcctggtggcaagtccatataaacttcctcatctagttctccgtttaggaatgcattcttgacatccaactattgaagaggccaatctaggttggctgctaatggcaagaggacttgtatggtgtttaatttagcaataggtgtaaatgcctcttgataatctatctcattcctctaaatgaaacctttagcaaccaaacgtgctttatacctctcaactatcccatttgatttatatttgatagtgaacacccatttacaatccactgtagttttcccctttggcaattgaacaagttcccaggtattatttttttttaacgccttcatttcctccaatactgaatttttccactctgggatagttagagcctcccgtatagacctcagaatctcaatacaagaaatgttagtagtaaagattcaggaagaagacaaacctttatacgacacaaagtgggatatggggttcatggggtaggatcttacacctttcctaagggtcataggcaaatctagattttcaaagacaacttgacttggatttttctgggtagaatttaaaagtacttggatcattttgcaaagctatcacattcagtttaggctcttaacagtgtggttccacaataggcagtttcctttgaggtttaatccttctactatagacatggagttcttgtctctccaaagcttcccctgtttttgaaatgtgttgagctggtgacataacaagctcaactagattgagatgagtggaattgggtaggtctatggatttggatttaggcaaatttctaactcaagttgctcaaggagggatgggacactaatagattgtgtgtttgtttcccagaaacactcttcactcttaagattccccccttgaagagtgtttgtagaaaagtggggcccaacaccttttaggttcgagaatatgtggttgcaacatcatagtttcaaagagtgttttagcagttggtggagagaatttgtaggaaatggttggaaaggtcacaagttcacgaggaagttacaatttgttaaggcaaaattgaaagattggaataagaatacttttagaatgcttaaggaaaggaaaaaaaccatcttggatgaaatagctaatattgatgccattgaacaagaaggggctctctcttctgatcttgcagctcaaagagttgtaagaaaaggggagctagaggaattaattttgagggaagaaattcattggagacaaaaagctaaggtaaaatgggttaaggacggggattgtaactcaaagctatttcacaaagtggctaatgggatacgaaacatgaatttcatcaaattcttggagaatgaaagaggtttggtgttagataattctgagagcatcacagaggagatattactttatttcaaaaagctctactcgagtcctcctagtgagtcatggagagtagaaggtattgattggtcccctatatcagaagagagtgcttctaggctggattcccctttcactgaagaagagatctttaatgccatctttcagttagatagggataaggcgccggggcctgatggtttcaccatagcagtgttgcaggattgttggtatgtgatcaaggaagacttagtgagggtgtttgcagagtttcacaatagtgggattattaatcaaaacaccaatgcctccttcatagtccttttgcccaaaaagagtcagtcaaagaagatttcggattttaaacctatcagtctgatcacttgtctatataaggtaatagcaaaagtcttgtcaaggcgtctaagaggagtactacacgagaccatccactccactcaaggtgcttttgctcaagggagacaaattttggatgcagttcttatagccaatgagattttggacgagaaaaggcgattaggggaggagggagttgtattcaagatagactttgaaaaggcttatgaccatgtggaatgagactttttggattacgtgttggagaagaagggatttagttctaaatggaggagttggatgagaggttgtttgtcgtcggtctcttatgctattctagtgaacggtaatgctaaagggtgggtcaagacatctagaggtttaagacaaggtgaccctttatcccctttcctgttcactattgttgcagatgtgttgagtacaatgttgttgaaagctgaggaaagaagtttgctggagggcttcagggtaggtagaaatagatgtagggtgtcccatctgcaattcgcagatgataccatcctctttgctaactctagtgaggaagaactgcaaactcttaagagtttattgttagtgtttggtcaaatctctgggcttaaggtcaattttgacaagagtaatctttttggcatcaaccttgatctgaatcatctctctaggttagccttgatgcttgactgcaaggcttcagattgacctatactttatctgggtcttcctttgggagggaatccaactgcttgtggattttgggatccagtgattgagagaatctctaggagatgagacggatggcaaaaggcttacttatctttaggtggtaggataactctcctacactcttgcctttcccatatccctagctacttcctttctctgtttaagattccagcttcagtggttgcaacagtcagaggatgcaaagggactttctttggtcaggggttggggaaggcaaaagagatcatcttgttaggtgggatgcagtgtgcaagccgagggtaaaagggggtttggggttaggaagatacctttaaggaattgcgctcttttagggaaatggttgtggaggtttcctagggagagtacaactctatggcatcaggtcattcttagcatatacgggacacactcaaatggttgggatgccaatactgtagtcagatggtcacaccgctgtccttggaaggccattgcacaagtctttcaggatttttccaagtatactcagtttatcgtaggagatggggaaagaattcgcttttgggaagatttgtggcggggggaccaaatctttaaagaccaatatccaagactatatcgagtagtaatggataaaaatattcctatatcttcaattctcagttcgactcaccctttctcatggaactttaatttccgtcgtaatctaactgattatgagatagaagatctagaacgcctcatgcactctctagattgtatgaacttatccacttccgcttcagatgcgagatcttggtctttattgtttatagtcaagtctttctttatagccttgtcccaaatgcctgattcatctccatttttccccactaagtttgtatggaaatctcaagtccctttcaaagttaaggcctttgtctggcttgtggcacacaagaaggtaaataccagtgacttgctacaattgaggagaccccacaaagctcttagccctgacatatgtaagttgtgtatggagcaaggagaatcagcagatcatcttttcctccattgttcagtgacgttggggttgtggcacaaactttttcagttagccaaaatggattgggtatctccgaaaagcatttcagacatgatgttcatcaattataaaggttttggcaagtccaagagaggggtaattctgtggcaaaatgcgtatatagcgttaatctgggttgtgtggcgggaaaaaaatgttaggatatttgaggacaaagctaggaattcagagaatctttgagattccattcatttccttgcgtccttttgggcttttggttcagcgggttttaagggcatcccccttaacgtattacaacttgattggctagcagtgtgtagatctaatagttctaatgggacggcctagtgtattgttattttttcgtgttgtttagttttacttttggcgggaggattcctcatcctccttttgtacttctttttctatcaatatattcacgcatagtttcctatcaaaaaaaaaaaaaagtgttcatagaaaagtgtggttgtgacttgaaaaaagtgacatttttggagagaaaatttctttatggttgaagaaaaacacttgtatccattttgggttggagagttgtaacaacctgcatctaaccatgtaaatattatctgcactagaccctaaggaaccctcactgctttaaaacacatcacaactttaaaactcatctacatagttaagagagactcatacttatatagtgtcaaaaactttctcccctactcgatgtgggacatcacaaacatatccctcccctacaaacccaacgtcctcgtgtcccacaagattgtggagtcaaatagacaaataccccccatggtatgaaacaaacacacaccctcacggacccaaacaaactctcacatcgggatcagggatcgtctttaataccatttgtaatgactagttcccaaccatataaatattgtctgccctgggcccaaaggagttctcatggctttaaaacgcgtctacatggttaagaagaacccaacaacctatacttatatagtgtcagaaactttctcccttatccgatgtgggatatcatcacaaacaccccaccttctccccctcccccccaaatgcaaacataacatcctcgttatgtcccatgggattgcgaggtcaaacacccagacacaatgaggatattgtgtttgtatgggagggggctgggaatgtttgtgatgtcctacatcggataggagagaaagttcttaatgctatacaagtatgagctcctcttaaccaagtagacgtgttttaaagtcgtgagggccctttgggtccagagcggacaatatttacacggttgggtgcggattattacaaatggcatcaaagccaatcttcgacctcggtgtgagggtttgtttggccctatcggggatgtttatttgtttgatctcacaatcctgtgggacataacaaagacgttgcgtctacatgagtgggtgtttatgatatctcacattggatgaaggagaaagtttctaatattatataagtatcaccagacacaacaaagtttctgatatctcacattggttgtgtctactcctcttaaccatgtagagacgttttaaagccgtgagggcctctttagtccagagcgaacaatatctatacgattgagtgcaagtcattacaagagtatcctaagaacatgcacttgatggcttatggattgagtttgcttctgttttggtattggacatgaacgaaggccaaacaaccaaacgtttttaagggtaaggaattgagtgatcaaaacatgggataagacttaatgaagatagacatagatgtatgatactgaaggacacgactcgggagtcggttaattagatagcatgttgtgaggatagcttctccttataggtatttgggtacactcatggtaaacataagggctccgacaacttctaagaggtggcggttttttctcttggcaaggccattttgttgaggtgtatttttttatttatttatcagaaacgaagaagattatattaatattagaacaaatacaaggagagataaaagagacaagagaaagaggaaaaaccaagggaaggatgagaggtccttcctacacaaatagaataaaggataaaactcccaacactctaaaaacaaagagaaaccccatcaatcttcaaacttttgaaacgcaaaccccaatccaattgagttgtagaatgtttagaggaactcctctaaaagcttcagtacaagaagcccatagagaagaataaaaccggatcaaatcccataccatctcttccgttctccctttatcctcaaagatcctattgtttctctcttgccacaccatccaaatcaaagtaaggcaaacaatttgccaaagtgtcttgcctcttaatgagttccccaagcctttaaaagtaataaccaacatgtcctcaaggctccttggagggacccaaaccaaccctactagattgaacaacctgtgccaaagtccaatggtaacaggacaatgaagaaaaaggtggtcaatcgactctccatttcttttgcaaagaatacaccattgaggacagaaggctttgtaaggtcttctcaattgcaacttgtcattagtgtttaccttcccatgtgctactaaccaagcgagggccttaacctttgaaaggacttttgagctccataaaaatttggccggaaggaacattaaaggatttgagacttttgacaaggccaagaaaaaagatttcactgaaaacgaacctgacgaagacaaagaccacgctcttgaatctgatgaagaaggagagaaaagcacaaaactaagggaggacattaatctttgaaggagatcaatttctgaatccgttagattgcggtgaaagttaaaattccaagacagtggtgaggaattgccaaggacatttgagacagtgaggtttttcacagaaataactctgtaaagatcagcaaattgagaacacaaagtttggttaccccaccaaagatcttcccagaaccgaattctctccccattccccaccactaggcggacaaaaggggaaaattcctggaaaaacttgagcaatagccttccattttgttgaggtgtattgacacaagaactttggtgaatcatgccattttgttctaggtaacctcccaaaatagaatggaaatattcttgaccattgtcaatcctaaggacttggatttgtgcttgaaattgggttttaatcattgaatgaaaggtttgaaatatttttcaagttttagatttttcttttagaaggtatattcaacacaaaccttatgtggtcatcaataaaagttatgaaccatttactacctaaatattagttaccctagacggtccctaaatatcactatggataatggaaaaaggcctcaatgatttatatggttgtgggaggaaaggaactcaagtatgtttggcaatttgataaatttttaaaagttgcgaggatggaggtttgtggatttttactggggtgtatggcccaatgtgtaggaggaatagagaatgtttctgggaggagcttggggcaattagggggttatgaagtgatccttggtgtatcagaggtgatttcaatgtgataaggtttcctagggagcgcaattggggaggtggtctttcatcaatcatgaggagatttttggaggttatagaggatctaaaattgaaagatatctccttgtaagggggggccttcacctagagtggtgggttaaataagcagtctcagtctagacttgattgatttttgttgtttgaagattagaataagctcttttttttttttttttgataggaaacgacaaagggatatattgatgaaaaggaagtataagagaaggatgaggaatcctcccaccaaagaaaaacaaaattacaaggaatcaaatacaagaaaatacaaagcaaaaacaagcaaactctctaggttagaccaacccattggaattacacaccgctaaccaatcaagttgtaatacgttaaggggaatccccctaaaaaccttggaacaaaaagcccaaagagaagcaaggaaatgaatagaatccaaaggttctctgaattccttactttatcctaaaaaatccttgcatttctttcccgcagcttgccataaaacaatccctctcttagaaaatccaaaaccgttaaaattggtagacaacatgtcatagatgctcctcgggaggacccaatccgtcttggctaactgaaataatctgtgccacaatcccattgtcaaagagcaatggagaaaaagatgatctactgattcttcatgcttcatgcacaacttacaaatgtcagaactaagtgctttgtagggtcttttcgattgtagcaagtcattagtatttactttcttgtgtgccactaaccagacaaaggacttgactttgaaagggacttaagaattccaaacaaacttagtaaggaaaactagaggaaaaccagaaaattgggataaggcaagaaagaaagatttgactgtaaaaagtcctgaaggagataaagaccaggatctcatatttgaaaccgaaggtgataaatgtagacaatcaagagactgcatgaggccttctaaatcttttatctcaaaatcggaaaggttacggcgaaagttagagttccaagagaaggggcgagtagagccgaaaattgaagaaatatgaatatttttatccatgactactctagatagttttggatattggactcccaaaggttggtccccccaccacgagtcttcccagaaccaaattatttccccatctcctaccacaaaccgagtaaacttggaaaactcttgggagacttgtgcaatagccttccaaggacaacgatgtgaccatctgactgtagtgttggcatcccaaccattggagtgtgattcataaatgcttaaaataacctgatgccacagagctgaaccctccttagggtacctccacaaccatttccctaagagaccgaaattccttatagaaattttcccaaatcccaatccctcttttgccttcggattacacactacattccagctaacaagatgatctcttttgccttccccaacccttgaccataaaaaatctctttgcgatctctcaatttttgctgccactaaggcggtgtatcctctgtttctcttccaaagagcacccatgaagctctttcccatccaggctggcgacaggcaatggtggatgaaatggctgctctgcactctaatggcacttgggatcttgttgttttaccctctggtaaatctacagttggttgtcgttgggtctatgcagttaaggttggtcctgatggtcaggttgatcgccttaaggcccgcttagttgctaaaggctatactcaagtttatggttctgattatggtgacacattctcacctgttgccaagattgcttctgtccgcttgcttctctccatggctgctatgtgttcttggcctctttatcagttggatattaaaaatgccttccttcatggtgatcttgccgaggaagtttatatggagcaacctcctggttttgttgctcagggggagtctggtttagtgtgcaggttacgccgttctctatatggcttgaaacaatctcctcgagcatggtttagccgttttagttctgttgttcaagagtttggcatgcttcgcagtacagcagaccattcagttttttatcatcataactccttggggcagtgtatttatctggttgtttatgtggacgacatcgtcattacaggcagtgatcaggatggtattcagaaactaaagcaacatctttttacccactttcagaccaaagacttggggaaactcaagtatttcttgggaattgagatagctcaatccagttctggtgtggtcctttcccaaaggaagtatgctttagacatcctggaagaaaccggtatgttagactgtaaaccggtagacacacctatggatccgaatgtcaaacttgtaccaggacagggggagcctttaggagaccccgggagatatcgacgactcgtaggtaaattgaactatctcaccattactcgtccagacatttcttttcctgtgagtgttgttagtcaattcctacagtcaccatgtgatagccattgggatgccgtaatccgtattcttcgatatatcaaaagtacaccaggccaaggtgtattgtaccagaatagaggtcatactcaagttgttggttacacagatgcagattgggctggctcacccacagatagacgttccacttcagggtactgtgtttttattggaggtaatctaatatcttggaagagtaagaaacaagatgtagtggccagatctagcgctgaagccgagtatcgagctatgactttggcaacatgtgaactcatatggttgagacatcttcttcaggagttgagatttggaaaggatgaacagatgaaactcatctgtgataaccaggccgcattacatattgcatccaatccagtctttcatgaaaggaccaagcatattgaagttgactgtcattttattagagagaagatcgcatcaggatgtattgctacaagttttgtcaattcaaatgatcaactagcagacatcttcactaaatctctcagaggtcctaggattaaatatatttgtaacaagcttggtgcatatgacgtatatgctccagcttgagggggagtgttgaatataatgtatttatagtatattatctttccttgttaatataggtcacatgtatggtagttaggactcctagccttgtatatatatatctctcaattgtaagtagacatcacatgaatgagaattaaggtttttctcctttctctctctctcaacaggcgggaatcttaaacaaggagaggaagtaacaagacatatgggtgaagcaggattgaatgagttatcctgcctccaaaagataaatacgtcttttgccacccatctaatcttctcgagatcctcttaatcactagatcccaaaagccacgagccttgggattccctcccaaaggaagacccaggtagagtataggccaaccaaaagccttgcaatcaagcaactcggccaacctagaaagatgattttgttcaagattaatgccataaatattacttttgtcaaggttaacctttagcccagaaatatgcctaaacactagcaaaacactcttgagggttagcatatcctcctctcgagtgttagaaaagaaaatggtatcatctacaaattgcaaatgggacacccttgttttgttcctacccaccctgaaaccctccaaggcatttctttcttctgctctcaataacatcctgctcagtacatctgcaactacaaaaaatgggataaagggtctccttgtcttaaacctctagatgccttgacccaccctttagcgtttccattcactaggactacaaaagataccgtggacaaacaacctctcatccgtttcctccatctaggactaaacctcttcttctccaacacataatccaaaaaatcccaactcacatggtcgtaagccttttcaaagtgaattttgaagacaactccttcctcccctgatcatcttttctcatccactatctcattggctatgagaactgcattcaaaatttgtctcccttgaacaaaagcgtcttgcgtagaatggatagtttcgtgaagtacccctcttagacgccctgatagcactttgactattatcttgtaaagactagtgatcaagctaataggtctatagtctgagattttctttgacatgctttttttgggtaacagaactatgaaggaagcattagttctttgattgataatcccgttcttgtgaaactctgcaaacattctcactagatcctccttgatcacatcccaacaatcttgaaacactgcaatagtaaagccattaggccctgatgccttatccctatccaactgaaaaatggccttagaaatctcttcttcagtaaaaggggagtccaacctagatgcactctctccagatataagggatcaatctaagccttcaactctccaaaagggctcgagtagaaaataccttaagatctcctctttgatgctctctgaattattcaacactaggcctctttcattctccaacaccttgatatatttcctatttcgcctaccattagccactttatgataaaactttaagttacaatccccttaactcatttcaccctagctttttgtctccaatgatttcttccctcaatatcaattcctctaactccccttttcttaaagctctctgaacttaaagtttagaggtgagacccctttcttgctccatggtatcaaagttagctaattcgaacatgatacttttttccctttcgtttagctctccaaaagaagccttattccactctttcaatttggccttaataaattgtaatttcctcatgaacttgtgaccttcccacccatttccttgaaaatctctccaccaacttctaaagctctccttaaaactaggatgttgcaaccacatattctcaagcctaaaaagtgttgggccctactggaatggattggtttccaagactatcggccaatgatccgatgtccatttaggaagaacttcttgaaggctttgaggaaataattgttcccactcatttgagtaaagaaatcgatctaatctcttgcatacgggagactcttgcatgtttgaccaagtgaatggtgagctccgcaaaggtggatctatcaattcacattctcttataaaatcatcaaagtccttcatgcttggggttaaactagaacctcccaattttttgaacttctccttatgacattgaaatcgccgcctacacaccaaaacgggaaaaaaagtccaaaaatgtctgaaagctccacccaaaaatccttcctaagtactgtgttgtttgggccataaactgtagataaccataacggtccacatccatccaatacgaacttgactgagaccgaaaaggaacctattaccatctcctcattgtgcagttttttagagtcccaaataatcaaaatcccgctcaaagcctcgcacgccggaagggctgcccaatccttatttctgattgtccaaacactacccaccaaccttctgtcacactctgccttttttgtttcctgaatcatcacaacatccgacttttttgacctcagaaaatctttaaccatcctttgctttttccttgaacccaaacctctgatattccaactaattatctttatggaaaaaactcacaaaccctaatcctccaatctagttccaacaagtctcacaaacctgtggagcatttgctcttcctcttggaatataccttaatatctagagattttaaaacctcacgcactttagccattttcttgggggacaggccttctatttggaactcacccgatgggaagcccgcagtaacaccctggctaactgtaactaggttggagaccttattaggcaaaataggtttagacaaaattgggttaacactctcggtcagctggtatggatacgcaggctggatctcctccactacaagattagggatgccaacagaaatttgacctacagtaccaacgtcgtcttttttggaaaaaaattcagaggttactcgatttttcataggaaactaagactgaaaagctgaactaggaagattgggaacagaaggactcagaaaagaagaagccaaatcacaagaagggggtagagaagacgagggtgactgagtaggtgaagatgagattacctccaaattttccgctaccaacaattcacagttccccttaaagttaagccctttacctctgatttctggcatagagggcaaaaccgtgactgctgagccatgaagattggaccccactcagcccaaaaatccttctttgtcttcgtcaaaggaaagtttgctcatagccacttcgtctcttgacaacgaagccccttcccccaaacatctcttatgaaaccttggtgattgacgagaaataagaggactcgcactagatcctcattccgcctgagatccggccttgaaagcctcttcctttggaaactcttcgctgtttgccggatttttcccgtgcaatagaggctcgctgcaacaccgaagaccttgtcggcgatcagagcttggaggtaaaagggtagtccacagcttctttgaaccaaacttcacttccttctttgcggagctactcgactgaacctcaggaaatacagatgttgctttcccctttcccactgcagaagaatcttcttcctttcgtaacgaaacctctgtctcatctggcttctttcctcctaagcttaggcctaaccctatgggccttttatgttgcagcccacttttgcaattattggaccatgcttatacaaagactgggccttcctctcataggcccgatagccctcatcagcgtagacctcatccccaccggccctaactcctcccgcctcctcagtcccaactggcccatcgtccatttttttttaattcaaactgggcatcgatgggggtaggaaccaactgttccccacatcctgacctctcttaccacgtgtccccattggaaaaacaacaaccatacccctttctcctccctttctcattctgccatcttccccaacacggcatcttcccccagtcgttgatctgactctctccccccgccttcctccacctatccccgagtgagatgcaaaagcctcccaagtcaactcacccattacgctgcctctccgaacgtcttcatctccgaccactacgacaaaaattgtaaacacccaatccccgtctgtcacctcgatcaaagatggaaggactgacctgtccttcattgcaattcttaccctcgccttgctaagatcgaacaatttcaacgttcaccaatctatttcagtcaccgtcccccattgctccacaattttcttcaggtgtacctcagaccattgatgaaatggcaacccccgtaattcgatccagcctcctctgaacttcccctttatttccgaattttccttcggcgaccaccttctcaactggactatattccttccctcaaccctaagattcctcaaatcctaaagatagagagcttcctctattgtttcaacaaaaaaaactccttttccacctgagattggtacaactattgctacttctttcttccctaagcttctcgctaccgctcggccaatctcaacccatttaacgctatcagcattgcattcacacaccacggctcgtgcccacctcccaacaggaacaagaccaccttctcttggtccttcaccactgactatattcgcgaaagaccggtacagaggacccatgtgattgtggataaacctttcccctctgtattgtcttcatttttcaactacattcgaaagggggaccaccagcaatgaagacaacgcgcttttaagattctcccatcctctgcccttctcgcctacaagaataaccagaaaagaagattttctattggtagtgaactccgagatccttatgaaccttccgtggttgttgaagccaacttccatcaaatgaacacagaattttcccctaaactttctgttgaaccccaagcgactcttcattctgatggctttcgtcaaatgttcgatcatccacccgattgcatccttttcaaaacctaagacaaaaacagagcctctactgtgctctataattgagcaccaatttcctccgtgctcaccttccaacttaaccaaaaaggtcttcctctccacaaagaccttcaacgtccttaccatattctctcttaaagctaaaagccttatccttttgttggagattttaacagtgggaagaacttgatgttcaaaaaaggatcattagatagtccctgaggcctggctgagtggtaaggggttgggtagggatttgggaggttttctcttcaatggagcctttcagtgtgttttacctagacccatatttgaccactttcccattcttctagatgggggaggcttgaggaggggaccttctttgttcagattcgagaatatgtggctagaggaggagggctttgatgttattagctttacagttttgttttagctactaaactaaaagctttaaaagcaatgctgaaagtctagaataaagaagtgttttgtgttattgaagctagaaagggagtgaccatcaaccaagtggctttttgggatgtgacagagaggtttactgccctatctctggaagaagttaaagccagaaatgtggcaagggaggagtgtgacaccccaattttttgattattattattattatttatttttcaactaaacaattgatactcaaatacagtataagtgctctcaaaaatttaaatgttgagttcctacttgaatttgttcaaaaagaggatatggaaaacctgttataaagagtacatcctgtattaaacattgtgactattaagttaacaaaatatgttttgtttcacaaaagaaacttgtacaacattaatttacatataccaaaccccattgtttactacgagtagcccatactacaagtgtatctgacaaatatatacattacatcattccaacaaaaggtttagtcttgatacaaaaggcatggcctcaaaagactttcaatatgagcaaacaacatccaatcacagtaaagcattgctcaagcattctttcctgcataggtcttctgacctgcatctagaggtggaagggatagggtgagttcacaactcagtaggaaagtttataaccatcctaagtatacccttaaaaaccttgaattaaacgtttaataatatgcatgataaacatttcataaccattaacaaatgtgtaatcgtgtcaaacatgtatgcatgtgtttgttggtttcatcattgcttttccccatccatcctttcacaactgataaattgctgactcccaacaatctacacagcagatatcaatgctccacaagacactcgatcaatataataatgactattttgggacatcacccaagggcaagtcataccccgtgtcttttgggactcatacccaagggcaggaccaaccccatgtctttagggactaaaacccaggggcaggaccaaccccatacacccacatcggagtgtcttcttcgagggctttagggactttcacccaaggacctacggtcccacataaacaatatatcaaatgataaggcctgtagcatcacataagcacttcgccatcaataaattctctgaatatgatctgtgataattccatatccttcttgcaatgcaatcacaccataaaccatttcgacaacacaaaaccacgaatcttcataccaatatacgttccaacatcatggtaacatttcaatgcaataaaccgagatgcaatgacactttaaaagattttatgaaatcatagaaataacataaaattccaacaaataattcaaggaaagaaattagatacaccatagaatagcataaaattccctaccttacaccgacttccttttgtgtttcttctaagtaggcgatctttgcctattacgaggaactgaaatgaaacaacataatttaggttttagtttattgttgcaaatttttaattctcacattctctaatctatatcctacatgttttcaaatcaaatttgaattgaattaaacaatatttacaatgcatattaatttccctaattaattaccaaatactaattcttttgattttcttaaagcctaacctattaacaaatcccaagtgtccaaataacccaattcatcacatgtttactaatctatttttcaatcaagccaaattaaacaaagatttatgctgatcttaccattaataaaatacttaacttaaaatactttaatctttaattaattgtgatttttaactaaaacgggtttatagttaattatactcaacttttacacaatttttaccgttaattcttttcaacataccattaggaaccaaaataaacgaaaattacaaaattaaacaacttgcttacctcaaatctacactttctctctctagattctctctctaacccaagttgctgcaggtgaaatggtgcaaaacgagctgcagcccccttataaaggggtctccaagcacccaagcacaaggtggcagcccacatggctgccaccaatccacccaagtaggaggtggcattccactaactccaatttccaaattttgcactttagtccttcaagttatcaaaaataaaacccataattgcccattagtcctttaggttttcataaccctaattagtccctaagaacctaataagcatacttaggtcattcactaatcccacttaaccataatcaaagtttaattcataattaaatatgattagcactgaactagttttaatatctaattaagcaagcttaaagttgaatactaaaataatcattattgcctatttaattcattagtactaggtgttacaaggagtataaaaaatgggttcttaaggaggaaatttcttggtggtagaaattaagagaagtgtggttgaaggaggaagacagtaacactggttttttccataagatggggaatgcccatagaaggagaaactggttagccaagattaaagtgaatggaagatggctcatggaggagaatgaaattagagacagtgtagttggggctttccagaatcttttgatcaaagaaggggattggagacccgacatcggaggcttgtcttttgagatactaggaggttgtgaggctacaaggctggagctaccattttcagaagaggaggtgtttgctgctctctcagacctaggaaaggagaaagcaccaagtccagatgggtacactaacattttggctttttagttggaagtttgtgaaaaaagaggtgatggattttttcagtgatttccatgaggtgacatatttgtcaaggccttgaatgctacttttttggttctaattccaaagaaaggcggtgccaaagactttagggaatttaggtcaattagcctagtggacaacccctataagcttttggctaaagttttagccaatagatttaagaaggtattgggcaaagtgacctctgagtcccaaaatgcctttataggaggtagacaaattttggatgcagctttgattgcctaatgaggctgttgatttaagcctaaaatgtggtgaatgtggtgttctttgtaagcttgacatcgagaaggcataagattatctaaattggaagttcttgttggtggtgttaaggaaaatgggctttggggagaagtgggttgagtggattttttggtgcatctcaacaacaaattttttgtttttattaatgaaactgcatttggttttttccatagtactagggggttgagacagggggatcctttcttcccttatttatttgagattgctatggaggttttcttttgaagagggtgatgaatggtggctacctttccgagtggtgggtgaagggtagggaagggaatgagattcagatctcccacttattgtttgctgatgacaatgtagttgcatatgtgaggcatcccacttatggaatgggattcagatctccctctcatgttctatgaggtatcataggaccaaatggcctacctgagttggttgcttatgtggttcgaggcaatttgtgggttgagaattaacttagacaaaagtgagttaatccttgtggggaaggtgaacaatgtagaagacttagtttggagttggcttgcaagatgggcggtcttccctctttttacttaggtcttcctttaggggccacttttaaatctatggcagtttgggatggagtgaaagagaggttttgcaaaaggttagccatgaggaaaagataatacatctcgaaaggagggagactcactttgattcaaagtactctctctagcatgcttatttattttttgtctcttttttgcatgctaaggcaggttagattgagactgcagaagattcagagggattttctttggggtggtggggctcttgtgcagaaaccccatttagttagatggaaatcagtttgctcggagagaaggaaggggggtttgggagtgtcattcaacaatgaacaaagcttttctgtgcaagtggagttagcgctttaccaatgaaagtagggctctttggaagcaagtcatcatccagaagtttagtgaggatgatggggggtggtgttcctagaatatccttctctatgggaaatggtcagagggtaaaattctaggaggacaagtggtgtgaagatgagccactttgtgtttactttcccttccttagttgccttagccacttctaaggatgtgtgggtagcaaatgtttggaactttgaaggcgaaaggggtgggtgggctatttgcttctctaggtcatttaacgattgggaggtggaaagagtggaatgctttctgttgaagattcaagcaaagagggttaatagggatgaggaagataggatgctttggatgcctttgagatgtgggaaattttcggttaaatccctatactctattttggagcctgaagatcctactttgttcctgcggaatatcatttggagatcttgtgcaccacctaaggtggcttttttcgcgtgggaaacaacttgggggaaaaccctgactttggattaggttaaaagagggggttctctttggcaaatagatgtttcctttgccacattgaaaaagaaattgttgatcacattcttcttcactgttacaagacatgggttctttggcagcagcttttttctctctttggtgtttcttggttcctcttctcttcggttaaggagacactccttgggtggcatgggtcctttgtgggtaaaactcgtaaaaagtcttgaatggcaaccttgttatgtatttttttgacagtttgaaaataaaggaatatgatagtgtttgataatgcggaactatcggtccaaaggatgaaaaattcttttgtttataatttgtggtcttagtctagggtgtatgtggatatgaaccctatttctcttgttagctttattgattggcttggttctaagtgagggcaagtgatgttttatgtttctctccctctcccttttgggtgagcctttaggaggccggtgtatacttcttgtatactttgggaatttgttttgacgtttcctttttttttaatatatacactcttacttatcaaataaaataaaataaataaaacaatacttcagcaaacacttcatcaagaggcgacactagttcctttccaagaatccttcctcacacctcatctagatcctcgttgagacttgcgtaaaaatcaaacatcctttccttctctattaaccttctctatttttcaatacactcaaggcagcaatcggcctctaaataaatcttactcttaccataaagcttgaagatcagtgtaatattgagccacacaatgattatcttgtttggtctccttcaatttgcacctgatttcaaaaacctaggctgagtttctgaggtttgaataagtcctctttactgcatcccacactttctttgttgtaggtagaaagtacatttgaccgatcttgagctcctccattgaattaatcaaccatgcaataacaatggaatcttctaagtcccaattttgaaaggttggatcatcttcagatgaattctttgtggctcctatcaagtgccctaattttcctcttcctttaatcaccaatttcacagcctggggccattgcaatcaattttatccattcattttccatccaggaaattgtaaagaggtattgtctcctccatataacagggaagcagacatagtttgaatcgtctgttatataggacctgaagtagctactgaagactcgtttccgcaatgtcctctagtcatggcagtcttttccatgagattgaatcaggcccagatgtgttgcggctctaataccatgaaatcaaagaggaaaaatgcaactctttattctattttatgaagaatgcaagccttaaatatatagacaatctatttaggaagatgattatgaaaaataaaatattcctaagaaccaagaacctaagaaacagaaagctaaaaactagggtgttacttctttatttgaaaattaaaaaacagatcaatactctaatataataactggataattagctagagtttatccaaagttatctccaattgcgaacaaattctcttttgaagactcctacatctctcaaataatgaagttaaagaaaatagaaacttttacaagataaactttcatttcatcaaaggtcttttaaattctactactcaatttgactccaaataactcaaaattgcaaaattgtccatgtacccttaattaagtcaacttaggttttccttattccttattcccttttttcttttttgcaaatgagctttaatggctaatcgctatacgaaggaatttcctaataaaaacctttaatagggaggattattacttagccaaccaatccactacttggttggttggccaaggtatctagtagaacgaatgactcaatcaccctaagaaaccatgctccagttccccttaaaattcaagaaagagaattgctaaattttctttcactagaaagctattgatccccaagctctcaactcaaagaagctttccaataaggctagaatctatgcctcaatctcaaaccttaaaccaacatgcttaagaaggcactatttatgtaacccatcttgattactccactcttcatctatgttgggtccctagggaacacacctatcaaagttaagttttaggctctataaagaaggctcctatacctttgaaaccccaacttggaccctactgtctcctccaatctagcaaaatcatgccaattggaatgccctaaactccataggtaccacccttcaaatagatgtaaggaagtaaacaatttccaataggactctagggcctctacccattcttgaatctcgacattcctccaactaaataaattgcagattatggactccctttaaaatcattgaaggcaaagagcatcaaatcactaaggtcttttggggaagcccaataaatgtccaccatttgaaaatgtttgttccacaaaggtaaacaccaaagacaatgaaggaataaatgatccattgtattccatcaattctaaaagctaagtagggtgttcttatatgtaacaagtcattggtatcaacctttttacaaatcaccaatcaattgaagactcttaactttgggaagaactttaggctttaaattaaaattagcttgaagaaagacaatagaagtacaatcttagaatgagtaaaaactgttaggacgttgagtcttgtttatatgttggcaattttattccaatttattttttgtcatagaagtctttttagatagtgacttactattcattgaagatcaagggttgttgttcgtccaatcgagaggttatagttacgtctaaaaaggttttatttgttgcatataaaggcttatttgaggtataaaaggtttgatattatttttgagcttaaaatgtttttaaaatattttttcgaaaagcagggactacttaagcggttagagcactcaagcggtctaagaccactgataaataggaatgtgaacggtggttgccacttccaccccttgtcttaaggaaatagagtccattcttttctttagcatgcccattcatcctctctgtaacctgatcttgaaaaacacagtaggttggatagaaattcactttataattcaaatctttagtaacttgatgaatagacaaaagattgatagacaatttaggaacatgcaacacacttttgagtggaagaggggggaaataaagtaacggttccttgacctgcaacaatagtgaaagagccttctgtgattttttttttttttttcaataggtaaagagcctactgcaattttgattttcttattgctaggacaaggattattagtgataaatgactaagaagaatatgtcatatgattggttacttctgagtctatgacgcaagaatcattgtggagtgtgtttgaggcactaagggcataagtaggaaacttgtctgattgtacaaatgaacaggatccatttgttttttcaagggaattaaggagatttcccagcctctctatctcctctttattgaatccttcagtctccgagctacttaaattggaattctcacaaggatgaccttctgcatgagttaagtgagcctctcttctctgctgtccacccttaaaaccaccatttcggcctactccttggggtttcccatggagtttccaacaagtttctttagtgtgatgaggcttcttgtagtaggtgcaccatactccatcatggttggacgaccttgttgactcattcttaatgatcggttgtgcttccttgtcttgcaacatccctcttgattccttcatcacttgtttttgtggaaatcatggcaaaccacccttctaagagttgtgattcaagcatgacacctcttcggcttttttctgcttaaattattgagaaaacaccctgcaatgagggtagagtttctttccctaaaacttgcactcgaacttggtcaaactcaacattaagtcttgcgagaaactcaaaaatcctttccctttctacaaactttaataccatagcaacatctttactacacttcatttgaaaattttgataatagtccaattcaagccaacgtcctttcatgacattatagtattcagtggttgaaagagtaccttgtttggtggttgttatttttgtcttgatttcataaatcaaggttgtatcttgcatcttggaatcggtttggtgaactatttcccaaatctcccttgttgttgttagaaacatacaagtcctgcttacttcaggcaacatcgaattccataaccaagacatgattatggaatcttcctcgccccatttgacaaatgtaggatcattctaagtaggtctgattcccaataaagacttaatttcccttttcctttaaagtcttcaccacttgtgaccactgtaagtagtttttgtcattcaatcgatatgacgattgaatatgctgcaaccccttttttggagagttttgttgcacctctctagattggttttcagtaatcacaacaatagggttaactttggatgtttcagacatgactgaataatgggtaggactgaataatggacagctagaagagatttctcagagaatcaaatttctcagaaaaaaattttctgcaaaaagagtcgtaggattttgtagaaatttttttccaaagagcaagagctctaatagcatgaagaaaaaattattttctgctatattgaataatcctttacaaaggaaaaatatatatacagattacctacagcctatttaaggagagtttgacatcctatcacaatcctatcaatccctaaaaatcagaggacaactttactaaatacatgcaaattaggaaagtgttacaattgggaaactaatctattttaccaaaatccttacagctgtatattgatttctgcaagtcagataatcacatagattctccaacaggtttatagatacaattagtttgaaaagtttcatgactggaattaggtttttagatgcattctagatgcctgtagcatccaattagttttcattgaatgactgatgaaagcaaatgttaaaaagaaacagaaaccctttttctaatttctaaagaggaaaaaaaatgctatttaaaacaattcctttgttacaatttttaataggctcccgctttcatatttctcagttcat

SEQ ID NO: 12919 - DNA, 4891 bp, Vitis vinifera
  Intron number 5 from transcript GSVIVT01033712001 (locus G SVIVG01033712001) derived from phytozome v7.0 (chr-ID chr8 ; pos 18405667 to 18410557 reverse strand)
cagggttctgtgccccgaaaatcactcgtgatggttctgttggaatagaaaggcgccttttgatgctacggttgtacccaaacctattgtaatatcatttaccacaccaccctttttcttttacatctctgggtgttggtgtccgtaacgttatctaatcattcattattatttttattttcaatatttaataccataggtaacatatcattatggtgtatgcttctttctccgcttttgctttttattattagtttaacttattagtttgaattagagtaggatatagattttgaattaaaatagaagtttattatattttgaattagagtttgaattagaatcccaaatagagtttgaagtagagtaaaagttgaggtttgtcccgtcatgtattatttgtatataaatactcatggatcatgtattagaatgtcatgttatatttttgaaatcttcttcttcctctatatcatatcacgacattgctattcctatgtattggcaaggatactatggccaaaatcaatttgctcatttatattaacaatctttacttaagcccccacttggtctgttaatgtctaattcaaacctaccacaatatcctagtttcaatttctctttagagtttggagctccaaatttgtctaattcaaatctaccaaaattttcttctctttactttttaccacttttttgttcttgatttcttataatcttttgaatttttttttcctttttccttttttattgttgttctttgggaaattgattcttaactattaaaaataataataacagtaattcactagcgtcaacttttaccgattaagaaaatggtactaacacatttagtcttactttttttttcttatcatttttctataaaatattgatataatttgcactatatgtagggatgataatggaacaggtttgggactaggcacccatatctcatttccatcccacttatacaattatttttcatctttgtctcaaacctggggcaaggtcaatggatgtattccatcctcgtttacaaaaagaatagtaatcacatccccacctcaaatgtatattatgttggattagggttctaacaaagaattgtataccaaacacaataaatttgtaaatctctccagtgcacaaatgaaaagatcttgatcttgacctcaaatgaagtcgtcaccatggtccaaaccctaattcattatcctagcaaaacaacctcaaaaaaccctttgagtccatctcatacaatcccaccgaatcttcatcatggatgcaaaagtgtgaatggtaagattaaagaggagaaacaattgcaaagaaaaagggtcaagagatttgtaagaaaatggcttgagatagatacgagaaacaaacaatatgaagtgatttggttttaggaaagctactaaggtctttcattaacttgagactcatagaataggttatggttttagaataaaaggaatggagagaagaggggttgtttacagttgagaaaggagtcatctacgactaagagaagccttaaaatgaaggttgaatcatctatttatatgagggatgaattggtcaatttacatatagagcaggtgaggcaggacaagttagtacaaaattcatgcctatcccaaacctaactcaggttttaaataagtcttcatattcatcttatccctgattaatatactttcatattcatcccaatagagttagggcgggaaagtaatccgtttaacccaagaaactatcatccctaactatatgatgattactagttattgttatttgatctcaattcacattctcaacctctatttctctttgtataaaaggttcttagagataagttgaaaaccttagttttcttgaattttactcacttttcttgtaaatttaccttattttctcaacactcaagagttcttgaaaacctttttttattgtttattttctaaacaaaaggtatttttttcatatacttctctttttcaatattttcctttcttgttttttttcatgagtttttttttttttttttggcacccaaacaattgctcccatatattttctccttggtttctccatcttctttagatttgattgcttttttgcatgtctcaggaaaacaaacatggtcatgttcctctgcttgaaatctaccttttgctctgtcttttattttgcttcttgtgtcatctattgtattagtttctaaaacattatccagtttgatgctaaataagactcttaatcctactttttgttcaacaaattttctttctataaattctcaaatattttggaaataatgcttgagtaagaagatctcattgcttatgtctaacctcttagccacccagtcaaatccagtcaacacctcaacccttgggagactactctccaaagaagtcaaatacatcacatttattttctttctctcaagactgagattggaatattcaatcaaagctttgtcttgataagccatgttagtgaaagttaatatttattcttaatgcaaatattagtagttatttattagtagtttaacttagaatacaagataattattattagtttgaattagagtaaaaattgagatttatctcctcaaatattatttgtatataaaaattcatccattatcgattagaatgtcatgccatatttccctaattttctttttttctctatatagttatcatctattctaaggtaaactaaaaatatataaataggcttctatggagggtggtctccatagggtctaggtgttgagtggattcaactaagtgattgagaggttaggtaactacatcttcttgagttatatttccaaaatctttgataaatttgtttgatagaaaatttgatgaagaagaataggattaagagctttatttagcaccaaattgaatgatatttcagcatatggcatagaaggcaaagtagaaaaaaaatttactagaaaagtaagtgaaaatcaagagaatcaaacctctaagaaagcttatatatatggggggaaaggggttgaataatatttcagtaaatggcataaagaggcaaagtagaaagaaatttacaataaaattaagtgaaaatcaagagaatcaaacctctaaggaagcttacatataaagagaaagagaaagagagagggaggtttgaaaatatgaactaagagcaaacaaatataactagtaatcatcatataagtgcaaattatatcaattttctagagaaaaatgacaaaaaaaaaaaaaagcaagactaaatatatgagtactattttccaaatctgtaaaagcttaagctagtgaattattgttattattatttttaacagtcaagaatcaatctctctaagaataacaagaaaagaaaaaaaaatcaaaaaatgataagaaaatcaagaacaaaaatatggtaggaagcagagagaaaagaaaattctaatggattgaattaggcaaatttggagttgatcaactgcaaagaggttttgaaatcaaaatattgcatagtaaagaaagcattgacaaaccatgtgaggctaaagcaaagattgttaatgtaaatgaggaaaccgatttgaagccataatatccttaccaatacatatacatagcaaaaccactatcatttacaatagggttttataaacttctactctgattcaaactttatcttctactataattcaaactaatagtacatttttaccttcattcaaattctatgtgagactctaattgaaactaataataataaccttttatgagttaaacttataataaataaataatttaaattccaatcttaccccttttgcaaattaatcaaactggagatgacttttttattaggccactaaaaatggatgttttggttgagatcagcatgattggaaactgaatttcattcattcccgcttcgctcatgctccatgtacttgcacggcccctgccatcctgaccagacgggagcaaaagttggtgccctgccaagatgcattggggagtgctggtcagcactagtcgatctaatggacaatactcacaccattgccatgattccttcgcaggggtcagtataccaaatttcactatagaagtagtaatgaagggggcgaggacggggattcagagagaaaactttggcagcaccaacacatcaaacaagccttgtttgttcgaatttgttctctcttggctattattaattaatattgataggtttcacataggaagtaatttttgagatgtttaccttttccttctatattctcgtgcagaggccatacatgaaaagacaactccggcttatatttactaaaaataattaataataagataaaatagtctttaaaatattgtatcactgtcacaagagaatcattctggaattgcagagcaaacatattattttgatatactcgtttataacattgtcacgtttggaagcagaagacctgaaatttttagttttataaatctccattgtttaatagcttctatttgtttgctttctcaaatcgaatcagggtgtatcgtctggcttctttcttccaatgacattttttaccaaatgcccaacttatcaccaatggagcaaagacctgcacattgtgcagccacaatttggtccatttccatatttatcagccgattatgccgtgccaatagaagcaaaataatgaggatggtttcctatagtgtctctttctatgttctgcatacaacttggtttcttgtatttatcatccacatctgttttctaattaatgtccctttcttagtccaaggcacagaagtgaaggttcttatgctttatatagtatcttctaaatcaatttcattttatcact

SEQ ID NO: 12920 - DNA, 10770 bp, Vitis vinifera
  Intron number 6 from transcript GSVIVT01029969001 (locus G SVIVG01029969001) derived from phytozome v7.0 (chr-ID chr8 ; pos 2454020 to 2464789 reverse strand)
tgcagcgaaggctgcttacacccatcttaaagagcgtaagtaattgctttcttttaataagcattgttgaaatatccttatacacttgagtcctttgtcataattgtgtgcgtatacccacccaatagttcatgcccattatttgatatatagggagaaggatgcctgtaggagtattgttgtacagtatcctcacgatccttctcaggtaatgataatgtttttcattggggctgaagttagtgatgatctttagtgagcatccagaatttgaacattgcgtctacacagtaaataaaattcttttaccttggagaacatataaacttcaggagttaataattcttatttcacgtcagtagtgaatgatttcatttacttagttcttatcaatccttatgtagatactgaatgagacttcatatttttgaggttttagcatgaaaattggagtgcttagatatctctagatgtctatttaggtggtagttttttaggactttcattcctcaatttgatgtggatgtttatttcaaataatgaagtgggagaaatcattaaggtcagtgtcatgcatagctcggattagttttccaagatttatcaaattctcaattttctcttgaattgatctccaaagtccaaactttattttgtggacataaacttcactaatttctcctaaggtttaatttagctacaaggatgtccctcctagttctcaagttacattgagctccctccagcctcagttatatatgacaaactgtccctcgttgcaggctgttattgaaatggacagtgtgaaaatgtcatttttagctgcccctctttaatcaaggtctaacttattctagtcacccatttttagccttgttcacagaaaccaaatattgagaagaagaatgtggacaccacataggttatattggtttgcatgaccagcactgcagattagtatgcttgaatgaagaaaaagaaagaagaaaaggaaacaacctcatggttctcatcaggatttcttatacaaataagcatacaaatttacaaacttgtgttgctaacatgatattataattttatccttttagtgaatactctaccccatttccaaacagatagatcactcatgctcatctagtataatgcactctaacaaataatatattgaactctgtttgtaagcatgttttgcttagattggtctcctgttttctcaagtgtagaaatgtatcagaaattcaatttcttgaagttatcctgtgtaaaatatttgttaacctctatgttttttgttttattttcactgaattggatcagaatgatactgtttgctacacattatcattggtgcttgtactgaaccctaactcaccaagtaatatctttcaactaaagtggttcactaccctatgggcccagctctgaattttgcttttgcgcttgacctgctacactatcatttccctactttgtgtatacataacacccatgataaccaatatctagatgtagagcacctgatgcaattagctactgcccaaataatgcattagtaaaatcctctattctcatatgactatgttttccaaatgatgggcctttatcagcatctgattttaagtgcctcagaattctttaggctgtctctgtttgctcgataattattggtccttttcttaatagcttaagctttcaccatttctagtaatttaacgtaatattagaactctagtttttagcattgtctggttcgaaacttttgcctgttttgactcccatttatttgtctcttcacatgtctgttggtgctgcctacaaggaggggtgttaccatgaaatgcattgttacccattgtgcaatagttcgccttttggagataattgatagtgtaacaatctttgcataaacttccataggagcatgcatagattgactagctgcactaaccatatcaggatttgtgcatgaaagtcatttgagttgccctgctggtttatgagttcttcctacatctattgaagtgcaattgctgtcttcatttaaatgatgattcagatcaacagggttgtttatgaagctagcacattccttcagaaataaagatgcaatctttgaccttgtaacttcaatcctgatgaagttcttcagattcccaaggaccttgaccctggatctcaaatacctagggtaggtgcatgtgtccttttctctcgattaacaatggcctcaacattggtattaagggtgataagctttcacaatgagtttctgacaaagcaggatcagacaaatgtgaaactctaattgtagttaataatcaccttgtggaaactctcaaaaggtgctcttggtgactttttaaatccatgccaagcttctttaactggaaaatcttccctttttactgacatgtttcagaacctggggtcacatccatatatactccatcaagatgaccatgtaaaaaggcattctgaataccaaaataattacaggatcaatatagatttttttgcaagatatttgatttaggtcaccaaggcaaatgtttacttaaaatcagtaccttgggtttgataaacaggagtatgaagtaattctgtttgcagtaatttttctaccaactttaatgtggtagtctctaataatctgcttctcaccatgggtattgataccatttttacacaagacatggcaaacaaagtttgtgaaagtttcagtatttgaagaagtgaaggctttcagcgacttagaacattagcaatcctaaggcattagttatatcagttgatctttaaaatgaaaccaatctgtacctttctatggaaaaacaagggcatcctgaagccaagaattggttcaattgtttatatcatgctcttgacaccaatattttccaaagtattactgctcttgcaatatggtcagagttttttcaaagagagacttttctatttcaaatagaaaggggtatggttccctttattggtgatttggagaaaatctgaatggacagttttgaggaaaataaagtgcgaaccctagtgaataaaatccaattagtttgaagctttgcaataaggtagattatgctttattgggtttttgtaggtatgatcagatctatggacatcggcattctactggtgatatcagcagtccgtcgcgctgattctcaatcaatatatcagcatatcaacataccattagatatttactacaaagattggatggatcttaaagctatgaagtcatgctaatgtaagctgatgagctttgtgaatcatcaattgtatgtccattttatagtttggagattttgttgttcttagggtacctaaccacgtcaatctggttgaatcaccacacttgaatggttaatgagtggtcgtcacctccactaatttagttactagaagtgcttattggtaggagtgacaatttatgttgatatgttgtgtttgtattgtgtcaaagcttaggtattctactatatagttcaatccaaacttgagacaaataataattgtgtcaaaaacataaacccaaatactacctaattattaacaggtaacgcgttgtgtaacctatttaaccaatttaataatcaggtcctcctatttaataataaggttgagttaggtattgtatatatctatatgattaatgtctcaatcaaagatgtttatgactcaattgacttatttatttaaaaacaaatttaaattgagtcaaatacgggttaaatgatttaaaaatataattaggttaatagtggggttattaaatgggttaattcaagttagatttgttttatacaggttgactaaaaaattacccatttattaaacgagttatacaggtcgacacaaatttgacccaaacccatttatactcaacccaaacctatgaaaagtgtgttgggttcgtgtcatattggcgaattgtatcaaactttgccacccctactcattgggactcttttaattatagtgtttctgcttccattggtcctttctgcaaagcttccctattatgacttgtttgtcatccattttgcttacaggttgagtaattttcattcatttacataaaaattcagtctagttgtacagttttctttatgggaccactttatgttgcaaagttgagtgtgtcgagtaatgtaaaaataatgtcataaaaaggcaataaaattatgcgtgaatcatgaagctcacatggtgttattatcatacattaaccggtgtgctatggaagtggttccatactattttctgccctcactatcataatgttggtattgaaacttaatcctttctcatctgtactttgctttactactttctagtcacttttcttttgggagggaatctaaaggcttgtggcttttgggatctagtgattgagagaatcttgaggagattagatgggtgacaaaatgcttacttatcttttggaggtaggataactcttatctattcttgcctatcccacattcctagctactttctctcattgtttaagattcctgcttcagtggctgtaaaaattgagagattgcaaagggatttcttatggtcaggggttagggaaggtaaaagagatcatcttgttagttgggatgtagtgtgtaattcgaaggtaaaagggggattgggatctaggaagatttctctaaggaatctcgttctcttagggaaatggttgtggaggtaccctagggagggttccactctgtggcatcaggtcattttaagcatttatgggacacattccaatggttgggatgccaacactatagtcagatggtcacatcgttgtccttggaaggctattgcacaagtctttcaggatttttctaagtatactcggtttgtggtaagagatggggaaagaattcggttctgggaagacttatggtggggggaccaatctttaggttttcaatatccaagactatttagagtagtcacggataaaaatattcctatatcttcaattctcggttctactcatcccttctcttggaactttaatttatgttgtaacctttcagattctaagatagaagatttagaatgcctcatgaggtcacttgattgtttgcacttatcaccatcggtttcagatgcaagatcttgatctttatcttcttcagggctttttacagtcaagtctttctttctagccttgtcccaatgttttggttcttctccagttttccctgctaagctcgtttggaattcctaagtccctttcaaagtcaagtcttttgtctgggtaaatactaatgacttgctataattgagaagaccctacaaagctcttagttttgacatttgtaagttgtgcatgaagcatggtgaatcaactgatcatcttttcctacattgctctttgatgatgggattgtggcacaaattatttcagttagccaagatggattgggttcccttgaggagcatatccgacatgatgtccatcaattataagggttttggattatctaagagagggatagttttgtggcaagctgcgtgcattgctttaatttgggttgtatggcgggaaagaaatgcgaggatatttgaggataaagcaagaaattaagagaatctatgggattttattcacttccttgcttctctttgggctttttgttccatggtttttaaggggattccctttagtgtgttacaactagattggctagcagtgtgtagctccaatgggatggtctaacctagagagattgtttgtttttacattgtagtatcttgtttttgtattcttgtagttttgcttttctctgatgggaggattcctcatccttctcttgtacttcttttttctatcaatatatctctttgtcgtttcctatcaaaaatattagttgcctagtgcaggaattgtttgttagttgaagtaatacttggatcgttggaagttcagatttgtcaactcacaccatgaatccttcgtttggtcacagaaaatttttgtaaactagattgcagccatttagaactgaaaatctgggtttagcactcagctaaagaagtgagttctgtggaagtttggggacactagataagagtacttaagattgcacctactgcttgatgacaagaatttatggtcaggaacagaaaactcagatcacaggagatgggaagctttggtagttgtgtatggctaggaggatttgagccactatccaagttgtgacttgctttcagagccatttcctaattggtccaatcaaatctatgtagaccatgacagggttgaagtttcctggaattcaatatacatcacaggacacttatggctgtcttttacatgagagcttttagtttttatgtgggaggtagctaaggtttgctgatgaagattcatgttctctcttggaatgttagagggattaatgaaggggaaagtggaaagtcataaaatccttgatccaatgccaaatggtagacctagtttgtttgcaagagatgcaaattgtgagaaacttgggtgtgggcagatagggtgttgggggttaattgccatggaaatcagggtgtattcaatctcttgttgctttaaaaatgtgcagatggttttgtatggatgtttataggagtgtatgcgctggtcttaatgaggagagagaagttttttgggaggtaatataagtgggctttgaaatgatccctagtgtatcaaaggagatttcaatgtggtcagcttctttgtggaaaggagggattgcttgagatgcttaacagctatgatacacttttcggagattattgaggagcttcacttaagaaatcttcctcttgatggaggccctttcacttggtgtggcagatcaaataatcagttttcttctaggcttgatcatttccttgtcttggaagggtgggagaaccactttagtagaaggctggttttttaccacactcctatttttctagatggagaaggaatgagaaggggcaaaacaccgtttaggtttgaaaacatgaggctgaaagaggaagcgtttaaagaccttattagcaattggtgggtgggctacaatgtgaggggttcatatagtcacatcttggtgtttaagctcaaagctttgaaataagagctaaaagtatggaacaaagatatttttggtaatattatatccaataaagtcatagcttttaatgaaatgggtttctaggatgctaaggaaagtcatcctattagtggaggaggttgaggtcaagggaaaaacagaggatgaatttggaaattgggtagcattttgtagaggtctcttggcagtagaaatcaagagaattttagttaaaagagggagacaaaaacactaaatatttccataagatggctgatgctaatgcttgtagaagaaaaaactatttggttaaaattaaagtgaatgacaaatgattatcgaaggatgcagacataaaggagtgacaaatactttacatagccttctttccaagataggggagtgaagactgaatatcaatgagatgtcctttgacattttgggtcaagaagacacataattcctcaagttttcgttctttgaggaggaagtcttcttagccctttctagtttgagtagagggataaagtttctaggctagatggtttcaccatggctttttagcaaatttgttgagattttgtgaaacatgaggtgataagctttttcattgagttctctaagctatgttccttcaaaagaagccttaatgcctattttattgtgctagtcctaaaaaaaggaaggatatgcaagctccttgcaaagattttggctactagatttaaaaaagtggtgagtaaagtcatttcaacttcttagcatgcttttgtagaggtggacaaatcttggttgcagttctcatagaaaatgaaacaattaactcaagactgaagtgctttgagagtgagtcatttataagctaaatatcgagaaggcctataatcacattaattgggacatttctacgacttgtttctccattttgattaatgagaccctattttgagagttttagaggttcgaaataaggagatcgactgtttgtataccttttcatcatcaccatggaggtctctcttatataatgagtaggctaaggaaggggcctttttggcaagctttttggcgggaggtagaagaggaggaatcgaagtgtcccatatgttatttgctaatgataccctcatcctttgcaatgctagtatgaagcatatggagcatttgagctagatttcatgtggttttaagcaatctcaagattaaaaatcaatatagagaaaagtgacctgataccaaaagtcactgatgtggaggaattagtggggtttttgggttgtaaggtgggcaccacttatctgggacttccattgggtgccctttttagatatacttaggtttaggacgttgttgaggaaagattttagaaatgctatttggaagggacaaaacttatgcataaggagaaggctaactatgataaaaagttccctttctagcttccctaaatactttatgcttgttttcgtcatccagaggggggtgagcctaaggttggaagagattcgaagggatttccacctagttggttggtctcaaggatgaagatatttctatgagatctcatgtgtcgatgaattatgaaattatatatgggtgatatatttccaatcactgattttttggaatattttcacatttttcgatgatttttcaatttattttggttttatcccgattttatttggattttggccattttatcacctagtttgactggtcaacacgatcaacaagcctcacaaaattaattggagaggatgagagttaggaagcaagccctagtctcctagtcttccatgtgaagtatgggcatctaaccaattgggcactttgaccctttatggtatatgctaatataattaattatatcccttatttgttccccctaactttagctttaattaaattaattttaattattttatttttcaaattccttttaacaaattgttaaatgtataaaaaacatcataataatattgagtctttctttatatattttatataataattaaatataaaagaaatataaacttgtaaataaaattattaatatttttaaacataaaaatgcatacacatcattattattatttttttttctagatcttgattactagatagatcatcattttagtattaaaactagtttcacttttttatattattactaaatatcacaaattatattatgcatatattgttttctttaataaaacaattttaatacttgcattttcattgatatatccgtaaaatccagctattgatatttttgtgaaaattgatattttatcattggttggtccacagtttgcatgggcaagagggtgtttgggcatttgagctttgtccactcttgacaaagctcttttgggtaaatggtgttggtgatttgcaatagagagggactccttttggaagaaggtgatcacagggaaatatggggaggtagtgggaggttggtgctcaagagcagttagggaaaaatgtgaagcggaggtgtggaagacaatcaagagtgggtgagagatttttaacactataatcaattttaggtgggaaatggaaggagggtgaaattttggaaggataagtgattctgtgacttaccccttggagaaggttttcttgagttgtactccatagccattggcaagaatgcatggcttgctgaggtgttggagtaggaggaggatggtagtgtatcaaaccatcgtttttcaagacgactccatgactagaagctagatggggtggaaggtctttttaagaagttgctcaagcagataattggcagagatgtggaggataaaatggtcttgttgcactcaaaaagtggtattatttttagttaaatctctctactctatacaggaacccttagatcccactgagagttagtttttaggctttggagaaggattttaactctggatcaactcaaaagaaggtggtgaaaatcctgaataaatgctacatgtgtgaaggaaaagaaaaacagctgactgcattctccttcactgtttataagcagtaatctagtggtagttgatttactctttgtttggaatagagtgggtcatgcaatccctagtaaggaaagcactcttgagctgtcatgactcctttgtggggaaaaaaaggaagaaagcttggagaatatactgagaaagtggatcaatctatcaaataatcttttatatttaatttctgggtgtgggtgaaggtgtttataggagattgcctttcgtctatgttagactttattaattggctgagctcttggtagtgggtggtagttgttttttgagtttactgtgtttcatttaatgaatatatattgcttttgttatcaaataataataataataataagaataagaataataataaaaacaaacaaacaaacatgtgaaaataaagaaataggagggaaatgatttaattatgtatttcattaactagactccttgatcaaaaactgtggcagaatgtactctgtatcagcttttgaagtgatgtattggtttaaacaaaagcactcttttttggtttaagcataggctcatgaaaaaggaacctatgctttaacaagatattatcattattattttcaggtagatcaaatttgaaccataaatctctttcccct

SEQ ID NO: 12921 - DNA, 3265 bp, Vitis vinifera
  Intron number 13 from transcript GSVIVT01034254001 (locus GSVIVG01034254001) derived from phytozome v7.0 (chr-ID chr 9; pos 13555381 to 13558645)
agtttgcttggacaataactgaagacactgatacggtcagtatactttttgtttgcattattgaaaatagaaaaaatgatgatcttattatcattgcttcttatttgagttgttgttaccttttaatttattgttatttttcaaatttaaaagagaaacaaagacctttgtagaagggctgagaattacagaaagaggaagggaattccttcaaagagaagtataatttgttattgatatttgagatagtttgtgtttgaagaagcaaagttattttgggcctctttgcttatccaaaaaagaagcaaggatattacttcttcatctctatgcagcaagatttgtggaggcttattgaacacaaagatgaattgagaatgaatttctgattcattcatctaccatgtacatacagtcatatttatagatacaatggtctaaatccatttaagggagtggcctatttacaggaaataattcaaagaataaaatattctgaaatattctaaagaataaaatattttaaaatattctcaagatggatgatacttccaaaatttcagtagtgaatctccaatctttccatactcattatgtgatctatttggcaatgtatcaaaagttctggtgtcaaagaggaagtcccataaatagaaaaaaaaaaaaaaaaaaaaaaagaagagaaaatagaggcaatgcctataatttgcgtcggtagagagtatatcttattgaaaagattgctaggggaggatatttctcctatattatcacctgttctttaattttcagaaccaatcatatctgagcaactcagcatcaggaaaggcgcaatgttccatttctgatgagttcctcagttaatgtagaagagaaaaaatcatacagaatagaaacctgaaaatgcagaaaaaaattcaagttgttttgatttatctcagccatctaatttcactctaattcagtgtgtgctagacatgtgtatactactgataaagagaaaattttaaagcttaatgaatgatactagattcttgttgcaaacctactcaatggaactgattagatggtggatcatatgctactgaatggttgcaacaaattaactgtttatcaatcatggagagtatgtccattagaaacaaattcctatagaagtgatttaactgtctaattccttaggcggaagaataactctaatttagtcctacttgtctcgcattcctaactattttttctctctttttaagattccatctttagtcccatctaagattgagaaatttaatagggattttctttgatcaaagggatgagagaggataagagagaccgcctcatcaacttagacctagtatgcaagccaaagatggaagggggtttgggccttgggaggatttctttgaggaattatgtccttttagggaagtaactttagaggctcccaagagaaagttctaccctttgaccaagttattttgaccatctatggaacacaaccctacggttgggacaccaacattctagtcaggtggtcacatcaatctccttgaaaagttattgcataggttttttaggatttttctagattcacccattttgtggtaggtgatggtgtaagaatttgtttttgggaagatttgtgatggagggatcacagttagaaatctttctatcctatctatccttggagctaaattttggccacaacctaaatgacttggagatagaggatcttgaaagactcatattttgtctcacccatgcaccttgtcaccatccattctagatgccagaaatctttctatactttagacacaattccgttctttgtagctaaatttctatggaaatttaaagtctcatctaaggtcaaaacctttgcttggctagtggggggtacataaaaagataaacaccattgacatgttacaattacaaacatcttacaaagcccttagacttgaatggtgcattttgtgctaaaggggtggagaaacaattgatcattttttttttttttacattgaatggtgactttatgcctatgcctatggcaaaggctattcaaattagccaagattgaattccaccaaggagcatatgtgatatgataactatttcatataggggtttggagagctccattagaggtaaagccctatggcaaatcacttgtcttttgttgatatggtttgtgtagagggaaataaatgttagaatttttgagaagtgaagggtttcagagacaatttggaatctaattcatttctattcatctctttgggcctcttatatcatgacattcaagggcgtccctctcgatgttgttcagctcaactgatagtcgatgtgtagatcataagggattgaaaaatgaagatacgagagttgctttgatcctatttgatcgagatgatgttatttctcatggatgctaagatgtataaattttttatggttctacatggatatataggtcttattagtatatgaaatagtcaaatcttttttttttttgtttaacttttataagtttggggaggatttctcattcttctcatgtttttactttatccatttctattacattcttgtttatgattgaaaaaaagaaaaaagaaaaaagattgtttctctcttttaatgtctagtaaccagtcataacttgttgtagcatcacaagaggatcaggaccactaacccatggaaaatctttttggttgatcaatctttcaggattgttttatttgtttctccttcccttttagtctctatcaaattccttaatcgtggaagcaaatgatatttgaaaaaaggggaatgaaattctgatagttgatggctagatttcatcaaatgatggcaatttatttgttcacaatttaactactagggtccatcagatgatttatctatatgcatctttactgatgatcctcactatgcgattgattcaacttctgtgattcaatttctataactctgttggatattcaaaaatacctctgatgtatgtaaatgtaaatgataatgaagtggagagtattgaagtcctagaaaacttaaaaaatgctaaaccccctatgcgaactccatcttccattctgttagaatacagaattttcctgtggtggcagttatgatgagaggtatatttcattaatttttttgaaaatccaccaagcacaaagtctgctttttctattgtaaaaatcagagtattgagtgttttagtctgccattataaaaattttcaggtaga
